United States Patent Application Publication US 2018/0126003 A1 - sequence listing, part 74

SEQ ID NO: 134594 - DNA, 1266 bp, Artificial Sequence
  derived and/or modified sequence
atggtgaacaccaccaacatgaccagcgccgtggtggagttctgggagcgcaatatgcaccagatgactgacggcctggacaagccaggccagattcggtggcccttggcaatcaccctcgccatcgcctggattctggtttacttttgtatctggaagggtgttgggtggactgggaaggtggtctacttcagtgctacttatccctacataatgctgattatccttttttttcggggggtgaccttacctggagctaaggaaggcatcttgttctatataacccccaattttcgaaaattgtctgacagcgaagtatggctggatgccgctacacaaatctttttctcctatggattgggtcttgggtcattgatcgcactgggctcgtataatagtttccacaacaatgtctacagagacagcatcatcgtgtgttgcatcaactcttgcacctctatgttcgccggctttgtaatcttcagcatcgtggggtttatggcccatgtaacgaaaagatctatcgcggacgtcgccgcctccgggcccggcctggcttttctggcataccccgaagcggtcacgcaactcccaatctctcccctctgggctatcctcttttttagtatgctgttgatgctgggtatcgactctcagttctgcaccgtcgaagggtttatcactgctctggtagacgagtacccccggctactcaggaacagacgggaactctttatcgccgctgtctgcattattagctacttgattgggctgagtaacattacccagggaggcatttatgtgtttaaactttttgattattattctgccagcggaatgtcgctgctgttcttagttttctttgagtgcgtcagcatctcttggttttacggcgtgaataggttctatgataacattcaagagatggtgggctccagaccctgtatttggtggaagctgtgctggtccttctttactccgatcatcgtcgccggagtcttcatcttttcggccgtacaaatgaccccattgaccatgggcaattacgtctttccaaagtggggccagggcgtggggtggttgatggctctgagctcgatggtgctgatccccggatatatggcctacatgtttctcaccctgaaggggagcctgaagcagaggatccaagtcatggttcagccctccgaggatatagttagacccgaaaacggccccgaacagcctcaagctggatcgtctacctccaaagaggcttacatctag

SEQ ID NO: 134595 - DNA, 1800 bp, Artificial Sequence
  derived and/or modified sequence
atggctaccaatggatctaaagtcgcggacgggcagatctcgactgaagtatcagaggcacctgtggcaaatgacaagcccaaaaccttggtcgtgaaggtgcagaagaaggccgctgacctccctgaccgcgatacctggaaaggcaggttcgatttcttaatgtcctgtgtgggctatgcaattggcctgggaaacgtttggcgctttccttacttgtgtggcaagaacggcggaggagcattcctaattccctatttcctgaccttaatttttgctggggtgccattgttcctgctggaatgttcccttggccagtacacctcaatcgggggactgggagtttggaagctagctcccatgttcaagggcgttggacttgctgcagctgtgctgagtttctggctgaacatctattatattgttattattagctgggcaatctactatctgtacaacagctttacaacaaccctcccctggaaacagtgtgacaacccctggaataccgaccggtgcttttctaactacagcatggtcaataccaccaacatgacttctgcagtggtcgagttttgggagagaaacatgcatcagatgacagacggtctggataagcctggtcagatccgctggcctctggcaattaccctcgcaatcgcgtggatcctcgtatacttctgcatctggaagggggtcggatggaccggtaaagttgtgtatttcagcgcaacttatccctacatcatgttaatcatcctctttttccggggagtcacgctgcctggagctaaagagggcatactgttctacatcacgccgaatttcagaaagttatcagattcagaagtgtggcttgacgctgcaacacagatatttttctcctatggcctcggccttggcagtctgatcgctttagggagctataactctttccacaataatgtttacagagattctatcattgtttgctgtatcaacagctgcacttcgatgttcgccggatttgtcatattttccattgtgggcttcatggctcacgtaaccaagcggagcattgcagatgtggccgcttcgggtccaggtcttgccttccttgcctatccagaagcagttactcagttacctatatctcccctatgggcaattctcttcttcagtatgcttctgatgctaggcatcgattctcaattttgcacagttgaagggtttataacagctctcgtcgacgagtacccaaggctgttacggaatcggagggagctctttatcgcagcagtctgtatcatatcgtacctaattggtctgtctaatattacccaagggggaatctacgtctttaagctcttcgactactacagcgcatccggaatgtccctgctattcctggtcttcttcgagtgtgtgagcataagctggttctatggggtcaaccggttctacgacaacatccaggagatggtgggcagcagaccttgtatatggtggaaattgtgctggagtttctttaccccaatcatcgtggccggagtattcattttttcagctgtgcagatgacacccctcactatgggcaattacgtttttccaaaatgggggcagggtgtgggttggctaatggctctctctagtatggttctgataccgggttatatggcttatatgttcctgaccttgaagggtagtctgaagcagaggatccaggtcatggttcagcctagcgaggacatcgtgagacctgaaaacggccctgagcagcctcaagccggatcctctactagcaaggaggcctatatctag

SEQ ID NO: 134596 - DNA, 120 bp, Artificial Sequence
  derived and/or modified sequence
atggctaccaatggatcaaaggtagcggatggccaaattagtaccgaggtcagtgaggctcccgtggctaatgataaaccaaagaccctggtggtgaaagtgcagaaaaaggccgcatag

SEQ ID NO: 134597 - DNA, 1266 bp, Artificial Sequence
  derived and/or modified sequence
atggttaataccaccaacatgacaagtgccgtggttgaattctgggaaagaaacatgcatcagatgactgatggtctggacaagcctggtcagatccgatggcccctggcaatcacactggcaattgcttggatcctggtgtacttctgtatatggaaaggtgtcggttggaccggtaaggtcgtctatttctctgccacctacccctatattatgctgattattcttttcttcagaggagttacactccccggtgctaaagaggggatcctgttctatatcacccccaactttagaaagctgtccgatagcgaggtatggttggacgcagccacgcaaatcttcttttcttatgggctgggactgggttcactgatcgccctggggagctataacagttttcataacaatgtctatagggattcgattatcgtgtgctgtatcaatagctgtacctcaatgttcgccggtttcgttatattcagtattgtgggctttatggctcatgtgaccaagcggtccatcgccgacgtggcagcctccggacctgggctggctttcctggcctaccctgaggccgtgactcaactaccaatctcaccactctgggcaattctgttctttagcatgctgctgatgctcgggatagattcccagttctgtacagtggagggtttcattactgcactcgtggatgaataccccaggctgcttcgcaaccgcagggaattgttcatcgctgcagtctgtattattagctatttgatcggcttgtcaaatatcacacaggggggtatctacgtcttcaaactgttcgactattatagcgcctccgggatgtcactgctctttttggttttttttgaatgcgtctcgattagttggttctacggcgttaacagattctacgataatatccaggagatggtgggcagtaggccctgtatctggtggaagctttgctggtccttctttacgcccatcatagtagccggtgtgtttatttttagcgccgtgcagatgactcccttaacaatgggtaactacgtcttccccaagtggggacagggcgttggctggcttatggcgcttagtagcatggtgctgataccagggtatatggcatatatgttcctgaccctcaaaggcagcttaaaacaaaggatacaggtaatggtgcagcctagtgaagacattgtgcgtcctgagaacggccctgaacaaccccaggccggaagcagcaccagcaaggaggcttatatctag

SEQ ID NO: 134598 - DNA, 4502 bp, Artificial Sequence
  derived and/or modified sequence
tcccttccccgcgaccctccgcccgccctcggaagaccgagacagcggagaggttgcgggtgagctgcgctgagcccaggagccgaggagtcgggagcgcagtagcgctgagcccgagcccgagcggccccgcgtcccgagcgcatcggagcggccgagccgcccggatgcagcgcctgtcccgggcagcgcagccccggccgcaggatctcacccagggtggcagaaggaggccttctggagctgacccacccccgacgaccatcagggtgaggcaactccaaggtcctactctctttctgtgcctgttacccaccccgtcctcctagggtgcccttgagccgcaaaactgctgtccacgtggaccgggggtgacatcgcacgtccatctgccaggacccctgcgtccaaattccgagacatggcgaccaacggcagcaaggtggccgacgggcagatctccaccgaggtcagcgaggcccctgtggccaatgacaagcccaaaaccttggtggtcaaggtgcagaagaaggcggcagacctccccgaccgggacacgtggaagggccgcttcgacttcctcatgtcctgtgtgggctatgccatcggcctgggcaacgtctggaggttcccctatctctgcgggaaaaatggtgggggagccttcctgatcccctatttcctgacactcatctttgcgggggtcccactcttcctgctggagtgctccctgggccagtacacctccatcggggggctaggggtatggaagctggctcctatgttcaagggcgtgggccttgcggctgctgtgctatcattctggctgaacatctactacatcgtcatcatctcctgggccatttactacctgtacaactccttcaccacgacactgccgtggaaacagtgcgacaacccctggaacacagaccgctgcttctccaactacagcatggtcaacactaccaacatgaccagcgctgtggtggagttctgggagcgcaacatgcatcagatgacggacgggctggataagccaggtcagatccgctggccactggccatcacgctggccatcgcctggatccttgtgtatttctgtatctggaagggtgttggctggactggaaaggtggtctacttttcagccacatacccctacatcatgctgatcatcctgttcttccgtggagtgacgctgcccggggccaaggagggcatcctcttctacatcacacccaacttccgcaagctgtctgactccgaggtgtggctggatgcggcaacccagatcttcttctcatacgggctgggcctggggtccctgatcgctctcgggagctacaactctttccacaacaatgtctacagggactccatcatcgtctgctgcatcaattcgtgcaccagcatgttcgcaggattcgtcatcttctccatcgtgggcttcatggcccatgtcaccaagaggtccattgctgatgtggcggcctcaggccccgggctggcgttcctggcatacccagaggcggtgacccagctgcctatctccccactctgggccatcctcttcttctccatgctgttgatgctgggcattgacagccagttctgcactgtggagggcttcatcacagccctggtggatgagtaccccaggctcctccgcaaccgcagagagctcttcattgctgctgtctgcatcatctcctacctgatcggtctctctaacatcactcaggggggtatttatgtcttcaaactctttgactactactctgccagtggcatgagcctgctgttcctcgtgttctttgaatgtgtctctatttcctggttttacggtgtcaaccgattctatgacaatatccaagagatggttggatccaggccctgcatctggtggaaactctgctggtctttcttcacaccaatcattgtggcgggcgtgttcattttcagtgctgtgcagatgacgccactcaccatgggaaactatgttttccccaagtggggccagggtgtgggctggctgatggctctgtcttccatggtcctcatccccgggtacatggcctacatgttcctcaccttaaagggctccctgaagcagcgcatccaagtcatggtccagcccagcgaagacatcgttcgcccagagaatggtcctgagcagccccaggcgggcagctccaccagcaaggaggcctacatctagggtgggggccactcaccgacccgacactctcaccccccgacctggctgagtgcgaccaccacttgatgtctgaggataccttccatctcaacctacctcgagtggcgagtccagacaccatcaccacgcagagaggggaggtgggaggacagttagacccctgggtgggccctgccgtgggcaaggatacccggtggcttctggcacctggcgggctggtgacctttttaatccaggccccatcagcatcccacgatcggccttggtaaccgccgcggtagatcatttttatcccgccagggagtgtgatgcaggaagaccacatgcgctcctggcttttaaacctgttcctgactgttctcttactgccgaaacccttgactgttatctcggactttgcaggagttcctttccctccgaacgctgctccatgcacaggaaaagggcattttgtacaatggggacttcccgggaacgcttgctcttaagtaccagaagccggcggagctctggctttcgtgtttttggttttctccttcccaaggcagctggattgaaaaaacaaaacaaaacaaaaaaacccaggggcgtcagtcgatattcccagggccgcttctcctgcagtctgtggagcgtccttgtccccgccgccggaatgaatgagcattctgcagcccgatgtccctgtcccctcctcgccgggccattctgattggacctggcccagtgcaatctgtccagacaagccctgcttgctggaaaactgccacaagcacaattgatctctttttatcgccattccaggggcctcaggtcctactggggaaacttcctataccggagctccagtttctcttaagctgcccaatttcacagagtacaaaatagttgtaggggaaatcaaggtgaaggatctgtccgacagtcaagacggatccacagtaatctttcggtctccttaaactaccaccctcgctgccacccaccccaagctgctgccgcctcaccttccttgaaatttctcagcgggagtctcctcactgccactaaaatccacccagcccactaactgaggagctagtgttaatccagagaaccccccgcaatgtgcttccgagattcagactgcttcattgggaagtatgatttgttcctttctggaattgggctccgtggtggcggcggcacttcaagcaaagacagtttcttgcaagctccagtagctccgcgtgtctcatttgccaggaagatgggttcccacgtagcaaatcgtacattgtgccctgtagctccttagctagttagctcacaagccgtgttttatgactaatccttaataactatggtaaataactgtgactgtggggtttttaatctcttgtcattctcatccaaaagtgaccagcataccagttcttgcaataagatattaccctcagaatattaagcacattattgtagagaaaaaaaaatatgtgtacacatatgaacgcacaacatgcacattcatcctcacatgtggcacgtaaggtctcatttgatattgtgtaggaaatctgaagccttttcctgaggtcatctgtaaaatagtctcattgccaaggcatccccagtgccagctggtgaatccatgatcaaaatgcatacgtattgttaaatgataaggtttagaatgacaggaacccatcactgtgtctcatggtcccacttccccatctgtgtgtgaattcctttagactaagggcaggaagacttccagctttctctttgttcttcaatgtgaaactgagaccaagtctctctaagacaaatgcagtgtatttaatgtttgtaagcaattctaagtgagatgtttggcaagaaatcccctaactgatttccatccaaacctaccttatagagcacaatattaagtgttgtacaattactgtgagaactgtgaatatgtgtaacttttttttagtatttgcccggggggaaaaagatattgtattatcatatatgcttttttgcaataaggatttattctcagaacaccaagtaaatctatctctatataaaaaatatatgtaatatatacatattcaaagtatatacagagcctgttttaaaaaatacagtattatttagtaaaattatctgttctatggaccaaatgtaaaatatttataaatgaagatgcattttaaatgtctataaatggtgtcataactagagcacgggcgttatgtaagtttctaagaatttagaggataaataataaaggttctatgatatacaa

SEQ ID NO: 134599 - DNA, 472 bp, Artificial Sequence
  derived and/or modified sequence
ttccccgcgaccctccgcccgccctcggaagaccgagacagcggagaggttgcgggtgagctgcgctgagcccaggagccgaggagtcgggagcgcagtagcgctgagcccgagcccgagcggccccgcgtcccgagcgcatcggagcggccgagccgcccggatgcagcgcctgtcccgggcagcgcagccccggccgcaggatctcacccagggtggcagaaggaggccttctggagctgacccacccccgacgaccatcagggtgcccttgagccgcaaaactgctgtccacgtggaccgggggtgacatcgcacgtccatctgccaggacccctgcgtccaaattccgagacatggcgaccaacggcagcaaggtggccgacgggcagatctccaccgaggtcagcgaggcccctgtggccaatgacaagcccaaaaccttggtggtcaaggtgcagaagaaggcggc

SEQ ID NO: 134600 - DNA, 1756 bp, Artificial Sequence
  derived and/or modified sequence
ctagggtgcccttgagccgcaaaactgctgtccacgtggaccgggggtgacatcgcacgtccatctgccaggacccctgcgtccaaattccgagacatggcgaccaacggcagcaaggtggccgacgggcagatctccaccgaggcgtgggccttgcggctgctgtgctatcattctggctgaacatctactacatcgtcatcatctcctgggccatttactacctgtacaactccttcaccacgacactgccgtggaaacagtgcgacaacccctggaacacagaccgctgcttctccaactacagcatggtcaacactaccaacatgaccagcgctgtggtggagttctgggagcgcaacatgcatcagatgacggacgggctggataagccaggtcagatccgctggccactggccatcacgctggccatcgcctggatccttgtgtatttctgtatctggaagggtgttggctggactggaaaggtggtctacttttcagccacatacccctacatcatgctgatcatcctgttcttccgtggagtgacgctgcccggggccaaggagggcatcctcttctacatcacacccaacttccgcaagctgtctgactccgaggtgtggctggatgcggcaacccagatcttcttctcatacgggctgggcctggggtccctgatcgctctcgggagctacaactctttccacaacaatgtctacagggactccatcatcgtctgctgcatcaattcgtgcaccagcatgttcgcaggattcgtcatcttctccatcgtgggcttcatggcccatgtcaccaagaggtccattgctgatgtggcggcctcaggccccgggctggcgttcctggcatacccagaggcggtgacccagctgcctatctccccactctgggccatcctcttcttctccatgctgttgatgctgggcattgacagccagttctgcactgtggagggcttcatcacagccctggtggatgagtaccccaggctcctccgcaaccgcagagagctcttcattgctgctgtctgcatcatctcctacctgatcggtctctctaacatcactcaggggggtatttatgtcttcaaactctttgactactactctgccagtggcatgagcctgctgttcctcgtgttctttgaatgtgtctctatttcctggttttacggtgtcaaccgattctatgacaatatccaagagatggttggatccaggccctgcatctggtggaaactctgctggtctttcttcacaccaatcattgtggcgggcgtgttcattttcagtgctgtgcagatgacgccactcaccatgggaaactatgttttccccaagtggggccagggtgtgggctggctgatggctctgtcttccatggtcctcatccccgggtacatggcctacatgttcctcaccttaaagggctccctgaagcagcgcatccaagtcatggtccagcccagcgaagacatcgttcgcccagagaatggtcctgagcagccccaggcgggcagctccaccagcaaggaggcctacatctagggtgggggccactcaccgacccgacactctcaccccccgacctggctgagtgcgaccaccacttgatgtctgaggataccttccatctcaacctacctcgagtggcgagtccagacaccatcaccacgcagagaggggaggtgggaggacagttagacccctgggtgggccctgccgtgggc

SEQ ID NO: 134601 - DNA, 1080 bp, Artificial Sequence
  derived and/or modified sequence
atggccaccaaggagaagctgcagtgcctgaaggacttccacaaggacatcctgaagcccagccccggcaagagccccggcaccagacccgaggacgaggccgagggcaagcccccccagagagagaagtggagcagcaagatcgacttcgtgctgagcgtggccggcggcttcgtgggcctgggcaacgtgtggagattcccctacctgtgctacaagaacggcggcggcgccttcctgatcccctacttcatcttcctgttcggcagcggcctgcccgtgttcttcctggagatcatcatcggccagtacaccagcgagggcggcatcacctgctgggagaagatctgccccctgttcagcggcatcggctacgccagcgtggtgatcgtgagcctgctgaacgtgtactacatcgtgatcctggcctgggccacctactacctgttccagagcttccagaaggagctgccctgggcccactgcaaccacagctggaacaccccccactgcatggaggacaccatgagaaagaacaagagcgtgtggatcaccatcagcagcaccaacttcaccagccccgtgatcgagttctgggagagaaacgtgctgagcctgagccccggcatcgaccaccccggcagcctgaagtgggacctggccctgtgcctgctgctggtgtggctggtgtgcttcttctgcatctggaagggcgtgagaagcaccggcaaggtggtgtacttcaccgccaccttccccttcgccatgctgctggtgctgctggtgagaggcctgaccctgcccggcgccggcgccggcatcaagttctacctgtaccccgacatcaccagactggaggacccccaggtgtggatcgacgccggcacccagatcttcttcagctacgccatctgcctgggcgccatgaccagcctgggcagctacaacaagtacaagtacaacagctacagaagctggcccggcctgcactgcctgcccaagagctgcgacaacgacgccgccgcccacatcctggtgcacagcttcttctactacgccagcctggcctggaccggctag

SEQ ID NO: 134602 - DNA, 1080 bp, Artificial Sequence
  derived and/or modified sequence
atggcaactaaggaaaagctgcagtgcctcaaggatttccataaagacatactgaagcccagcccagggaagagccccggtacccgccctgaggacgaagcagagggcaaaccgcctcaacgggaaaagtggtcctcaaaaatcgactttgtgctgtcagtcgctggtgggttcgttggtttgggaaacgtctggcggttcccctatttatgttataagaatggcggcggagcttttctgattccctacttcattttcctgttcggctctgggctgcccgtgttttttctggagatcataattggacagtatactagcgagggcggtatcacatgttgggagaaaatctgcccactgttcagtggcattggatacgccagtgtggtcattgtctctctgttgaatgtatattatatagtcatcctagcctgggccacctactaccttttccagagcttccagaaggagcttccatgggcacactgcaaccacagctggaatacccctcattgtatggaggacaccatgcgaaaaaataagagtgtttggattacaatctccagcaccaactttacgtcccccgtcatcgaattttgggaaaggaacgtcctgagcttaagcccgggtatcgaccatccagggagtctgaaatgggaccttgcactttgtttgcttctggtctggctcgtgtgttttttctgtatctggaaaggggtgagatctacaggcaaagtagtgtactttacagccaccttccctttcgccatgctgctcgtcctgcttgtgcggggcctgacattaccaggtgcaggcgctgggattaagttctatctgtatccagatattactagactggaagatccccaggtctggattgatgccgggacccagatatttttttcatatgccatctgcctgggcgccatgacttccctcggcagctacaacaagtacaagtataacagctacagatcttggcctggactccactgccttcctaaaagttgcgacaatgacgcggcagcacatatccttgttcacagctttttctattacgccagcttggcttggaccgggtag

SEQ ID NO: 134603 - DNA, 1080 bp, Artificial Sequence
  derived and/or modified sequence
atggccaccaaagagaagcttcaatgcctgaaggatttccataaggatatccttaagccgagtcccggaaagagtccaggcacccgccctgaggatgaagccgaagggaaaccaccccagcgggagaagtggagctctaaaatagatttcgtgctgagcgtggccggcggtttcgttggactgggcaatgtctggaggtttccctatttgtgctataagaacggaggcggtgcattcctgatcccatactttatctttctcttcggatccggactgccagttttttttctggaaattatcattggacagtatactagcgaaggcggaatcacttgctgggagaaaatatgccctctttttagcgggattggctatgcgtccgtggtcattgtttctctactgaacgtgtactacatagtcattctcgcatgggcaacctattacctcttccagtctttccagaaagaattaccatgggcccattgtaatcactcctggaacactcctcactgtatggaagataccatgcggaagaacaaatccgtctggatcaccatctcctctaccaactttacatccccggttatcgagttttgggagcgcaacgtcctcagcctgtcccctggaatcgaccaccccggctctctgaaatgggacctggctctgtgtcttctcctcgtctggttggtctgtttcttctgcatctggaagggtgtgaggtccacgggaaaagtggtttactttaccgctaccttcccctttgcaatgttattagttcttttagtgagggggctgaccctgcctggggccggcgccggcataaaattctacctctatcctgatatcactagacttgaggatccgcaggtctggatcgatgccggaacgcaaatcttcttcagttatgctatctgcttgggcgccatgacctcactcggcagttataataaatacaagtataactcataccgctcatggccaggcctgcactgcctccctaagtcctgtgacaacgatgcggctgctcatatccttgtccatagcttcttttactacgcctcacttgcctggaccggctag

SEQ ID NO: 134604 - DNA, 1080 bp, Artificial Sequence
  derived and/or modified sequence
atggccaccaaggagaagctgcagtgcctgaaggacttccacaaggacatcctgaagcccagccctgggaagagccctggcaccaggccagaagatgaggccgagggcaagccaccccagcgggagaagtggagcagcaagattgactttgtgctgtctgtggccggcggctttgtgggcctgggcaatgtgtggaggttcccctacctgtgctacaagaatggaggaggagccttcctgatcccctacttcatcttcctgtttggcagcggcctgcctgtgttcttcctggagatcatcatcggccagtacaccagcgagggcggcatcacctgctgggagaagatctgccccctcttctctggaattggctacgcctctgtggtgattgtgtccctgctgaatgtgtactacatcgtcatcctggcctgggccacctactacctgttccagagcttccagaaggagctgccctgggcccactgcaaccacagctggaacaccccccactgcatggaggacaccatgaggaagaacaagtctgtgtggatcaccatcagcagcaccaacttcaccagccctgtgattgagttctgggagagaaatgtgctgagcctgagccctggcatcgaccaccctggcagcctgaagtgggacctggccctgtgcctgctgctggtgtggctggtgtgcttcttctgcatctggaagggcgtgcgcagcacaggcaaggtggtgtacttcaccgccaccttcccctttgccatgctgctggtgctgctggtgcggggcctgaccctgcccggggccggggccggcatcaagttctacctgtacccagacatcacccggctggaggacccccaggtgtggattgatgctggcacccagatcttcttctcctatgccatctgcctgggcgccatgaccagcctgggcagctacaacaagtacaagtacaacagctaccgctcctggccaggcctgcactgcctgcccaagagctgtgacaatgatgctgctgcccacatcctggtgcacagcttcttctactatgccagcctggcctggacaggatag

SEQ ID NO: 134605 - DNA, 1080 bp, Artificial Sequence
  derived and/or modified sequence
atggccaccaaggagaagctgcagtgcctgaaggacttccacaaggatatcctgaaaccctcgcccggaaaaagtccaggcactaggccggaggatgaggccgaagggaaacctccacagagggagaaatggagcagcaaaattgacttcgtcctttctgttgccggcgggttcgttggcctcggaaatgtgtggcggttcccctatctgtgttataagaacggcggcggggcgtttttgattccatatttcattttcctgttcggctctggactacccgtgtttttcctcgagataattattgggcagtatacgtccgaggggggcattacttgttgggagaagatttgcccactattcagcggaatcggttacgcatcagtggtgattgtgtcgttactgaatgtctactatatcgtgatcctcgcctgggcaacctattacctgttccagagcttccaaaaagagttaccctgggcccactgtaaccactcttggaacacgcctcactgtatggaggacaccatgagaaagaataaaagcgtgtggatcaccatctcatccaccaattttacaagcccagtgatcgaattttgggaaagaaacgttctgagcttatcaccaggcattgatcatcctgggtccttgaagtgggatctggcactatgcctcttgctagtctggcttgtttgcttcttctgcatctggaagggggtgcgaagcacgggaaaagtagtctactttaccgccacatttcctttcgcaatgctgctggtcctgctggttaggggtctaaccttaccaggcgcaggagctggtatcaagttctatctgtacccagacatcaccaggctagaagatccacaagtctggattgatgcaggcacacagatcttcttctcatacgctatttgtttgggcgctatgacttctctgggctcatataataagtataagtacaattcttaccgtagttggccaggattgcactgcctcccaaaatcgtgcgataatgatgcggctgcacatattctggttcattctttcttttattatgcctctcttgcctggacgggatag

SEQ ID NO: 134606 - DNA, 1080 bp, Artificial Sequence
  derived and/or modified sequence
atggccaccaaggagaagctgcagtgcctgaaggacttccacaaggatatcctgaagccttccccggggaaaagcccaggaaccaggccagaggatgaggccgaagggaaacctcctcaacgggaaaaatggtcaagtaaaatcgacttcgttttatctgtggctggaggctttgtgggcctcggaaacgtctggagatttccctacttgtgctacaagaacgggggcggggctttcctgataccctacttcatctttttgtttggatcaggactgccggtgttcttcttggaaattatcatcggacagtacactagtgaggggggcattacctgctgggaaaaaatatgccctctgttctcaggcattgggtatgcatcagtggtgattgtgtctttgcttaatgtgtattacattgtgatcctcgcctgggccacttactaccttttccagagctttcagaaagaactgccgtgggcacactgcaaccatagttggaatactccccactgcatggaggacaccatgcgcaagaacaagtcggtgtggattacaatttcctcaacgaacttcacaagtcccgtgatcgagttttgggagcggaacgttctcagcctgagtccaggcattgatcacccaggcagcctgaaatgggaccttgccctctgtctgctcctggtttggcttgtttgctttttctgtatttggaaaggcgtgcgctctactggtaaagtggtgtattttacagcaacatttccttttgcaatgctgttagtgttgctggtacgcggcttaactttacctggcgcaggagccgggattaagttctatctgtacccggacatcacccgtttggaggacccacaggtgtggatcgatgccggtactcagattttcttcagctacgctatctgcttgggggcgatgactagcctgggcagctataacaaatataaatacaacagctaccgctcatggccagggctccactgcctgccaaaatcctgcgataacgatgcggccgcacatatattggttcatagcttcttttattatgcgtctctcgcttggaccgggtag

SEQ ID NO: 134607 - DNA, 1080 bp, Artificial Sequence
  derived and/or modified sequence
atggcaactaaggagaagcttcagtgtcttaaagattttcataaagacatcttgaagcccagcccaggcaagagtccaggtactcggcctgaggatgaagccgaaggaaaaccccctcagagagaaaagtggagctcaaagatcgacttcgtgctgagtgtggccggtggcttcgtaggactgggtaacgtgtggagattcccttacctctgttacaaaaatggcggtggcgctttcctgattccgtactttattttcttgttcggctccggcctgcccgtgttctttctcgagattatcattgggcagtacaccagtgaggggggtatcacctgctgggaaaagatctgcccacttttcagtggaattggctacgcctcagttgtcattgtttcccttttaaacgtatactacatcgtgattttagcttgggcaacttattacttatttcagagctttcagaaggagcttccgtgggcacattgtaaccactcctggaacaccccacactgtatggaggacactatgagaaagaataaatctgtttggattacaattagttcgacaaactttacctccccggttattgaattctgggagcgcaatgtgcttagcttgtcccccggaattgaccaccccggatccctgaaatgggatctcgctttgtgcctgcttctggtctggctggtgtgctttttctgtatttggaagggagtgcggtccacaggtaaggtggtgtacttcacagcgacgtttccatttgctatgcttctcgtgcttctggtcagagggttaacactccccggagccggagcgggtataaagttctacctctaccctgatatcacccggcttgaggatccccaagtgtggattgatgctggcactcagattttcttttcctacgctatttgcctgggtgctatgacatctttgggcagttacaacaagtataagtacaatagttaccgctcctggcctggattgcattgtcttccaaagtcatgtgataacgacgcagcagcccacattctcgtacacagcttcttttactacgcaagccttgcttggacgggttag

SEQ ID NO: 134608 - DNA, 1080 bp, Artificial Sequence
  derived and/or modified sequence
atggccaccaaggagaagttacagtgcctaaaggattttcacaaggatattcttaaaccgtctccgggaaagtccccgggaactcgaccagaagatgaagccgagggcaaaccccctcagcgcgagaagtggagttcaaaaatagactttgtgctaagtgttgcgggtggtttcgttggactggggaacgtctggagatttccttacctctgttacaagaatggaggaggtgcctttcttatcccttactttatatttctgttcggctcaggtctgcctgtattttttctggagattattatcggtcagtacacaagtgaaggtggaattacatgctgggagaagatttgccctttattttcaggcattgggtacgctagcgtagttatcgtgtccctactgaacgtatactacattgtgatcctggcatgggccacatattacctctttcagagttttcagaaagagttaccatgggcccattgtaaccactcatggaatactccacactgcatggaagataccatgaggaagaacaaatccgtgtggatcaccatctcatcaacaaactttacctcacctgtgatcgagttttgggagagaaatgtcctgtcattgagtcctggcatagaccatccaggctccctaaagtgggatctggccctctgcctcctgctggtgtggctcgtgtgtttcttctgcatctggaagggggtccgcagtaccggcaaagtagtgtactttacagctacttttccatttgcaatgctcttggtgcttttggtgcgaggcctgaccctccccggagcaggggctggaattaaattttacctgtacccagacatcactcgcctcgaagacccacaggtgtggatcgacgccggaacgcagatcttctttagttacgccatctgtctgggtgcaatgacttccttgggctcgtacaacaagtataaatataactcgtatcgctcttggccagggctgcactgtctcccgaaaagctgcgacaatgacgctgccgctcatatcctagttcacagcttcttttactatgcctcactggcttggaccgggtag

SEQ ID NO: 134609 - protein, 697 aa, Artificial Sequence
  derived and/or modified sequence
MKIETSGYNSDKLICRGFIGTPAPPVCDSKFLLSPSSDVRMIPCRAALTFARCLIRRKIVTLDSLEDTKLCRCLSTMDLIALGVGSTLGAGVYVLAGEVAKADSGPSIVVSFLIAALASVMAGLCYAEFGARVPKTGSAYLYTYVTVGELWAFITGWNLILSYVIGTSSVARAWSGTFDELLSKQIGQFLRTYFRMNYTGLAEYPDFFAVCLILLLAGLLSFGVKESAWVNKVFTAVNILVLLFVMVAGFVKGNVANWKISEEFLKNISASAREPPSENGTSIYGAGGFMPYGFTGTLAGAATCFYAFVGFDCIATTGEEVRNPQKAIPIGIVTSLLVCFMAYFGVSAALTLMMPYYLLDEKSPLPVAFEYVGWGPAKYVVAAGSLCALSTSLLGSMFPLPRILFAMARDGLLFRFLARVSKRQSPVAATLTAGVISALMAFLFDLKALVDMMSIGTLMAYSLVAACVLILRYQPGLSYDQPKCSPEKDGLGSSPRVTSKSESQVTMLQRQGFSMRTLFCPSLLPTQQSASLVSFLVGFLAFLVLGLSVLTTYGVHAITRLEAWSLALLALFLVLFVAIVLTIWRQPQNQQKVAFMVPFLPFLPAFSILVNIYLMVQLSADTWVRFSIWMAIGFLIYFSYGIRHSLEGHLRDENNEEDAYPDNVHAAAEEKSAIQANDHHPRNLSSPFIFHEKTSEF

SEQ ID NO: 134610 - DNA, 2094 bp, Artificial Sequence
  derived and/or modified sequence
atgaagatcgagaccagcggctacaacagcgacaagctgatctgcagaggcttcatcggcacccccgccccccccgtgtgcgacagcaagttcctgctgagccccagcagcgacgtgagaatgatcccctgcagagccgccctgaccttcgccagatgcctgatcagaagaaagatcgtgaccctggacagcctggaggacaccaagctgtgcagatgcctgagcaccatggacctgatcgccctgggcgtgggcagcaccctgggcgccggcgtgtacgtgctggccggcgaggtggccaaggccgacagcggccccagcatcgtggtgagcttcctgatcgccgccctggccagcgtgatggccggcctgtgctacgccgagttcggcgccagagtgcccaagaccggcagcgcctacctgtacacctacgtgaccgtgggcgagctgtgggccttcatcaccggctggaacctgatcctgagctacgtgatcggcaccagcagcgtggccagagcctggagcggcaccttcgacgagctgctgagcaagcagatcggccagttcctgagaacctacttcagaatgaactacaccggcctggccgagtaccccgacttcttcgccgtgtgcctgatcctgctgctggccggcctgctgagcttcggcgtgaaggagagcgcctgggtgaacaaggtgttcaccgccgtgaacatcctggtgctgctgttcgtgatggtggccggcttcgtgaagggcaacgtggccaactggaagatcagcgaggagttcctgaagaacatcagcgccagcgccagagagccccccagcgagaacggcaccagcatctacggcgccggcggcttcatgccctacggcttcaccggcaccctggccggcgccgccacctgcttctacgccttcgtgggcttcgactgcatcgccaccaccggcgaggaggtgagaaacccccagaaggccatccccatcggcatcgtgaccagcctgctggtgtgcttcatggcctacttcggcgtgagcgccgccctgaccctgatgatgccctactacctgctggacgagaagagccccctgcccgtggccttcgagtacgtgggctggggccccgccaagtacgtggtggccgccggcagcctgtgcgccctgagcaccagcctgctgggcagcatgttccccctgcccagaatcctgttcgccatggccagagacggcctgctgttcagattcctggccagagtgagcaagagacagagccccgtggccgccaccctgaccgccggcgtgatcagcgccctgatggccttcctgttcgacctgaaggccctggtggacatgatgagcatcggcaccctgatggcctacagcctggtggccgcctgcgtgctgatcctgagataccagcccggcctgagctacgaccagcccaagtgcagccccgagaaggacggcctgggcagcagccccagagtgaccagcaagagcgagagccaggtgaccatgctgcagagacagggcttcagcatgagaaccctgttctgccccagcctgctgcccacccagcagagcgccagcctggtgagcttcctggtgggcttcctggccttcctggtgctgggcctgagcgtgctgaccacctacggcgtgcacgccatcaccagactggaggcctggagcctggccctgctggccctgttcctggtgctgttcgtggccatcgtgctgaccatctggagacagccccagaaccagcagaaggtggccttcatggtgcccttcctgcccttcctgcccgccttcagcatcctggtgaacatctacctgatggtgcagctgagcgccgacacctgggtgagattcagcatctggatggccatcggcttcctgatctacttcagctacggcatcagacacagcctggagggccacctgagagacgagaacaacgaggaggacgcctaccccgacaacgtgcacgccgccgccgaggagaagagcgccatccaggccaacgaccaccaccccagaaacctgagcagccccttcatcttccacgagaagaccagcgagttctag

SEQ ID NO: 134611 - DNA, 2094 bp, Artificial Sequence
  derived and/or modified sequence
atgaagatcgaaacgagtggctacaactccgacaagctcatctgtaggggcttcattggaacacccgcccctcctgtgtgcgactcaaagttcctgcttagcccttcctctgatgtgcgcatgatcccctgtcgcgccgctctaacattcgcccgttgtctcattcgcagaaagatcgtgacgctcgactcactcgaggacaccaagctatgtcgctgtttaagtactatggacttaattgctctgggagtcggaagcacactgggcgctggcgtgtacgtgttagccggagaggtcgccaaggctgactctggccccagcatcgtagtgagcttcctgatcgcagctctggcctccgtgatggccggcttgtgttacgctgaatttggggcaagggtccctaaaaccggttccgcctacttgtacacctacgtcaccgttggtgagttatgggccttcatcacgggctggaatttgattctgagctacgttattggaacttcctcagtggcaagggcctggtccgggacttttgacgagcttctgtcaaagcagataggccagtttctaaggacttactttcggatgaactatactgggctggcagaatacccggacttcttcgccgtatgtctgatcttactattagctggcctgctttcatttggagtgaaggaaagcgcctgggtgaacaaggtgttcaccgccgttaatattctggtgctcctcttcgtgatggtcgcagggtttgtgaagggcaatgtggccaactggaagatttctgaagagttccttaagaacatctctgcttctgcgcgagaacctccgagtgagaacggaacctccatatatggggcaggggggttcatgccatacggtttcacgggaaccctggctggagccgcgacttgtttctacgcattcgtcgggtttgattgtatcgcaaccacaggggaggaggtgagaaatccccagaaagccattccgatcggcatagtaacaagtctcttagtgtgtttcatggcatacttcggtgtctccgcagctttgacactgatgatgccgtactacttgctggacgagaaatcccccctcccagtggcgtttgagtatgtgggttggggaccggctaagtacgtcgtagctgcagggagcctgtgcgcattgagtacatcattgctgggctcaatgtttcctcttcctcggatcctgtttgcaatggcaagggacgggcttctctttaggttcctggccagagtgagcaaaagacaatcacctgtcgcagccactttgaccgccggcgtaatctcggctttaatggcatttttgttcgaccttaaagctctggttgatatgatgagtattggcaccttgatggcctactccctggtggccgcatgtgtacttatactgcgttaccaacccggcctgtcatacgaccaacccaagtgtagtcccgagaaagatggccttggctcctctcccagggttacctctaaatccgagagccaggtgactatgttgcagcgacagggcttctccatgaggactctgttctgtccctcactgttgcccacacagcagtctgctagcttggtttcctttcttgtgggatttctggcctttctggtcctaggcctgagtgttttaactacctacggtgtccacgcaatcacacgacttgaagcttggagcctggccctgttagccctgtttcttgtcctgttcgtcgcaatcgtgctcacaatttggaggcaaccccagaaccaacagaaagtcgccttcatggtaccttttctgcccttcttacctgcctttagtatcctagtaaacatatatctgatggtgcaactgagcgccgacacatgggttaggttcagcatctggatggcgatcggcttcttgatctacttctcctacggcataagacactcgcttgaaggccacctgcgcgacgaaaacaatgaagaggacgcttatcctgataatgtgcatgccgcagcagaggagaaatctgccattcaggctaacgaccatcacccccgaaatcttagcagtccattcatttttcacgaaaaaacgagtgagttctag

SEQ ID NO: 134612 - DNA, 2094 bp, Artificial Sequence
  derived and/or modified sequence
atgaagatcgagacgtccggctacaattcagacaagttaatttgcagaggattcatcggtaccccagctccaccagtctgtgattctaagtttctgctttcccccagcagcgacgtgcggatgatcccttgtcgcgccgctctcactttcgctaggtgtcttatccgccgaaagatcgtgactctcgactccctcgaggatactaaattgtgccgctgtctgagcactatggatctcatagctttgggggtcggttctacgctcggcgctggcgtgtatgtgctcgctggcgaggtggctaaagccgactccggacccagcatcgtggtgagctttcttatagcagcactagcctctgtcatggccgggctgtgctacgctgaattcggcgctcgggtgccaaagacgggctctgcatatttatatacatatgtgacagttggcgaactgtgggcattcattacagggtggaaccttatcctaagctacgttatcggtacgagtagcgtggcacgtgcctggagcggaaccttcgatgaactgctgtcaaagcagattggccaattcctaagaacatattttaggatgaactatacaggtttggcagagtaccctgacttctttgcagtttgcctgatcttacttttggccggcctgctaagtttcggggttaaagaaagtgcctgggtcaataaggtttttacggccgtgaacatcctggtgctgctttttgtgatggtggccggcttcgtcaaaggaaacgttgcaaattggaaaatctcagaggagtttctgaagaatataagtgcctctgcacgagagcctccatccgagaatggaacaagtatatacggcgccggcggcttcatgccatacggattcactggaacactagccggagccgctacctgtttctacgccttcgtcggcttcgactgcattgccacaacaggggaagaggtcaggaatcctcaaaaagccatacctatcgggatcgtgacttccctgctggtgtgcttcatggcttactttggcgtctccgccgcattgacactcatgatgccgtactacctactagacgagaaaagtcctcttcccgtggctttcgaatatgtcggctgggggcccgctaaatacgtagtggcggctgggtccctgtgtgcattaagcacttcactgctcggatcaatgttccctcttcctaggattttgttcgctatggccagggacggcctgttgtttagatttctcgctcgggtgtccaaacgccagagccctgttgcagccacactcacagctggagtaattagtgctctgatggctttcttgttcgacctgaaggcactagtggatatgatgtctattggaactctgatggcgtactccctcgtggcagcttgtgtgctgatcctgaggtatcaaccgggactaagttacgaccaacccaaatgctctccggaaaaggatgggttgggttctagcccaagggtgacctcaaaatcagaatcccaggtcactatgttacagcgtcaagggttttccatgcgcacactgttctgcccctccctgttgccgactcaacagtcagccagcttagtgtctttcctggttggatttcttgcgttcctggtcctgggactctccgtgcttacaacatacggcgtgcacgcaataacccgcctggaggcttggagtctggcactgcttgctctgttccttgttctcttcgttgctatcgttctgaccatatggagacagccccagaaccagcaaaaagtggctttcatggtcccatttctgcccttcctgccagccttcagtatactcgtcaacatctacctgatggtgcagctctccgccgatacgtgggtcaggtttagcatctggatggccatcggtttcctgatttatttctcctacggtatccgacattcgctggaggggcatctgcgcgatgagaataacgaggaggacgcttatcctgataacgttcacgctgctgctgaagagaagagcgccattcaggctaacgatcatcatccgcgcaacctgtctagcccttttatcttccacgaaaaaacatcagagttctag

SEQ ID NO: 134613 - DNA, 2094 bp, Artificial Sequence
  derived and/or modified sequence
atgaagattgagaccagcggctacaacagcgacaagctgatctgccggggcttcatcggcaccccagcccctcctgtgtgtgacagcaagttcctgctgagccccagcagtgatgtgaggatgatcccctgccgggccgccctgacctttgcccgctgcctgatccggaggaagatcgtgaccctggacagcctggaggacaccaagctgtgccgctgcctgagcaccatggacctgattgccctgggcgtgggcagcaccctgggcgctggggtgtatgtgctggccggggaggtggccaaggctgacagcggccccagcatcgtggtgtccttcctgattgctgccctggcctctgtgatggccggcctgtgctacgccgagtttggagcccgggtgcccaagacaggcagcgcctacctgtacacctacgtgacagtgggggagctgtgggccttcatcaccggctggaacctgatcctgtcctatgtgattggcaccagctctgtggcccgggcctggagcggcacctttgatgagctgctgagcaagcagatcggccagttcctgcggacctacttcaggatgaactacacaggcctggccgagtacccagacttctttgctgtgtgcctgatcctgctgctggccggcctgctgagctttggagtgaaggagagcgcctgggtgaacaaggtgttcaccgctgtgaacatcctggtgctgctgtttgtgatggtggccggctttgtgaagggaaatgtggccaactggaagatcagcgaggagttcctgaagaacatcagcgccagcgcccgggagcccccatctgaaaatggcaccagcatctacggggccggcggcttcatgccctacggcttcaccggcaccctggccggggccgccacctgcttctacgcctttgtgggctttgactgcatcgccaccactggagaggaggtgaggaacccccagaaggccatccccatcggcatcgtgaccagcctgctggtgtgcttcatggcctactttggagtgtctgctgccctgaccctgatgatgccctactacctgctggatgagaagagccccctgcctgtggcctttgaatatgtgggctggggccctgccaagtatgtggtggccgccggcagcctgtgtgccctgagcaccagcctgctgggctccatgttccccctgccccgcatcctgtttgccatggccagagatggcctgctcttccgcttcctggcccgggtgtccaagaggcagagccctgtggccgccaccctgacagctggggtcatcagcgccctgatggccttcctgtttgacctgaaggccctggtggacatgatgagcatcggcaccctgatggcctacagcctggtggccgcctgtgtgctgatcctgcgctaccagcccggcctgtcctatgaccagcccaagtgcagccctgagaaggatggcctgggcagcagcccccgggtgaccagcaagtctgagagccaggtgaccatgctgcagaggcagggcttctccatgaggaccctcttctgccccagcctgctgcccacccagcagagcgccagcctggtgtccttcctggtgggcttcctggccttcctggtgctgggcctgtctgtgctgaccacctatggagtgcacgccatcacccggctggaggcctggagcctggccctgctggccctcttcctggtgctgtttgtggccatcgtgctgaccatctggaggcagccccagaaccagcagaaggtggccttcatggtgcccttcctgcccttcctgcctgccttcagcatcctggtgaacatctacctgatggtgcagctgtctgctgacacctgggtgcgcttcagcatctggatggccatcggcttcctgatctacttctcctatggcatccgccacagcctggagggccacctgagagatgaaaataatgaagaagatgcctacccagacaacgtgcacgccgctgctgaggagaagagcgccatccaggccaatgaccaccaccccaggaacctgagcagccccttcatcttccacgagaagaccagcgagttctag

SEQ ID NO: 134614 - DNA, 2094 bp, Artificial Sequence
  derived and/or modified sequence
atgaagatcgagaccagcggctacaacagcgacaagctgatctgcaggggattcatcggcaccccagcgccacccgtgtgtgacagcaaattcttgctgtcccctagctccgacgtgagaatgattccttgtagggctgccctgacattcgcccggtgtctgatccgtaggaaaattgttactctcgactcgttagaggacaccaaactgtgtaggtgtctttccacaatggatctgattgccctgggggtcgggtccaccctcggtgcgggggtctacgtattggccggtgaagtcgccaaggctgactcagggccaagcatcgtcgtctcttttcttattgccgcacttgcttcggtgatggctggcctttgttatgcagagttcggagctcgcgtcccgaagactggatctgcttacctatacacctatgtgacagtgggtgagttgtgggcattcataaccggttggaatctgattctcagttatgtaattggcaccagttctgtcgcccgagcatggtctgggacattcgacgaactgctaagcaaacagatcggccagtttttgagaacgtatttccgtatgaattacactggccttgcagaatatcccgactttttcgccgtctgtttgatactcctgttggcagggctcctctctttcggggttaaagagtcagcttgggtgaataaggttttcaccgcagtgaacattctggtgctcttgttcgtcatggtagccgggttcgtgaagggaaacgtagccaactggaagatcagcgaggaatttctgaaaaatatctccgcgtctgcacgtgaaccaccatccgaaaatgggactagcatctatggtgctggcggctttatgccctacgggtttaccgggacgctggctggcgccgccacctgcttctatgcatttgtaggatttgattgcatagcaaccacaggggaggaagtgagaaaccctcagaaggccatccctatagggattgtaacatcactgcttgtgtgctttatggcttactttggagtgtctgctgccctgaccctgatgatgccatactatctgcttgacgagaaaagccctctgccagtggcatttgaatatgtggggtgggggcctgctaaatacgttgtagcagctggaagtttgtgcgctctgtccaccagtctgctaggaagcatgtttccactcccaagaattctatttgctatggctagagacggactactgttccgctttctggctcgcgtgtctaagcgacagtccccggtcgccgctactctcacagctggagtaatcagcgcactgatggcattcctatttgacctgaaggccctggtcgacatgatgtctattggaacccttatggcctatagcctggtggccgcctgcgtgctgatcctaagataccagcctggcctctcctatgaccaaccgaaatgttcaccagagaaggacggccttgggtccagtcccagagttacatcaaagagcgagtcccaggtgacaatgctgcagcgacagggcttttcaatgagaaccctattctgtcctagccttctgcctacgcagcaatctgcttctcttgtttcttttcttgtcggctttctggcttttctcgtcctggggttatccgtgctcacaacctacggagtgcatgcaatcactcgtctggaggcttggtctctggccctcttagctctattcctcgtgctgttcgttgctattgtgttaaccatttggcggcaacctcaaaaccagcagaaagtggcatttatggtccctttcctcccgttcctgcccgctttctcaatccttgtcaatatttatcttatggtccagctctctgcggatacttgggtgagattttccatttggatggccattgggttcctgatctatttttcttacggtatcaggcactcgttagagggccacttgagggacgaaaataatgaggaagacgcgtaccctgacaatgtgcatgctgctgcagaggagaaaagcgctattcaggcaaacgaccaccatccacgcaatttgtcttccccatttatatttcacgagaagacctctgaattctag

SEQ ID NO: 134615 - DNA, 2094 bp, Artificial Sequence
  derived and/or modified sequence
atgaagatcgagaccagcggctacaacagcgacaagctgatctgccgagggtttatcggaacacccgccccccctgtgtgtgatagtaaattccttttgagcccgagtagcgatgttagaatgatcccttgtagagcggctttgactttcgcccggtgcctgattagaagaaaaatagttactctagattcattggaagacaccaagctctgcaggtgtctctctaccatggatctcatcgccctgggcgtggggtccactttgggcgcgggagtctatgtgttggccggtgaggtggcaaaagccgatagtggcccctccatagtggtttcgtttctgatcgctgcgctggcttcggtgatggcaggattatgctacgctgagtttggagctcgagtgcccaagaccggcagcgcctatctgtatacctatgtcaccgtgggggaattgtgggcttttatcaccgggtggaacctgatcctgagctacgtgattggtacctcatccgttgcacgagcctggtctggaacctttgatgagttactgtccaagcaaataggccagtttctccgaacctacttcagaatgaattataccgggctggctgaataccccgacttttttgcggtgtgcctgatacttctcctcgccgggctgttgagcttcggcgttaaagagagcgcatgggtgaataaagtcttcaccgcggtcaacatcctggtgttgctcttcgtgatggtggccggttttgtaaagggcaacgtggccaattggaaaatctccgaggagttcctgaagaacatcagtgcatctgcacgcgagccgccaagcgaaaatggcacatcgatatacggggcgggaggtttcatgccctacggcttcacggggaccttagctggagccgccacatgcttctacgcttttgttggctttgattgtatagccacgactggggaagaggtgcgcaacccacagaaggccatcccgattggtattgtgaccagtctgctcgtatgcttcatggcctattttggcgtctcagctgctctcacactcatgatgccctactacctgctggacgagaagtctccgctgcccgttgcatttgagtacgtcggctgggggcccgctaaatatgttgttgcagcaggttcactttgcgcattatctacttctttgctgggctccatgtttcctctgcctcgcatcctgttcgctatggcccgggatggccttctcttccgattcttggcccgagtgagtaagagacagtctcctgtcgctgccactctgaccgcgggagttattagcgctttgatggccttcttgtttgacttaaaggccctggtggacatgatgtccattggtaccctcatggcgtattctctcgtcgccgcctgtgttctgatcctacgataccagcccggactcagctacgatcagcccaaatgcagcccagagaaagatggcctaggtagcagcccacgcgttacatctaagtccgagtcccaggtaacgatgcttcagagacagggattcagcatgcggacactgttctgccccagcctgctgcctacacagcagtccgccagtctggtgtctttcctggtaggctttctcgcatttctagtactggggctttccgtcctgactacctacggggtgcatgctattactcggctggaggcctggtctcttgcgctgctagccctctttctggtgctcttcgtggctatcgtgctgacaatttggcgccaacctcagaaccagcaaaaggtagcattcatggtccctttcctgccctttttacctgcattctcaatattggtcaatatctacctaatggttcagctatccgccgacacctgggtgaggttctcaatttggatggcgatcggatttctaatatactttagctatggcatcagacattcactggagggtcaccttcgcgacgagaacaacgaagaggatgcttatccagataacgtgcacgcagccgcggaagagaaatccgccatacaggccaatgaccatcatcccaggaatctcagttccccgtttattttccacgagaaaacatctgagttctag

SEQ ID NO: 134616 - DNA, 2094 bp, Artificial Sequence
  derived and/or modified sequence
atgaaaatcgaaaccagtgggtacaactcggataagctgatttgtcggggatttattggcactccagcccctccagtgtgtgattcaaaatttcttctgagcccatctagcgacgtcagaatgatcccatgtcgcgcagctctgacattcgccagatgcctgatcaggaggaaaatagttacactggacagtctagaggacacgaagttgtgccgatgtttgtctacaatggatctgatcgcccttggcgtgggaagcaccctgggcgcaggcgtgtacgtcttagccggagaagttgctaaggcagatagtgggccttcaattgtggtgagttttctcatcgctgctctggcttctgtgatggccggattgtgctacgccgagtttggtgccagagtgccgaagaccggctctgcttacctgtacacctatgttacagtcggagagctctgggccttcataaccggctggaatctaatcctgagctacgtcataggaacctcttctgtcgccagggcttggagcggtacattcgatgaacttctgtctaaacagattggtcaattcctgcggacatactttaggatgaactataccggactggccgagtatccagacttcttcgctgtgtgcctgatactgttgcttgctggactcctgtcctttggcgtgaaggagagcgcttgggtgaacaaagtgttcactgccgtcaacatactggtcctactgtttgtgatggtggctggctttgtgaagggaaatgttgctaattggaaaatcagtgaggagtttttgaaaaacatcagcgcatccgcccgtgagcctccttctgagaatgggacctctatatatggagctggaggtttcatgccgtatgggttcaccggcacgctcgctggagccgctacctgtttctacgcctttgtcggatttgattgtattgccaccacaggggaagaggtccggaatcctcaaaaagctatccccatcggaatcgtgacatcacttttagtgtgctttatggcttacttcggcgtaagtgctgctctaaccctgatgatgccttactatctcctcgatgaaaagagccctctccctgtggccttcgaatatgtcggctggggacccgctaaatacgtggtggccgcaggcagcctgtgtgccctgagcacctctctgctcggaagcatgttcccactgccgaggatcctcttcgcaatggccagagacgggcttctgtttcgattcctggccagagtgagtaaaagacagtcgcccgtagcggctaccctgaccgcgggagtgatctctgcactgatggctttcctgttcgatttaaaggctctcgttgatatgatgtcaatcgggaccctaatggcctactcactcgtagcagcatgcgtcctaattctgcgctatcaacccggactgtcctacgaccagccaaagtgcagtcccgaaaaggacggactgggaagttccccgagagttacttcaaagagcgaatcgcaggttaccatgcttcagcgccagggctttagcatgcgtacccttttctgcccttcactgctcccaacccagcaaagcgcttccttagtgtcctttctggtgggattcttggctttcctcgtgttagggctgtcggtcctcaccacttacggggtccacgcgattacccgcctggaggcctggagcctggcccttctcgccctttttctagtcctgtttgtggcaatcgtgctgactatctggagacagccacaaaatcaacagaaggttgcatttatggtcccattcttaccattcttgcctgcgttctcaattttggtgaatatctacctcatggttcaattaagtgccgacacttgggtaagatttagcatttggatggcgattggcttcctgatctatttctcttatggtataaggcactccctggaaggccacttgcgcgatgagaacaacgaggaagatgcatacccagataacgtccatgcagccgcagaggagaaatcagcaattcaggctaacgaccaccaccctcgcaacctctcctccccgtttatatttcatgagaagacttctgagttctag

SEQ ID NO: 134617 - DNA, 2094 bp, Artificial Sequence
  derived and/or modified sequence
atgaagatcgaaactagcggctacaatagcgacaaactgatttgtcggggttttatcggcactcctgcgccaccagtgtgtgattcaaagtttctcctgtccccatcctctgacgtcaggatgattccctgtagggcagccctgacattcgcacggtgcctgattcgccgaaagatcgtcacacttgactctttggaggacactaagctatgccgttgtcttagcacaatggacctcattgcgttgggcgtaggctccacgctgggggcaggagtctatgttctcgctggcgaggttgctaaggccgattctgggccaagtatcgtagtgagtttcctgatcgccgcactggcgtcagtgatggctggtctttgctacgccgagtttggcgcacgggtgcccaaaactgggtccgcctacctgtacacttatgtgaccgtgggagagctgtgggccttcattaccggctggaacctgatactgtcctacgttatcggaacctcatcagtagcccgagcttggagcgggacttttgatgagttgctgtcaaaacaaataggacaatttttaaggacatactttcgcatgaactacaccggactggcagagtaccctgatttctttgcggtgtgtcttattctgctgttggccggtctgttgtcttttggcgtcaaggagtcggcatgggtcaataaagtcttcacagccgttaacatcctcgtgctgctctttgtgatggttgcagggtttgttaagggcaacgtcgcaaactggaagattagtgaagagtttttaaaaaatattagcgccagcgcacgggaacctccgtcagagaatgggacctctatctatggagctggagggttcatgccgtacggttttactggcacactggccggagccgctacatgcttctatgccttcgtaggatttgattgcatcgccactaccggagaggaagtgaggaacccccagaaagctatcccaattggcatagtaacatccttgctcgtttgctttatggcctatttcggagtaagtgcggcactgacattgatgatgccctattatctgctcgatgaaaagagtccgctccccgtggcattcgaatacgttggctggggacctgccaagtatgttgtggccgcaggatcactgtgcgcgctgtctaccagtttgctgggatctatgtttcccctgcctcgcatactgttcgcgatggccagggatgggctcctcttcaggttcctggcgagagtgtccaaacgccagagtcccgtcgccgctaccctcacggcaggagttatcagtgctctgatggcttttctgttcgacctgaaagcccttgtagatatgatgtccatcggcacactgatggcatactccctggtggccgcatgcgtgctgatcctgcggtaccaacccggactgtcatacgatcagccaaagtgttccccagaaaaggacggactggggtcctcaccccgtgtgacgtcgaaatccgaatcacaagtcacgatgctgcagagacaaggcttcagcatgcgaacacttttctgtccgtcactgctacccactcagcagagtgccagtctcgtgagcttcctcgtggggttcctagcttttttggtcctgggtttgtccgtactcaccacatacggagtgcacgcgattactagactggaggcctggtcacttgccttgctggctctgtttctggtcctgtttgtggccattgtgctgaccatttggaggcagccccagaaccagcaaaaagtcgcattcatggtcccatttctcccttttctgcctgccttttccattcttgtcaatatatacctgatggtccagctgtctgccgatacctgggtcaggtttagcatttggatggcgattggattccttatttacttttcctatgggatccgacacagtctggagggccatctacgcgacgaaaacaatgaagaggacgcctatcccgacaacgtccacgccgcagctgaagagaagagcgccatacaggcgaacgaccaccatcccagaaatttatcaagcccattcatcttccacgaaaagactagcgagttttag

SEQ ID NO: 134618 - DNA, 7557 bp, Artificial Sequence
  derived and/or modified sequence
tcccaaaacagaaagagcagatgtctcaccacgaaactagcaactggaatgaagatagaaacaagtggttataactcagacaaactaatttgtcgagggtttattggaacacctgccccaccggtttgcgacagcaagtttctcctgtcgccttcgtcagacgtcagaatgattccttgcagagccgcgctgacctttgcccgatgtctgatccggagaaaaatcgtgaccctggacagtctagaagacaccaaattatgccgctgcttatccaccatggacctcattgccctgggcgttggaagcacccttggggccggggtttatgtcctcgctggggaggtggccaaggcagactcgggccccagcatcgtggtgtccttcctcattgctgccctggcttcagtgatggctggcctctgctatgccgaatttggggcccgtgttcccaagacggggtctgcatatttgtacacctacgtgactgtcggagagctgtgggccttcatcactggctggaatctcattttatcgtatgtgataggtacatcaagtgttgcaagagcctggagtggcacctttgatgaacttcttagcaaacagattggtcagtttttgaggacatacttcagaatgaattacactggtcttgcagaatatcccgatttttttgctgtgtgccttatattacttctagcaggtcttttgtcttttggagtaaaagagtctgcttgggtgaataaagtcttcacagctgttaatattctcgtccttctgtttgtgatggttgctgggtttgtgaaaggaaatgtggcaaactggaagattagtgaagagtttctcaaaaatatatcagcaagtgccagagagccaccttctgaaaacggaacaagtatctatggggctggtggctttatgccttatggctttacgggaacgttggctggtgctgcaacttgcttttatgcctttgtgggatttgactgcattgcaacaactggtgaagaagttcggaatccccagaaagctattcccattggaattgtgacgtctttgcttgtttgctttatggcctattttggggtctctgcagctttaacacttatgatgccgtactacctcctcgatgaaaaaagcccccttcctgtagcgtttgaatatgtgggatggggtcctgccaaatatgtcgtcgcagctggttctctctgcgccttgtcaacaagtcttctgggctctatgtttcctttaccccgaattctgtttgccatggcccgggatggcttactgtttagatttcttgccagagtgagtaagaggcagtcaccagttgctgccacgttgactgcaggggtcatttctgctttgatggcctttctgtttgacctgaaggcgcttgtggacatgatgtccattggcacactcatggcctactctctggtggcagcctgtgttctcatcctcaggtaccagcctggcttatcttacgaccagcccaaatgttctcctgagaaagatggtctgggatcgtctcccagggtaacctcgaagagtgagtcccaggtcaccatgctgcagagacagggcttcagcatgcggaccctcttctgcccctcccttctgccaacacagcagtcagcttctctcgtgagctttctggtaggattcctagctttcctcgtgttgggcctgagtgtcttgaccacttacggagttcatgccatcaccaggctggaggcctggagcctcgctctcctcgcgctgtttcttgttctcttcgttgccatcgttctcaccatctggaggcagccccagaatcagcaaaaagtagccttcatggttccattcttaccatttttgccagcgttcagcatcttggtgaacatttacttgatggtccagttaagtgcagacacttgggtcagattcagcatttggatggcaattggcttcctgatttacttttcttatggcattagacacagcctggagggtcatctgagagatgaaaacaatgaagaagatgcttatccagacaacgttcatgcagcagcagaagaaaaatctgccattcaagcaaatgaccatcacccaagaaatctcagttcacctttcatattccatgaaaagacaagtgaattctaacacttgcaggagcagagctggtcatcgtcttagcatacatatcctacactgagtaaaccgtaacgggatgtcatcagcatgctgggttgtcatgggtttgctgcatacatagttcaccctaatttatacttactcatctggacagcatctcctcagatggtgaattatgtgcacggggaaacctcctgagtggaagtttcattcatcagtgatgaatagcccccaaacagtgggagtgtgtatgtatgtgtgtatgtatgtatctatgtatatgcttgggaacatgagtgttacaagttagctggtgttttactattattgtgttacatttttccagtgtcgtcattaatcggtggcatatactgcacatactgaaatagagggaaatcactgaatgtaaagaggtttcatctatgccccctgcagttggggaaatactagtagctttaccttgtttgacttcattaatgtcagtttaggggatgccaaaaatgcagttactcatcatggtgtctgtcactggttaggggtaagatgaggggataaggaaagagacttttcaataagttgtgaatgccaacagtgggtttaatgcaaattttttttcctgtgaggtatgacagtttgctcaaacttcagccaacaggggtgtctgcttctgctgcactacacaggccaggagtggcattccatgccactagttggcatccttttgaacttttgtctcctttgcaaacagtggtcctaaaatacgaggtcttcacttgctgtgaatgacgtatccccagtcagggacttaagagaggcactgtgatatacttgggaccctttaaattaaaaagtgaagatagtcaccagggccagaaagctcatggagtggccgtaatgagaatatgtttgaagatcaaagagttagaccaatgcttgaataagtagaccccaagcatccttttctaaaaagtgacttaaaataagccaacagactctcccagaccacacaactagtggaatgattcctcctttttccattacttacttaatcacagtttagtttttttcttaacctcgtcaggcccagagttcacttctttgtttctctgtttcttttgtcttgtcttagagatgagggggctacagcagcatcatgcaaagagggaaagatgaagggatagaagaagagaaaatccccctgttctgataggaacggcctgttccattgttaaatggcaaatggcccaatttaagggctttggatctaatttgcctctgatgtttcctttggaaacatttaggaatatttttctccccctaccccataaattgtgtagcactttttattccatttgctttcaaatgactacactaagcctaataatacaagctccagtgttatacaataacccatcagtgattggggaatcaaacattttggtttaaaaaacatgattatttaaaactggaaactaaaaagaatcaaattgaattaaagctatataaacacagttaacccttgtaaatgagtaaacaaatttttacatgtaagattctctaattgtcatattttactttttaggattccctaatagtggactgtttatttgcagtgtatttgcttctcatgaactatttctcgtacaaatcattaaatagttcattggatgaggctgggtgacatttcccaggacagcatggtgaacattaccaggcatgctagctggcccgtgtaatcccaagacaaggaaaacattcgttttcctcatgggtcttccaagaaatgagctattttattgatgccattaaaaagcaagttgcgatggttttgtatagccaggagtttattgtgattaaacatcaaagaaacaggtagaaagcctgggtttctggctgctagcgttatagcatccatgacacagaactcattacggacattccacaacttccagggtgcacatggtaaaatctgaagcccagaattttctctcaagctgcgtggtttactggagagaaggagttggataagcacaggctcgggtattttggtagggactgtaggcatgctcataaatccttgctgttgtcacagtacgctgaaaacccgtttgattctatacccaatcaagaatagacccttcacacaggaaatgtgaacaattgttatatatgaacactcaaatcttttactgtaacgaaaccaagaaacttgtttagaatgtgataggcagctaaaactgttatgcccactgtgctcaatttgaagcagaatttagtgaaaaattatttttccacattgaaacactttgcagacacaaatatctatgaaaagatgctttgtcagccactgtgcctttttttctgtgaagactcaacggatgtgtgtgtttgtatgtttgttaacagttacatatgtttgtatgagtgtatatatatatctgtgtgtgtgtatctctaacgtcagtgtataagtaagttgggtttatggtgggctttgactatgtcattaggtgggtacaaaacccaactgatgtggagaaaaattgatgtttgatgttgatagatatgcttatacctaatttttagtttttaaactattttaaaatatactatgattttatatgtatatttcctatagactctttaagacgtatttataatgtttctaatatgaaatcactaaactctagtacattatagcaggtgctttgtaatctggaatggagaagaggtaggggcatttggggattcctgtttacttgctgctgccacaccttttccgactgatctgtcctggtaggtgtttattagcaaaagtcagtatcaccagctctttggcacctttctgtttctgcttgtgaattcataatgttttcaactaaattttttttttctttctcagaattacctaaatgttttgtagagttttgactagtaatcaatcaaaattatataaagtcttctccagtaattaagaaatacatatgcaaattcttttgtgattgagtaaaagcagcttaaattacttttcttttctacattaagaaatatattctcaacattttcagtgagaatttcttgtaatggcacctcaaattttatactcttaaaaaaaaacaataatttgtgaattaccaccaaaaggcaatggcagtcctacatttaagaatagagctatgcaaactctgttaaaaactatgaggaaaacttatattagaacttttgatatatactaaaatactgattatcttaatcacattttccccagagataaacattgagagaacgaaagccaaagtgtcatttaagagagatatatatgaaaaagtaacattaatatatagaactttaccatcaccagccgtagttgatagaaaatattagtttcagaattaccctcctttaaaaaataagagactatttgttttcttttaatttctatgaataaaagaaatttttaaaaactttaaaattttaaatattagtcaaaatactttttaagtcctgagtgcttacaggtagttgttaaaaaaattttaaggccaggcatggtggctcgctcacacctataatcctaggatcttgggaggtcgaggcaagctgatcgcttgagcccaggagtttaagaccggcctgagtagcatagcaagaccctgtctctacaaaaaaaacaaaaattagctgggcatggtggcatgcacatgtagtcagagctactgggggtgctgaggtgggaggatcgcttgagcccaggagagtgaggctgcagtgagctgagattacgccactgcactctagcctgggcaacggtgagaccctgcctcaaaaaaaataaaaataaaaataaaacactttaattagaatctatttttacctattttctaaatttatttaaatgcttagcaggaagcataaggaaaagccatcggcctccaatacccatgatgacagagggagcacttgagccttgccttccctcctcttaaatcagggtgtgttccgagattacagaacatcacaccttggcgtgatgaaatcatgccaagattctgactctccctttccggtgatactgctcatgatttctcctaatacgcttcaagcaactgttaccacaaaaaatacagtttccgcagggctttaaaggattgagtttagcatgtatatcatgcgttattaaagttcacgtgattcatgtgaaattaactgtcctttttgctagtgccaaaacagtgccttctctgcacactttacttgtttataaagttctcccacatgtccttaaatatcaagggggaaagtatggatattcgcgtagcaataatgccagcaaaggtcattttcattttttagtcatatagatatgaaaataagttcatatagatatgaaattgcttgactttattgttttggggagattttttttccttacatgattatattaaacactttaaaatagccttccggtttctggattttgagaagcctgatctgttattgttgtggttgttggtgtttgtaatattcattattgtttgtatatacacggtttagtcttactgatttcaaatgcattttgttattgctcaacccaactggtaacactgtttgctgggagcattatacttaactttgattcaccatggttgatgccactgccatgatcgctgggtcttaaagagctttccctagccactgacagccccgtggagatcataatcagggccccaggctggttccaggatcaggcagcctatagagtgtgagcatctatgtgtagctacccttgttgggtgggctcttagactgatggggtaggatatgaagtgaaagacttcaaatgcaagtaaggtagtttgggctccttaattccaaacatcccatgagtatatcaagatgaataaggaccaagggacctctgtgactcatagaagggctggctgaatcctgaagtagcatagtgggacctggtctacaatttatgcacatgcactgacagccttgctgtgccacgtgtctcaccaagacccagttgggaaagagcgtcatattgccaacaggttgggtttctctggcctacacctgattaatgggccctttatctttggtgtcccctaggagtgtccagttgttttattgctgtattttgttattgcagtacttaataaaaattgttgatagggcccaaaaccctacagaaattctatgtctgtaaaaaccaacaaaggcattggacttgtgtgaatgtacagggtttttttagtagtaattttaaatttaaatgttttaagtgatcatcagtgttcctttttacttataaagttggattcttttttagaatttgtaataaataaaaactgctgctttaccactgtaaaatatgctttctgatgtggtgtatttttaaaataaattttaatatgt

SEQ ID NO: 134619 - DNA, 7638 bp, Artificial Sequence
  derived and/or modified sequence
ggcgcgaccccaacccagccccacaggagactctctgaagaccagcaggaaagcagtgagcccttacagtcccaaaacagaaagagcagatgtctcaccacgaaactagcaactggaatgaagatagaaacaagtggttataactcagacaaactaatttgtcgagggtttattggaacacctgccccaccggtttgcgacagcaagtttctcctgtcgccttcgtcagacgtcagaatgattccttgcagagccgcgctgacctttgcccgatgtctgatccggagaaaaatcgtgaccctggacagtctagaagacaccaaattatgccgctgcttatccaccatggacctcattgccctgggcgttggaagcacccttggggccggggtttatgtcctcgctggggaggtggccaaggcagactcgggccccagcatcgtggtgtccttcctcattgctgccctggcttcagtgatggctggcctctgctatgccgaatttggggcccgtgttcccaagacggggtctgcatatttgtacacctacgtgactgtcggagagctgtgggccttcatcactggctggaatctcattttatcgtatgtgataggtacatcaagtgttgcaagagcctggagtggcacctttgatgaacttcttagcaaacagattggtcagtttttgaggacatacttcagaatgaattacactggtcttgcagaatatcccgatttttttgctgtgtgccttatattacttctagcaggtcttttgtcttttggagtaaaagagtctgcttgggtgaataaagtcttcacagctgttaatattctcgtccttctgtttgtgatggttgctgggtttgtgaaaggaaatgtggcaaactggaagattagtgaagagtttctcaaaaatatatcagcaagtgccagagagccaccttctgaaaacggaacaagtatctatggggctggtggctttatgccttatggctttacgggaacgttggctggtgctgcaacttgcttttatgcctttgtgggatttgactgcattgcaacaactggtgaagaagttcggaatccccagaaagctattcccattggaattgtgacgtctttgcttgtttgctttatggcctattttggggtctctgcagctttaacacttatgatgccgtactacctcctcgatgaaaaaagcccccttcctgtagcgtttgaatatgtgggatggggtcctgccaaatatgtcgtcgcagctggttctctctgcgccttgtcaacaagtcttctgggctctatgtttcctttaccccgaattctgtttgccatggcccgggatggcttactgtttagatttcttgccagagtgagtaagaggcagtcaccagttgctgccacgttgactgcaggggtcatttctgctttgatggcctttctgtttgacctgaaggcgcttgtggacatgatgtccattggcacactcatggcctactctctggtggcagcctgtgttctcatcctcaggtaccagcctggcttatcttacgaccagcccaaatgttctcctgagaaagatggtctgggatcgtctcccagggtaacctcgaagagtgagtcccaggtcaccatgctgcagagacagggcttcagcatgcggaccctcttctgcccctcccttctgccaacacagcagtcagcttctctcgtgagctttctggtaggattcctagctttcctcgtgttgggcctgagtgtcttgaccacttacggagttcatgccatcaccaggctggaggcctggagcctcgctctcctcgcgctgtttcttgttctcttcgttgccatcgttctcaccatctggaggcagccccagaatcagcaaaaagtagccttcatggttccattcttaccatttttgccagcgttcagcatcttggtgaacatttacttgatggtccagttaagtgcagacacttgggtcagattcagcatttggatggcaattggcttcctgatttacttttcttatggcattagacacagcctggagggtcatctgagagatgaaaacaatgaagaagatgcttatccagacaacgttcatgcagcagcagaagaaaaatctgccattcaagcaaatgaccatcacccaagaaatctcagttcacctttcatattccatgaaaagacaagtgaattctaacacttgcaggagcagagctggtcatcgtcttagcatacatatcctacactgagtaaaccgtaacgggatgtcatcagcatgctgggttgtcatgggtttgctgcatacatagttcaccctaatttatacttactcatctggacagcatctcctcagatggtgaattatgtgcacggggaaacctcctgagtggaagtttcattcatcagtgatgaatagcccccaaacagtgggagtgtgtatgtatgtgtgtatgtatgtatctatgtatatgcttgggaacatgagtgttacaagttagctggtgttttactattattgtgttacatttttccagtgtcgtcattaatcggtggcatatactgcacatactgaaatagagggaaatcactgaatgtaaagaggtttcatctatgccccctgcagttggggaaatactagtagctttaccttgtttgacttcattaatgtcagtttaggggatgccaaaaatgcagttactcatcatggtgtctgtcactggttaggggtaagatgaggggataaggaaagagacttttcaataagttgtgaatgccaacagtgggtttaatgcaaattttttttcctgtgaggtatgacagtttgctcaaacttcagccaacaggggtgtctgcttctgctgcactacacaggccaggagtggcattccatgccactagttggcatccttttgaacttttgtctcctttgcaaacagtggtcctaaaatacgaggtcttcacttgctgtgaatgacgtatccccagtcagggacttaagagaggcactgtgatatacttgggaccctttaaattaaaaagtgaagatagtcaccagggccagaaagctcatggagtggccgtaatgagaatatgtttgaagatcaaagagttagaccaatgcttgaataagtagaccccaagcatccttttctaaaaagtgacttaaaataagccaacagactctcccagaccacacaactagtggaatgattcctcctttttccattacttacttaatcacagtttagtttttttcttaacctcgtcaggcccagagttcacttctttgtttctctgtttcttttgtcttgtcttagagatgagggggctacagcagcatcatgcaaagagggaaagatgaagggatagaagaagagaaaatccccctgttctgataggaacggcctgttccattgttaaatggcaaatggcccaatttaagggctttggatctaatttgcctctgatgtttcctttggaaacatttaggaatatttttctccccctaccccataaattgtgtagcactttttattccatttgctttcaaatgactacactaagcctaataatacaagctccagtgttatacaataacccatcagtgattggggaatcaaacattttggtttaaaaaacatgattatttaaaactggaaactaaaaagaatcaaattgaattaaagctatataaacacagttaacccttgtaaatgagtaaacaaatttttacatgtaagattctctaattgtcatattttactttttaggattccctaatagtggactgtttatttgcagtgtatttgcttctcatgaactatttctcgtacaaatcattaaatagttcattggatgaggctgggtgacatttcccaggacagcatggtgaacattaccaggcatgctagctggcccgtgtaatcccaagacaaggaaaacattcgttttcctcatgggtcttccaagaaatgagctattttattgatgccattaaaaagcaagttgcgatggttttgtatagccaggagtttattgtgattaaacatcaaagaaacaggtagaaagcctgggtttctggctgctagcgttatagcatccatgacacagaactcattacggacattccacaacttccagggtgcacatggtaaaatctgaagcccagaattttctctcaagctgcgtggtttactggagagaaggagttggataagcacaggctcgggtattttggtagggactgtaggcatgctcataaatccttgctgttgtcacagtacgctgaaaacccgtttgattctatacccaatcaagaatagacccttcacacaggaaatgtgaacaattgttatatatgaacactcaaatcttttactgtaacgaaaccaagaaacttgtttagaatgtgataggcagctaaaactgttatgcccactgtgctcaatttgaagcagaatttagtgaaaaattatttttccacattgaaacactttgcagacacaaatatctatgaaaagatgctttgtcagccactgtgcctttttttctgtgaagactcaacggatgtgtgtgtttgtatgtttgttaacagttacatatgtttgtatgagtgtatatatatatctgtgtgtgtgtatctctaacgtcagtgtataagtaagttgggtttatggtgggctttgactatgtcattaggtgggtacaaaacccaactgatgtggagaaaaattgatgtttgatgttgatagatatgcttatacctaatttttagtttttaaactattttaaaatatactatgattttatatgtatatttcctatagactctttaagacgtatttataatgtttctaatatgaaatcactaaactctagtacattatagcaggtgctttgtaatctggaatggagaagaggtaggggcatttggggattcctgtttacttgctgctgccacaccttttccgactgatctgtcctggtaggtgtttattagcaaaagtcagtatcaccagctctttggcacctttctgtttctgcttgtgaattcataatgttttcaactaaattttttttttctttctcagaattacctaaatgttttgtagagttttgactagtaatcaatcaaaattatataaagtcttctccagtaattaagaaatacatatgcaaattcttttgtgattgagtaaaagcagcttaaattacttttcttttctacattaagaaatatattctcaacattttcagtgagaatttcttgtaatggcacctcaaattttatactcttaaaaaaaaacaataatttgtgaattaccaccaaaaggcaatggcagtcctacatttaagaatagagctatgcaaactctgttaaaaactatgaggaaaacttatattagaacttttgatatatactaaaatactgattatcttaatcacattttccccagagataaacattgagagaacgaaagccaaagtgtcatttaagagagatatatatgaaaaagtaacattaatatatagaactttaccatcaccagccgtagttgatagaaaatattagtttcagaattaccctcctttaaaaaataagagactatttgttttcttttaatttctatgaataaaagaaatttttaaaaactttaaaattttaaatattagtcaaaatactttttaagtcctgagtgcttacaggtagttgttaaaaaaattttaaggccaggcatggtggctcgctcacacctataatcctaggatcttgggaggtcgaggcaagctgatcgcttgagcccaggagtttaagaccggcctgagtagcatagcaagaccctgtctctacaaaaaaaacaaaaattagctgggcatggtggcatgcacatgtagtcagagctactgggggtgctgaggtgggaggatcgcttgagcccaggagagtgaggctgcagtgagctgagattacgccactgcactctagcctgggcaacggtgagaccctgcctcaaaaaaaataaaaataaaaataaaacactttaattagaatctatttttacctattttctaaatttatttaaatgcttagcaggaagcataaggaaaagccatcggcctccaatacccatgatgacagagggagcacttgagccttgccttccctcctcttaaatcagggtgtgttccgagattacagaacatcacaccttggcgtgatgaaatcatgccaagattctgactctccctttccggtgatactgctcatgatttctcctaatacgcttcaagcaactgttaccacaaaaaatacagtttccgcagggctttaaaggattgagtttagcatgtatatcatgcgttattaaagttcacgtgattcatgtgaaattaactgtcctttttgctagtgccaaaacagtgccttctctgcacactttacttgtttataaagttctcccacatgtccttaaatatcaagggggaaagtatggatattcgcgtagcaataatgccagcaaaggtcattttcattttttagtcatatagatatgaaaataagttcatatagatatgaaattgcttgactttattgttttggggagattttttttccttacatgattatattaaacactttaaaatagccttccggtttctggattttgagaagcctgatctgttattgttgtggttgttggtgtttgtaatattcattattgtttgtatatacacggtttagtcttactgatttcaaatgcattttgttattgctcaacccaactggtaacactgtttgctgggagcattatacttaactttgattcaccatggttgatgccactgccatgatcgctgggtcttaaagagctttccctagccactgacagccccgtggagatcataatcagggccccaggctggttccaggatcaggcagcctatagagtgtgagcatctatgtgtagctacccttgttgggtgggctcttagactgatggggtaggatatgaagtgaaagacttcaaatgcaagtaaggtagtttgggctccttaattccaaacatcccatgagtatatcaagatgaataaggaccaagggacctctgtgactcatagaagggctggctgaatcctgaagtagcatagtgggacctggtctacaatttatgcacatgcactgacagccttgctgtgccacgtgtctcaccaagacccagttgggaaagagcgtcatattgccaacaggttgggtttctctggcctacacctgattaatgggccctttatctttggtgtcccctaggagtgtccagttgttttattgctgtattttgttattgcagtacttaataaaaattgttgatagggcccaaaaccctacagaaattctatgtctgtaaaaaccaacaaaggcattggacttgtgtgaatgtacagggtttttttagtagtaattttaaatttaaatgttttaagtgatcatcagtgttcctttttacttataaagttggattcttttttagaatttgtaataaataaaaactgctgctttaccactgtaaaatatgctttctgatgtggtgtatttttaaaataaattttaatatgtaataatatagaa

SEQ ID NO: 134620 - protein, 812 aa, Artificial Sequence
  derived and/or modified sequence
MEPLGNWRSLRAPLPPMLLLLLLQVAGPVGALAETLLNAPRAMGTSSSPPSPASVVAPGTTLFEESRLPVFTLDYPHVQIPFEITLWILLASLAKIGFHLYHKLPTIVPESCLLIMVGLLLGGIIFGVDEKSPPAMKTDVFFLYLLPPIVLDAGYFMPTRPFFENIGTIFWYAVVGTLWNSIGIGVSLFGICQIEAFGLSDITLLQNLLFGSLISAVDPVAVLAVFENIHVNEQLYILVFGESLLNDAVTVVLYNLFKSFCQMKTIETIDVFAGIANFFVVGIGGVLIGIFLGFIAAFTTRFTHNIRVIEPLFVFLYSYLSYITAEMFHLSGIMAITACAMTMNKYVEENVSQKSYTTIKYFMKMLSSVSETLIFIFMGVSTVGKNHEWNWAFVCFTLAFCLMWRALGVFVLTQVINRFRTIPLTFKDQFIIAYGGLRGAICFALVFLLPAAVFPRKKLFITAAIVVIFFTVFILGITIRPLVEFLDVKRSNKKQQAVSEEIYCRLFDHVKTGIEDVCGHWGHNFWRDKFKKFDDKYLRKLLIRENQPKSSIVSLYKKLEIKHAIEMAETGMISTVPTFASLNDCREEKIRKVTSSETDEIRELLSRNLYQIRQRTLSYNRHSLTADTSERQAKEILIRRRHSLRESIRKDSSLNREHRASTSTSRYLSLPKNTKLPEKLQKRRTISIADGNSSDSDADAGTTVLNLQPRARRFLPEQFSKKSPQSYKMEWKNEVDVDSGRDMPSTPPTPHSREKGTQTSGLLQQPLLSKDQSGSEREDSLTEGIPPKPPPRLVWRASEPGSRKARFGSEKP

SEQ ID NO: 134621 - DNA, 2439 bp, Artificial Sequence
  derived and/or modified sequence
atggagccactcggaaactggcgctcattgagggccccattaccccctatgctgctccttttactgctccaggtagcgggccccgtcggagcccttgccgaaaccctgctaaacgccccaagggccatgggtacgagtagctctccccccagtcctgcatccgttgtcgcccccgggacaaccctgttcgaggagagccggttaccagtgttcactttggactacccccacgtgcagatcccttttgagataaccctatggatcctactggctagcctcgccaagatcggatttcatctttaccacaagcttcccacaattgtgccggagtcatgtctccttattatggtaggtctgctcctaggcggtatcatctttggtgtggatgaaaaatccccacccgccatgaagactgacgtgttctttttgtatctgcttcctccaattgtactcgatgcaggatactttatgccaacaagaccttttttcgaaaacatcgggaccattttctggtacgccgtcgtaggtactctctggaacagcattggaattggggtgtcgctgtttggcatttgccagatcgaggcgtttggcctctccgatatcacgttactgcagaacctgctattcggtagcctcatatccgccgtggaccctgtagccgtgcttgccgtgtttgaaaatattcacgtcaatgaacagctttatattctcgtattcggagagagtttgctcaatgatgccgtgacagtggtactgtataatctctttaagtccttctgccagatgaaaaccatagaaacgatcgacgttttcgctggaatcgcaaactttttcgtagtcggcatcgggggcgttctgataggtatctttcttggcttcattgccgctttcaccacccggttcacacataacattcgtgtgatcgaacccctcttcgttttcctctattcttacctgtcgtacattaccgcggaaatgttccatctatccggcattatggccatcactgcctgtgctatgacaatgaataagtacgtggaggaaaatgtcagtcagaagtcttacactaccataaagtattttatgaagatgttaagcagtgtatcagaaacccttatttttatcttcatgggggtttccaccgtgggcaaaaaccacgagtggaattgggcgtttgtgtgcttcactctggccttctgtctcatgtggcgagccctgggagtgtttgttcttacccaggtgattaaccggttcagaactattccgctgactttcaaggatcagtttatcatcgcatacggtggtctgagaggagctatatgctttgccttagtgttcctgcttccagcagccgtgtttccacgcaaaaagctgttcatcacggccgccattgtggtcatattttttacggtttttatattgggcatcaccattcgcccactggtcgagtttctagacgtgaagcgttccaataaaaagcagcaggccgtgtcagaggagatttactgtcgcctgttcgaccacgtgaaaacaggaatagaggacgtgtgtgggcattggggccacaacttctggagagataagtttaaaaagtttgacgataagtacctgcgtaaactactcatcagggagaatcagcctaagtcaagcatcgtaagcctctacaaaaagctggaaattaagcatgccattgagatggccgagactggcatgatcagcaccgtgcccactttcgcatctctgaacgactgcagggaggagaagatcaggaaagtgacatcgtctgaaacagacgagatccgcgagctgctctcccggaacctgtatcaaattaggcagcgaaccttgagctataatcgtcactccctcaccgcagacacatcagaaaggcaagccaaggagatcctcatccgaaggcgtcactcactccgggagtcaatacgcaaggattcttcattgaatagggagcatcgcgcttccacaagcacttcaagatacctctccttgccgaaaaacacgaagctgcccgagaagcttcagaaaaggcgcactatcagcatagccgatggcaattcttccgatagcgatgcggatgcggggactacagtgctgaacctgcagcctagggccagaagatttctcccggagcagttctctaagaagtcaccccaatcttacaagatggagtggaaaaacgaagtggacgtggattccggcagagatatgccgtccacccctccaactccccattccagagagaagggcacccaaacctcaggcctcctccagcagccactgctgtccaaggaccaaagtggttctgagcgcgaagacagtttgactgaggggattccccctaaacccccacctcgtctggtgtggcgcgcatctgagccaggaagccggaaggcacgctttgggtctgagaaaccttag

SEQ ID NO: 134622 - DNA, 2439 bp, Artificial Sequence
  derived and/or modified sequence
atggagcccctgggcaactggaggagcctgcgggcccccctgccccccatgctgctgctgctgctgctgcaggtggccggccctgtgggcgccctggccgagaccctgctgaatgccccccgggccatgggcaccagcagcagcccccccagccctgcctctgtggtggcccctggcaccaccctgtttgaggagagccggctgcctgtgttcaccctggactacccccacgtgcagatcccctttgagatcaccctgtggatcctgctggccagcctggccaagattggcttccacctgtaccacaagctgcccaccatcgtgcctgagagctgcctgctgatcatggtgggcctgctgctgggcggcatcatcttcggcgtggatgagaagagccccccagccatgaagacagatgtgttcttcctgtacctgctgccccccatcgtgctggatgctggctacttcatgcccacccggcccttctttgagaacatcggcaccatcttctggtatgctgtggtgggcaccctgtggaacagcatcggcatcggcgtgtccctgtttggcatctgccagatcgaggccttcggcctgagtgacatcaccctgctgcagaacctgctgtttggcagcctcatctctgctgtggaccctgtggccgtgctggccgtgtttgagaacatccacgtgaatgagcagctgtacatcctggtgtttggagagagcctgctgaatgatgctgtgacagtggtgctgtacaacctcttcaagagcttctgccagatgaagaccatcgagaccattgatgtgtttgctggcatcgccaacttctttgtggtgggcattggaggagtgctgattggcatcttcctgggcttcatcgccgccttcaccacccgcttcacccacaacatccgggtgattgagcccctgtttgtgttcctgtacagctacctgagctacatcacagctgagatgttccacctgagcggcatcatggccatcacagcctgtgccatgaccatgaacaagtatgtggaggagaatgtgtcccagaagagctacaccaccatcaagtacttcatgaagatgctgagctctgtgtctgagaccctcatcttcatcttcatgggcgtgtccacagtgggcaagaaccacgagtggaactgggcctttgtgtgcttcaccctggccttctgcctgatgtggagggccctgggcgtgtttgtgctgacccaggtgatcaaccgcttccgcaccatccccctgaccttcaaggaccagttcatcatcgcctacggcggcctgcggggggccatctgctttgccctggtgttcctgctgcctgctgctgtgttccccaggaagaagctgttcatcacagctgccatcgtggtgatcttcttcaccgtcttcatcctgggcatcaccatccggcccctggtggagttcctggatgtgaagaggagcaacaagaagcagcaggccgtgtctgaggagatctactgccgcctgtttgaccacgtgaagacaggaattgaagatgtgtgtggccactggggccacaacttctggagggacaagttcaagaagtttgatgacaagtacctgaggaagctgctgatccgggagaaccagcccaagagcagcatcgtgtccctgtacaagaagctggagatcaagcacgccatcgagatggccgagaccggcatgatcagcacagtgcccacctttgccagcctgaatgactgccgggaggagaagatcaggaaggtgaccagcagcgagacagatgagatccgggagctgctgagcaggaacctgtaccagatccggcagaggaccctgagctacaacagacacagcctgacagctgacaccagcgagcggcaggccaaggagatcctgatcagaagaagacacagcctgcgggagagcatcaggaaggacagcagcctgaaccgggagcaccgggccagcaccagcaccagccgctacctgagcctgcccaagaacaccaagctgcctgagaagctgcagaagaggaggaccatcagcattgctgatggcaacagcagtgacagtgatgctgatgctggcaccaccgtgctgaacctgcagccccgggcccggcgcttcctgcctgagcagttcagcaagaagagcccccagagctacaagatggagtggaagaatgaggtggatgtggacagcggccgggacatgcccagcaccccacccaccccccacagccgggagaagggcacccagaccagcggcctgctgcagcagcccctgctgagcaaggaccagagcggcagcgagcgggaggacagcctgacagagggcatcccccccaagcccccaccccggctggtgtggagggccagcgagcccggcagcaggaaggccaggtttggaagtgagaagccctag

SEQ ID NO: 134623 - DNA, 2439 bp, Artificial Sequence
  derived and/or modified sequence
atggagcccctgggcaactggcggagcctgcgggcccccctgccccctatgctgttactgctgttgctgcaggtggcgggaccagtgggagctctggccgagaccctgctcaatgctccacgggccatgggcacctcctcatcacctccatcccccgcttccgtggtggccccagggaccacgctgttcgaggagagcaggctgcctgtgtttacactcgactatcctcacgtccaaatcccatttgagattaccctgtggattctgcttgcgagcctggctaaaattggatttcacctctaccataaactgcccacaatcgtgccggaatcttgcctgttaattatggtgggtctactgctcggcggaataatctttggggtggatgaaaagtcgccccccgccatgaaaactgatgtgtttttcctgtatttactgcccccaatcgttttggacgctggatatttcatgccaaccaggccgttcttcgaaaacattggtacgatcttctggtatgcagtagtcgggacgctttggaattccatcggtattggagtgagcctgttcggtatctgtcagatcgaggctttcggcctttctgacataaccttgctgcagaatttgctttttggatccctgatctctgctgtagatcccgtggctgttctggccgtgtttgaaaatattcatgtgaatgagcagctctatatcctagtctttggcgaatcactattgaatgatgcagttaccgtggttctgtacaacctgtttaagtcattctgccagatgaagacaatcgagaccatcgacgtgttcgcaggcatagcaaacttctttgtggtgggcattggcggagtattaatcggaatatttctgggcttcattgccgccttcaccactcgcttcacccacaacattcgggtgatagagcccctttttgtgttcctgtatagctatttatcctacataaccgccgaaatgtttcacctatcgggtatcatggcaatcaccgcctgcgccatgacaatgaacaagtacgtagaagaaaacgtaagccagaaatcttacaccacaataaagtacttcatgaagatgttgtccagcgtgagtgaaacactaatttttatttttatgggcgtgtctacagtggggaagaatcacgagtggaattgggcctttgtttgtttcacgctcgcattttgcctgatgtggcgagctctaggcgtctttgttctgactcaggtcatcaaccgattcaggacaattcccctgacatttaaagatcagtttatcatcgcctatggagggctgaggggtgccatctgttttgccctcgtcttcttactcccagcagcagtgttccctaggaaaaaactctttatcacagctgcaattgtggtgattttcttcaccgtgtttattttgggaattaccatacgaccgctggtggagttcctcgacgtgaaacggagcaataagaaacagcaggccgtcagtgaagagatctactgtcggctgttcgaccacgtaaagacggggatcgaggacgtgtgcgggcactggggacacaatttctggcgtgataagtttaaaaagtttgacgataaatacctgcgtaagttactgatcagggagaaccaaccaaagagctctattgtgtccctttataagaaacttgaaattaaacacgccatcgaaatggctgaaactggcatgatctcaacggtcccaacatttgcctctttgaacgactgcagggaagaaaaaatcaggaaagtgacaagctctgaaaccgatgaaatccgagaattattgagccgcaacctgtatcagatcaggcagaggaccctaagttataatcgtcactcacttaccgctgatacaagcgagcgccaggccaaggaaattctgattcgccggcggcacagtctgcgtgaaagtatccgcaaagactccagcctgaaccgggagcacagagcttccacctctacaagtagatatctgtctctccccaaaaatacaaaactgcccgaaaaactccagaaaaggaggactatcagcatcgctgacggaaatagtagcgacagcgacgccgatgcaggaactactgtgctgaaccttcagcctagagcgaggcgcttcttacccgagcagtttagcaaaaagtctcctcagagttataagatggaatggaagaatgaggtcgacgtcgatagcgggcgggacatgccctccacacctccaacacctcacagtagagagaaggggacccaaactagcgggttactccagcagccgttgttaagcaaggaccagtccggaagcgagcgtgaggacagcctcactgaggggattccgcccaagccacctccaagactggtctggcgggcatccgaaccgggcagcaggaaggccaggtttggatccgaaaagccatag

SEQ ID NO: 134624 - DNA, 2439 bp, Artificial Sequence
  derived and/or modified sequence
atggagcctttgggaaattggcggagcttaagggccccacttccgcctatgctgcttctgctgctcctacaggtagctggtcctgtcggtgccctggctgaaacactgctgaacgctcctcgagcaatgggcacttcctcgagccccccttccccagcatcagtggtagccccaggaacgaccctgttcgaagagtcccgactgccagtgttcacactggactatccacacgtacagattccattcgaaatcacactatggatcctgttggctagccttgccaaaatcggctttcacctttaccacaaactacccaccattgttcctgaatcctgtttattgattatggtgggactgctgttggggggtattatcttcggagtagacgagaagagtcctcctgcaatgaaaacagatgttttctttctttacttgctgccacctattgtgttggacgctggctatttcatgccaacgcggccttttttcgaaaacatcgggactattttctggtatgccgttgtgggtacactgtggaactcaattggaatcggggtatcactctttggtatatgtcagatcgaggccttcggtctttcagacataacccttttacagaacctgttgttcgggtcactgatctctgctgtggatcctgtggcggttttggccgtgttcgagaacattcacgtgaatgagcagctgtacatcctggtgtttggcgaatccctcctaaatgatgccgtcaccgtggtgttatacaacctgtttaagtccttttgtcagatgaaaacaatcgaaacaatcgacgtattcgccggaatcgccaactttttcgtggtagggatcgggggtgtacttattggcatctttttaggattcatcgctgcgttcaccacccggtttactcacaacatcagggtcatcgagccgctgttcgtttttctgtattcctacctttcgtatattactgccgagatgttccatctgtcagggatcatggctattacagcctgcgccatgacaatgaataagtatgtggaagaaaatgttagtcagaagagttacaccactataaagtactttatgaaaatgctgtcatccgtaagcgaaacgctgattttcatatttatgggcgtgtcaacagtgggaaagaaccatgaatggaattgggcattcgtttgctttaccctggcattctgcttaatgtggagagccctgggtgtgttcgtgctgacacaggtgatcaataggttcagaactataccactgacttttaaagaccagtttattatcgcctacggaggactgagaggcgcaatctgcttcgccctggtgttcctgcttccagcggctgtatttcctcgcaagaagctgttcatcacagctgcgatcgttgtcattttctttactgtctttatcctcggtattacgatccgccctctggtcgaattcctggacgtgaaacgatctaacaagaagcagcaggccgtatccgaggaaatatactgccgactgttcgatcacgtgaagaccggcatcgaagacgtctgcggtcattggggccacaacttctggcgagataaattcaagaaatttgacgataagtatcttcggaaattgctgatccgcgagaaccagccgaagagcagtattgtgagcctgtataaaaagctcgagattaagcacgcaattgagatggccgagaccgggatgatctccactgtgcctacattcgcaagtctgaatgattgtagagaggaaaagattcgcaaggttacctcttccgagacagacgaaatacgtgaactgctctccagaaacctgtaccagattcggcaaagaacgctgtcttataataggcattccctcaccgctgacacgagtgagcgccaggccaaggagatcctgatccggagacgtcattctttgcgggaatctattcgaaaggactcttcccttaaccgagaacaccgagctagcacatccacctcccggtacctgtctttgcctaagaacactaaacttccggagaagctgcaaaagcgccgtactatatccatcgcagatggtaatagtagcgattcagatgcagatgccggtaccacagttctcaatctgcagccgagagcacgacggtttctgcctgagcagttttcaaaaaagagtcctcagagttacaagatggaatggaaaaacgaagtggatgtggactctggcagggatatgccctcaacgcctcccacacctcactccagggaaaaagggacccaaacttcaggcctactgcagcagccgctgctgtcaaaggaccaatctgggtccgagcgggaggattctcttacggagggaatccctccaaaaccgcctcctagattggtgtggagggcctccgaacccggttcccggaaagcgagatttggctccgagaagccctag

SEQ ID NO: 134625 - DNA, 5410 bp, Artificial Sequence
  derived and/or modified sequence
ccggtgccgcagcagcggcgggtggctgtcgctgccctgccctgcacggggcagggcggagcgggctgagcagcccgggcgcgatgcgttgagcgctcggagggccaaccgccggtccccttggcggcaaccggcggcacccatggaaccactgggcaactggaggagcctgcgggcgccactgcctccgatgctgttgctgctgctcctgcaggtggcggggcccgtgggcgccctggcggagaccttgctgaacgcgccgagggccatgggcaccagttccagcccgcctagccctgcgagcgtggtggctcccggaacgacgctgttcgaggagagccggctgcctgtgtttacgctggattacccccacgtgcagatccccttcgagatcaccctttggatcctgctggcctccctggccaagattggcttccatctgtatcacaagttgcccacaatagtgcctgagagctgccttcttataatggttggacttctactaggtgggattatttttggtgttgatgagaagtctccccctgcaatgaagactgatgtatttttcttgtacctcctcccacccatcgtgctggatgccggctatttcatgcccactcgcccattctttgagaacattggcacgattttctggtatgctgtggtagggacactttggaattccattggcattggggtgtctttgtttggtatctgccagatcgaagcattcggcctcagcgacatcactttgctccagaacctgctctttggcagcttaatctcagctgtcgatcctgtggctgtgcttgctgtctttgagaacattcacgtcaatgagcagctctacatcctggtctttggagagtccctgctgaatgatgcagtaacagtggtcctgtacaacttgttcaagtcgttttgccagatgaaaaccattgagaccattgatgtgtttgcaggaatcgccaacttctttgttgtgggaatcggtggggtgctgattggcatcttcttgggctttatagcggcatttactactcgattcacccataatatccgagtgatcgagccactgtttgttttcctgtacagttatttgtcctacatcacagctgaaatgtttcacctctcaggcatcatggcaatcactgcttgtgcaatgactatgaataagtacgtagaagaaaatgtatctcagaaatcctacacgaccatcaagtacttcatgaagatgctgagcagtgtcagcgaaaccttgatcttcatcttcatgggtgtgtctaccgtgggcaagaaccacgagtggaactgggccttcgtctgcttcaccctggccttctgcctcatgtggcgagccctgggtgtttttgtcctgactcaggtcattaataggttccggaccattcccctgacctttaaggaccagttcatcattgcctatggaggacttcgaggtgccatctgttttgcgttagtgtttctccttcctgctgctgtgtttcctcggaaaaaattgtttattacggctgccattgttgtcatattctttactgtcttcattctgggaataactattcgaccactggtggagtttcttgatgtcaagaggtccaataagaaacaacaagctgtcagtgaagaaatctattgtcggttgtttgatcatgtgaagactggaattgaagatgtttgtggacattggggtcacaacttttggagagacaagtttaagaagtttgatgataaatatctgcggaagcttttgattcgggaaaaccaaccaaagtcaagtattgtatctttatataaaaagcttgaaataaaacatgccattgagatggcagagactgggatgataagtactgtccctacatttgcatctctaaatgattgtcgtgaagaaaaaataaggaaggtcacgtccagtgaaactgatgaaattcgagaactcttatcaagaaatctctatcaaatccgtcagcgaactttatcctacaacagacacagtctgacagccgacacaagtgagagacaagccaaggagattctgattcgccggcgacacagtttgcgagaaagcattaggaaggacagcagcttgaatcgagaacacagggcttccacttcaacctcccgatatttatccttacctaaaaatacgaagcttccagaaaagctacaaaagaggaggactatttctattgcagatggcaatagcagcgactcagacgcagatgccgggaccaccgtgctcaatttgcagcccagagccaggcgcttcttgccagaacagttctccaagaaatccccccagtcctataaaatggaatggaagaatgaggtagatgttgattctggccgagatatgcccagcacccccccaacaccccacagcagagaaaagggcacccagacgtcaggcttactacagcagccccttctctctaaagaccagtctggctcagagagggaagacagtttgactgaaggcatcccgcccaagccgccaccacggctggtctggagggcatcggaacctggaagccggaaagcccgatttgggagtgagaagccttaagagaagcagcgaaagcagatctgagtgtctgacccaggacagctgtggtttgtcactctgaaacctgatgcaacagtggaatccatgtaaaactctctgtgcatctaaatacttctggagggcgacagattcatgccacggataaatgaggcaaatccgaagaaaaggaaaatcgaataaaaaatagtcccacaaaataccttttgtgactaatgggtagcaatcgtattatttgctggcctgaagagaaaaaatggtaatgtgtgcctttattgaacttgaatgacagaacttgaaatttttaacacatccttcttggtgaagattttaatatattacttatatgcttcaaattttatttatgaaaaaatatgtatatctgtaatcagttgttaagtgaatggcactaaaagtatcgagaacagctttctttcccaggggtgaaggatggcgctcgggggtgactcctaagctcagcgtggaagcttttccctgtcctgacccgatggagcagccggtaagtgaagagcacagctggaagcagagacaccttatgactcaaactgggcaaacaatcggaacgtcatgcagaaggaatggcctgactcctgcagtgcagattggaggccccagaactcctatgaactactgagagtctactggtttttaacttgttcctctgtctactgtgtgtttgggggtgacatctaaattccatttcttcttcttgtttaaatggtgcagagagaaaggttgcccagacatccaccagcttactgtgttgacagatttgggagcagcttttgatgaagttccacccatgagggtccatgtggcaagtagggccacagggcagcacctggttacaacttgctggtgggttttatgttgtgcaatactaggaggaggaggcaggtgatctatgctgatctatgatcacctgcttcagtagaatttttctgtagagtgttgtttgaattttgagcctccaggttagaggctccaagcagacaaagaagaaagtttgtagacacaatattctaacattgcacaagttgatgagatatcaagttttgaatattattcaggaagcactttggagaatgtgggagtcctactgttttgcactagtctgtaatttgttacctctccccattcgataatatagtaactcagaattttcatataaaattgaattctactcattagagtactttttaaaagtacagcagaaagaaaagaagtggaacataagcattcaagattaatatttgattctctatctcttaactgtagattttattggcctgttttttttttctaaataattctttaaaacttgactggaacatgcctctgcatttctgagtgtagaaattaaatgaagccactcacagtcctttgatttcccactgaagataccccaaaggatgcaagtgcctacagtattatcaggaggagaacatgaaaatattaagacaaaaatcctcagcagttgttctccaccccttctccacctccaccagcaaggagaagtcaatctacacttttttctcatgttctaaagtcttagaatactgctggattgttgagcatgagacagagcaaaggttagatacacaaggtacaagttcataggagcacaattccttgattcagggaaagtagcacagaatgcaatttgaaaactacaggcttaggactctgtgccaaaaatctctattttaaatgaaaatatttatataaaaatacatttattctgcttaacacaaattaaaactgacataaaattttatgataataacatgattcaagaaatgtgatgtagatttttgagaatgccaaaaatcaggtttcagaaaagctacagtatgaaatctgaaaagcaacagaaattgaaagtgaccttaaagaataaatttcctaatttttcccagtttcctatgtttataactattataaagagtttaactttctggaactgaaggagaaaacatgaaaatgtttatattgcttcttgttaagcaggtagaccaaattccgctttcagtaattcatccatacagaatttggatgactatgtataaaggaaaacttaaatcttaattattatcagtttaaattttttttgtttgttgaatgacaaaggcaataaaaataaatttgactttagctttttttctatactttcctctttttgtaattcttaaattctagtcactagtcattatgagagtattgactaaatattttcacaatctaaatattgtcacaatctaaatttctgtagtagagagagccgtagccctttgtaaaggctttcgttcgtccaaacaacacttgatccaaccaaagttccaatgtgactgtggatctttgataggtctttggtgttggttgtaacaaaatttgatttgaactacctataaatgaaaagtcggggtttattactttatatgtaatgctgagaggagactgttgggaacagttatgtcaatgagcaaactagaaattggcttcaaagtctaatacttttaaaagcatgtgttttgtgtatatgctcacaaaatgtctgtgaagagatttctttcagcttttgctcagctttatggtggggtgtactgttttatctgggcggtgagggtattgatttacataaaaactgtagacaaacacagtacgagtctcagcacgttttgcatttattgtactgcccaaattgtttttatgttaaaagtcacgtttcataatctgcaatatttttgtcaaagtgcacactgtactttcttcttaaaaacgtgattaaagagatcactttgtccggatgaa

SEQ ID NO: 134626 - DNA, 2439 bp, Artificial Sequence
  derived and/or modified sequence
atggagcccctgggcaactggagaagcctgagagcccccctgccccccatgctgctgctgctgctgctgcaggtggccggccccgtgggcgccctggccgagaccctgctgaacgcccccagagccatgggcaccagcagcagcccccccagccccgccagcgtggtggcccccggcaccaccctgttcgaggagagcagactgcccgtgttcaccctggactacccccacgtgcagatccccttcgagatcaccctgtggatcctgctggccagcctggccaagatcggcttccacctgtaccacaagctgcccaccatcgtgcccgagagctgcctgctgatcatggtgggcctgctgctgggcggcatcatcttcggcgtggacgagaagagcccccccgccatgaagaccgacgtgttcttcctgtacctgctgccccccatcgtgctggacgccggctacttcatgcccaccagacccttcttcgagaacatcggcaccatcttctggtacgccgtggtgggcaccctgtggaacagcatcggcatcggcgtgagcctgttcggcatctgccagatcgaggccttcggcctgagcgacatcaccctgctgcagaacctgctgttcggcagcctgatcagcgccgtggaccccgtggccgtgctggccgtgttcgagaacatccacgtgaacgagcagctgtacatcctggtgttcggcgagagcctgctgaacgacgccgtgaccgtggtgctgtacaacctgttcaagagcttctgccagatgaagaccatcgagaccatcgacgtgttcgccggcatcgccaacttcttcgtggtgggcatcggcggcgtgctgatcggcatcttcctgggcttcatcgccgccttcaccaccagattcacccacaacatcagagtgatcgagcccctgttcgtgttcctgtacagctacctgagctacatcaccgccgagatgttccacctgagcggcatcatggccatcaccgcctgcgccatgaccatgaacaagtacgtggaggagaacgtgagccagaagagctacaccaccatcaagtacttcatgaagatgctgagcagcgtgagcgagaccctgatcttcatcttcatgggcgtgagcaccgtgggcaagaaccacgagtggaactgggccttcgtgtgcttcaccctggccttctgcctgatgtggagagccctgggcgtgttcgtgctgacccaggtgatcaacagattcagaaccatccccctgaccttcaaggaccagttcatcatcgcctacggcggcctgagaggcgccatctgcttcgccctggtgttcctgctgcccgccgccgtgttccccagaaagaagctgttcatcaccgccgccatcgtggtgatcttcttcaccgtgttcatcctgggcatcaccatcagacccctggtggagttcctggacgtgaagagaagcaacaagaagcagcaggccgtgagcgaggagatctactgcagactgttcgaccacgtgaagaccggcatcgaggacgtgtgcggccactggggccacaacttctggagagacaagttcaagaagttcgacgacaagtacctgagaaagctgctgatcagagagaaccagcccaagagcagcatcgtgagcctgtacaagaagctggagatcaagcacgccatcgagatggccgagaccggcatgatcagcaccgtgcccaccttcgccagcctgaacgactgcagagaggagaagatcagaaaggtgaccagcagcgagaccgacgagatcagagagctgctgagcagaaacctgtaccagatcagacagagaaccctgagctacaacagacacagcctgaccgccgacaccagcgagagacaggccaaggagatcctgatcagaagaagacacagcctgagagagagcatcagaaaggacagcagcctgaacagagagcacagagccagcaccagcaccagcagatacctgagcctgcccaagaacaccaagctgcccgagaagctgcagaagagaagaaccatcagcatcgccgacggcaacagcagcgacagcgacgccgacgccggcaccaccgtgctgaacctgcagcccagagccagaagattcctgcccgagcagttcagcaagaagagcccccagagctacaagatggagtggaagaacgaggtggacgtggacagcggcagagacatgcccagcaccccccccaccccccacagcagagagaagggcacccagaccagcggcctgctgcagcagcccctgctgagcaaggaccagagcggcagcgagagagaggacagcctgaccgagggcatcccccccaagcccccccccagactggtgtggagagccagcgagcccggcagcagaaaggccagattcggcagcgagaagccctag

SEQ ID NO: 134627 - protein, 349 aa, Artificial Sequence
  derived and/or modified sequence
MEAHNASAPFNFTLPPNFGKRPTDLALSVILVFMLFFIMLSLGCTMEFSKIKAHLWKPKGLAIALVAQYGIMPLTAFVLGKVFRLKNIEALAILVCGCSPGGNLSNVFSLAMKGDMNLSIVMTTCSTFCALGMMPLLLYIYSRGIYDGDLKDKVPYKGIVISLVLVLIPCTIGIVLKSKRPQYMRYVIKGGMIIILLCSVAVTVLSAINVGKSIMFAMTPLLIATSSLMPFIGFLLGYVLSALFCLNGRCRRTVSMETGCQNVQLCSTILNVAFPPEVIGPLFFFPLLYMIFQLGEGLLLIAIFWCYEKFKTPKDKTKMIYTAATTEETIPGALGNGTYKGEDCSPCTA

SEQ ID NO: 134628 - DNA, 1050 bp, Artificial Sequence
  derived and/or modified sequence
atggaggctcacaacgcatctgctccattcaactttactttgccgccaaactttggcaaacgaccaactgatctcgctcttagcgtgattcttgtgtttatgctcttcttcattatgcttagcctgggctgtaccatggagttcagcaagattaaggcgcacctgtggaaacccaaaggccttgcaattgctcttgtggcccagtacggaatcatgcctttgaccgctttcgtcttagggaaggtcttccgcttaaagaatatcgaggcattagccattctggtgtgcggttgcagcccaggcggtaacctttcgaacgtcttttcccttgcaatgaaaggcgacatgaatctgtccatcgtcatgacaacctgcagtacattctgtgccctggggatgatgccattacttttgtacatatacagtagggggatatacgatggggacctcaaggataaggtgccttataaaggtatagtcatttcacttgtgctggttctgattccatgtactatcggtatcgtgctgaagagcaagcgccctcagtatatgcgttatgtgatcaagggagggatgatcatcatactgctctgctccgtcgcagtcactgtgctgtctgccattaatgtcgggaagtccatcatgtttgccatgactcccctgctaattgccactagctcactcatgccattcatcgggttccttctgggatacgtactctcagcccttttctgcttgaacgggcggtgtagacgcactgtatccatggagacagggtgtcaaaacgtccagctgtgttctaccatcctgaatgtggctttcccaccagaggtaatagggcccttgtttttcttccctctactatatatgatatttcagcttggagaggggctattactcattgcaattttttggtgttacgaaaaattcaagacgcccaaggacaagactaagatgatctacactgcggctaccactgaagaaacaattcccggggctctgggaaatgggacttataaaggggaggattgctcgccatgcaccgcatag

SEQ ID NO: 134629 - DNA, 1050 bp, Artificial Sequence
  derived and/or modified sequence
atggaggcccacaatgccagcgcccccttcaacttcaccctgccccccaactttgggaagaggcccacagacctggccctgagcgtcatcctggtgttcatgctgttcttcatcatgctgagcctgggctgcaccatggagttcagcaagatcaaggcccacctgtggaagcccaagggcctggccatcgccctggtggcccagtatggcatcatgcccctgacagcctttgtgctgggcaaggtgttccggctgaagaacatcgaggccctggccatcctggtgtgtggctgcagccctgggggcaacctgagcaatgtgttcagcctggccatgaagggggacatgaacctgagcatcgtgatgaccacctgcagcaccttctgtgccctgggcatgatgcccctgctgctgtacatctacagccggggcatctatgatggagacctgaaggacaaggtgccctacaagggcatcgtcatcagcctggtgctggtgctgatcccctgcaccatcggcatcgtgctgaagagcaagaggccccagtacatgagatatgtgatcaagggcggcatgatcatcatcctgctgtgcagcgtggccgtgacagtgctgagcgccatcaacgtgggcaagagcatcatgtttgccatgacccccctgctgattgccaccagcagcctgatgcccttcatcggcttcctgctgggctacgtgctgagcgccctcttctgcctgaatggccgctgcagaagaacagtgtccatggagaccggctgccagaatgtgcagctgtgcagcaccatcctgaatgtggccttccccccagaggtgattggccccctcttcttcttccccctgctgtacatgatcttccagctgggggagggcctgctgctgattgccatcttctggtgctatgagaagttcaagacccccaaggacaagaccaagatgatctacacagctgccaccacagaggagaccatccctggggccctgggcaatggcacctacaagggggaggactgcagcccctgcacagcctag

SEQ ID NO: 134630 - DNA, 1050 bp, Artificial Sequence
  derived and/or modified sequence
atggaggcccacaacgccagcgcccccttcaacttcaccctgcccccaaactttggaaagaggcctaccgatttagccctgtcagtcatcctcgtttttatgctgtttttcataatgctttctctgggttgcactatggaattctcaaaaataaaggcccacctgtggaagccgaaaggtctggccattgctctcgttgcccagtacggcatcatgccacttaccgcttttgtactcgggaaggttttccgactgaagaatattgaagccttagcaatactggtttgcggctgctcgcccggtgggaatttaagcaatgtgtttagtctggcaatgaagggcgatatgaatttgtccattgtaatgacaacttgttctacattctgcgcactgggcatgatgcccctcttactttacatctatagtagggggatctacgatggggacctgaaggataaagtaccctacaagggaatcgtgattagcttagtccttgtgttgatcccatgtacaataggcatagtgctcaaatctaaaaggccccagtacatgaggtatgtcatcaagggtggtatgatcatcatactcctttgtagtgtggccgtgactgtcctttccgctattaatgttgggaagagtataatgttcgccatgacccccctgcttatcgcgacatccagcctgatgcctttcatcggattcttgctgggttatgtgctatctgcgctcttttgccttaatgggcgttgtagacgaaccgtgagtatggagaccggctgtcaaaatgtgcagttgtgcagcaccattttgaacgtagcctttccgccagaagttatcggtccactgttcttcttccctcttctgtatatgatcttccaacttggtgaagggcttttgttgattgcaattttttggtgttacgagaagttcaagactcccaaggataaaactaaaatgatttatacagccgcaaccacagaagaaacaattccaggcgctctcgggaatgggacctacaaaggagaagactgtagtccctgcaccgcctag

SEQ ID NO: 134631 - DNA, 1050 bp, Artificial Sequence
  derived and/or modified sequence
atggaagctcacaacgcatcagccccattcaactttaccctcccacctaactttggcaagaggccaacagatctggctctttcagtgatccttgtgttcatgttatttttcatcatgctgagtctcgggtgcaccatggagtttagtaagattaaagcccatctctggaagcctaaaggtctagcaatcgcgcttgtggcacagtacggaatcatgcccctcaccgccttcgtgctgggcaaagtgttccggctgaaaaacatagaggctctggctattctggtctgcggatgctcacccggtgggaacctgagcaatgtattctcgctggcaatgaagggtgatatgaatctgtcaatcgtgatgaccacctgcagtactttttgtgccttaggaatgatgcctttgctgttatacatttatagccggggaatttacgacggtgatctaaaggataaagttccatacaagggtatagtgataagcctggtactagtgcttattccctgcacaattggcatcgttctgaagagcaagcgccctcagtacatgaggtacgtgataaagggaggaatgattatcatcctgctgtgtagcgtagccgttactgtgcttagcgcgattaacgtggggaagagtatcatgttcgctatgacacctctgttgatcgcaacctcctcacttatgccctttatcggctttctgcttggatatgtgctcagcgcgctattctgtctgaatggacgctgcaggagaacagtttcaatggagactggctgtcagaatgtacagctgtgctccacgatcctcaacgtcgcttttccacccgaagtcattggacccctttttttcttccccctcttatacatgatttttcagctgggagaaggcttactcctcatcgccattttctggtgctatgagaagttcaaaacccccaaagacaaaaccaagatgatctacactgctgccactacagaagagacaatcccaggcgcattaggaaacgggacatacaagggggaggattgcagcccttgcaccgcttag

SEQ ID NO: 134632 - DNA, 2049 bp, Artificial Sequence
  derived and/or modified sequence
ttctatttgcccagagcttttgtccagaaactctctgtcctgagaggtgattaaagaaggcatccagcaagaactgcacaagaaacggagtcagccggagaacaaggagtggtcttccactgcctcacaggaggatggaggcccacaacgcgtctgccccattcaacttcaccctgccacccaactttggcaagcgccccacagacctggcactgagcgtcatcctggtgttcatgttgttcttcatcatgctctcgctgggctgcaccatggagttcagcaagatcaaggctcacttatggaagcctaaagggctggccatcgccctggtggcacagtatggcatcatgcccctcacggcctttgtgctgggcaaggtcttccggctgaagaacattgaggcactggccatcttggtctgtggctgctcacctggagggaacctgtccaatgtcttcagtctggccatgaagggggacatgaacctcagcattgtgatgaccacctgctccaccttctgtgcccttggcatgatgcctctcctcctgtacatctactccagggggatctatgatggggacctgaaggacaaggtgccctataaaggcatcgtgatatcactggtcctggttctcattccttgcaccatagggatcgtcctcaaatccaaacggccacaatacatgcgctatgtcatcaagggagggatgatcatcattctcttgtgcagtgtggccgtcacagttctctctgccatcaatgtggggaagagcatcatgtttgccatgacaccactcttgattgccacctcctccctgatgccttttattggctttctgctgggttatgttctctctgctctcttctgcctcaatggacggtgcagacgcactgtcagcatggagactggatgccaaaatgtccaactctgttccaccatcctcaatgtggcctttccacctgaagtcattggaccacttttcttctttcccctcctctacatgattttccagcttggagaagggcttctcctcattgccatattttggtgctatgagaaattcaagactcccaaggataaaacaaaaatgatctacacagctgccacaactgaagaaacaattccaggagctctgggaaatggcacctacaaaggggaggactgctccccttgcacagcctagcccttcccctggtggcctggattctggtcccaaagcaattctgaaagccagtgtggtaaactagagagagcagcaaaaacaccagtcttgcctgagtctttctccagcatttccagtacatctatcagaatcatcaagtcttggccgggaacacagacagggtgtctacccaagaagcctcacctatccccaacttagaatttgctacttattttaaagacttgttcagtgactgtaaactctatgaaaccagaaaccgaatctgcctcttgctgggatctctaaaagtgtctgataagcatcttaaagtcactcaattcctgaactaatcaatatatatgtttaacccattactcaaatacccaaatcccattccaagttttgtgacccaaaagagaaataaatgctcacaagtgctgtagaattaaacttcagaagttctaacctaaaaagttcagatcctattccttcccttttgacattattgggatgatgctcccgaaaagtcaaatttgacatcaagtatgcaaaagtgaacacagtaagatgcaatcaggcaaaacaaactcaaaaaatagctaatgaaatgaaaaaactgggcgaatgcatcatgttagtagaggaggaaaacttttgacaaggaaaaaccaggaaacaaacacatacattaacacaatgttacctcactaataatctcttttttaagttcagtaggtatttggttttaacacaaggcgcccccaaaactgggtacagcaaactactgccaaaatgagtcgtttcccaattcaaagaaaaatgttcaaatacctagaattcacaaatttcaaattgtctctaataaaatttaaacattttgcatatc

SEQ ID NO: 134633 - DNA, 1050 bp, Artificial Sequence
  derived and/or modified sequence
atggaggcccacaacgccagcgcccccttcaacttcaccctgccccccaacttcggcaagagacccaccgacctggccctgagcgtgatcctggtgttcatgctgttcttcatcatgctgagcctgggctgcaccatggagttcagcaagatcaaggcccacctgtggaagcccaagggcctggccatcgccctggtggcccagtacggcatcatgcccctgaccgccttcgtgctgggcaaggtgttcagactgaagaacatcgaggccctggccatcctggtgtgcggctgcagccccggcggcaacctgagcaacgtgttcagcctggccatgaagggcgacatgaacctgagcatcgtgatgaccacctgcagcaccttctgcgccctgggcatgatgcccctgctgctgtacatctacagcagaggcatctacgacggcgacctgaaggacaaggtgccctacaagggcatcgtgatcagcctggtgctggtgctgatcccctgcaccatcggcatcgtgctgaagagcaagagaccccagtacatgagatacgtgatcaagggcggcatgatcatcatcctgctgtgcagcgtggccgtgaccgtgctgagcgccatcaacgtgggcaagagcatcatgttcgccatgacccccctgctgatcgccaccagcagcctgatgcccttcatcggcttcctgctgggctacgtgctgagcgccctgttctgcctgaacggcagatgcagaagaaccgtgagcatggagaccggctgccagaacgtgcagctgtgcagcaccatcctgaacgtggccttcccccccgaggtgatcggccccctgttcttcttccccctgctgtacatgatcttccagctgggcgagggcctgctgctgatcgccatcttctggtgctacgagaagttcaagacccccaaggacaagaccaagatgatctacaccgccgccaccaccgaggagaccatccccggcgccctgggcaacggcacctacaagggcgaggactgcagcccctgcaccgcctag

SEQ ID NO: 134634 - protein, 639 aa, Artificial Sequence
  derived and/or modified sequence
MLSYGERLGSPAVSPLPVRGGHVMRGTAFAYVPSPQVLHRIPGTSAYAFPSLGPVALAEHTCPCGEVLERHEPLPAKLALEEEQKPESRLVPKLRQAGAMLLKVPLMLTFLYLFVCSLDMLSSAFQLAGGKVAGDIFKDNAILSNPVAGLVVGILVTVLVQSSSTSTSIIVSMVSSGLLEVSSAIPIIMGSNIGTSVTNTIVALMQAGDRTDFRRAFAGATVHDCFNWLSVLVLLPLEAATGYLHHITRLVVASFNIHGGRDAPDLLKIITEPFTKLIIQLDESVITSIATGDESLRNHSLIQIWCHPDSLQAPTSMSRAEANSSQTLGNATMEKCNHIFVDTGLPDLAVGLILLAGSLVLLCTCLILLVKMLNSLLKGQVAKVIQKVINTDFPAPFTWVTGYFAMVVGASMTFVVQSSSVFTSAITPLIGLGVISIERAYPLTLGSNIGTTTTAILAALASPREKLSSAFQIALCHFFFNISGILLWYPVPCTRLPIRMAKALGKRTAKYRWFAVLYLLVCFLLLPSLVFGISMAGWQVMVGVGTPFGALLAFVVLINVLQSRSPGHLPKWLQTWDFLPRWMHSLKPLDHLITRATLCCARPEPRSPPLPPRVFLEELPPATPSPRLALPAHHNATRL

SEQ ID NO: 134635 - DNA, 1920 bp, Artificial Sequence
  derived and/or modified sequence
atgctttcttacggtgagcggctaggctctcctgccgtgtctcctttgccagtgcgagggggacacgtgatgcgtggaaccgcctttgcctatgtgcctagcccgcaagtgctgcaccgtattcctggtactagcgcctacgccttcccctccttaggaccagtagcactggcagagcacacttgcccctgtggcgaggtgctggaaaggcatgagccgctcccggctaagctggcattggaggaggaacagaagccagaatcgcggctcgtgccaaaacttaggcaggccggagcgatgctgctgaaggtccccctgatgttaacgttcctgtacctatttgtgtgctcactggatatgctcagttccgcctttcaactggccgggggcaaggttgcaggcgatatctttaaggacaacgcgatcctgtccaaccctgtggcaggcctggtcgtcggtatcctggtgactgtgctggtgcagtcatcgtcaacaagtaccagtatcatagtgagtatggtgagctcaggtctcctggaagtatcctcagctatccctattattatggggtccaatatcggcacctcggtgacaaacacgatcgtagccctcatgcaggccggagatcggaccgactttcgtcgcgcgtttgctggagctacagtgcatgactgttttaattggctttcagtcctcgtattactccctttagaggccgcaacaggctacctgcaccacattacacggctcgtcgtggcttcatttaatatccacggaggcagagatgccccagacttgctgaagattattactgagcctttcaccaagttgatcatccaattagacgaaagtgtcatcacatccattgccactggcgacgagagtttgagaaaccattcactgatacagatatggtgccacccagactccctgcaggcccccacatctatgtctagggccgaagcgaactcctcccagacattgggcaacgcaactatggagaagtgtaatcatatttttgtggataccgggcttccggacctggctgtgggactcatcttacttgccgggtcacttgtgctgctgtgtacatgcctgattttgctggtgaagatgctcaactccttgctaaaggggcaagtggcgaaagtaatacagaaagtcatcaataccgatttcccggcacctttcacttgggtgaccggttatttcgcgatggtggtgggggctagcatgactttcgttgtccagtcttcctctgtgttcacatctgccataacccccctcatcggtctaggggtaatcagcatagagagagcctaccctctgacactcggaagcaatattggcacgaccaccacggctatcctggccgcactggcttctcccagagagaagctttcttccgctttccaaatcgccctctgtcacttctttttcaacatcagtggtatcctgctttggtaccccgtgccatgtacgcgcctgcctatcagaatggcaaaggcgttgggaaagcgaaccgcaaagtaccggtggtttgctgttctgtacctgctagtgtgcttcctgctgttacccagcctagtttttggcatttctatggccggatggcaggttatggttggtgttggaaccccttttggagctcttcttgcctttgttgtgctgataaacgtactgcagagtcgctcacctggtcatctgccgaaatggctacagacatgggacttcctgcccagatggatgcatagccttaagcctttggaccacctgattactagggccacactgtgctgtgctaggccggaacctcgttctcctcccctgccacccagggtctttcttgaagagcttccgcctgccaccccaagcccgagactggctctgccagcccatcacaacgctacccggctgtag

SEQ ID NO: 134636 - DNA, 1920 bp, Artificial Sequence
  derived and/or modified sequence
atgctgtcctatggagagcggctgggcagccctgctgtgagccccctgcctgtgcggggcggccacgtgatgaggggcacagcctttgcctacgtgcccagcccccaggtgctgcaccgcatccctggcaccagcgcctatgccttccccagcctgggccctgtggccctggccgagcacacctgcccctgtggggaggtgctggagagacatgagcccctgcctgccaagctggccctggaggaggagcagaagccagagagccggctggtgcccaagctgcggcaggccggggccatgctgctgaaggtgcccctgatgctgaccttcctgtacctgtttgtgtgcagcctggacatgctgagcagcgccttccagctggccggcggcaaggtggccggggacatcttcaaggacaatgccatcctgagcaaccctgtggccggcctggtggtgggcatcctggtgacagtgctggtgcagagcagcagcaccagcaccagcatcatcgtgtccatggtgagcagcggcctgctggaggtgtcctctgccatccccatcatcatgggcagcaacatcggcacctctgtgaccaacaccatcgtggccctgatgcaggccggggacagaacagacttccggcgggcctttgctggggccaccgtgcatgactgcttcaactggctgtctgtgctggtgctgctgcccctggaggccgccaccggctacctgcaccacatcacccggctggtggtggccagcttcaacatccacggcggcagagatgccccagacctgctgaagatcatcacagagcccttcaccaagctgatcatccagctggatgagagcgtcatcaccagcatcgccactggagatgagagcctgaggaaccacagcctcatccagatctggtgccacccagacagcctgcaggcccccacctccatgagcagagctgaggccaacagcagccagaccctgggcaatgccaccatggagaagtgcaaccacatctttgtggacaccggcctgcctgacctggccgtgggcctcatcctgctggccggcagcctggtgctgctgtgcacctgcctgatcctgctggtgaagatgctgaacagcctgctgaagggccaggtggccaaggtgatccagaaggtgatcaacacagacttccctgcccccttcacctgggtgacaggctactttgccatggtggtgggcgcctccatgacctttgtggtgcagagcagcagcgtcttcaccagcgccatcacccccctcatcggcctgggcgtcatcagcattgagcgggcctaccccctgaccctgggcagcaacatcggcaccaccaccacagccatcctggccgccctggccagcccccgggagaagctgagcagcgccttccagatcgccctgtgccacttcttcttcaacatcagcggcatcctgctgtggtaccctgtgccctgcacccggctgcccatccgcatggccaaggccctgggcaagaggacagccaagtaccgctggtttgctgtgctgtacctgctggtgtgcttcctgctgctgcccagcctggtgtttggcatctccatggccggctggcaggtgatggtgggcgtgggcaccccatttggagccctgctggcctttgtggtgctgatcaacgtgctgcagagccgcagccctggccacctgcccaagtggctgcagacctgggacttcctgccccgctggatgcacagcctgaagcccctggaccacctgatcacccgggccaccctgtgctgtgcccggcctgagcccaggagcccccccctgccccccagggtcttcctggaggagctgcccccagccacccccagcccccggctggccctgcctgcccaccacaatgccacccggctgtag

SEQ ID NO: 134637 - DNA, 1920 bp, Artificial Sequence
  derived and/or modified sequence
atgctgagctacggcgagcggctgggcagccccgccgtgagccccctgcctgttagaggggggcacgtcatgaggggtactgcttttgcctacgtaccgtcaccacaggtgctccaccggatcccagggacaagtgcctatgcatttcccagtttggggccagtggccttggcagaacacacttgcccatgcggagaagtgctggagcgtcacgaaccgctgcctgccaaactggcgcttgaagaggagcagaaacctgaatctcgtttggttcccaaactcaggcaagctggggccatgctgcttaaggtgccgttaatgttaaccttcctgtacttgttcgtgtgtagcctagatatgttgagtagcgccttccagttggctggagggaaagttgcaggggacatattcaaagataacgctatactgtctaatcccgtggccggcctggttgtcgggatacttgtcactgtgcttgtgcaaagtagttcaacaagcacaagcattatagttagtatggtcagcagtggcttgcttgaagtctcgtcggccattcctattatcatgggatcaaatattggaactagtgtcaccaataccatcgtggcccttatgcaggcaggcgacaggaccgactttaggcgagcgttcgctggagcaactgtccacgattgctttaactggctctctgtgctggtcctgctgcccttggaggctgcaacgggctatctgcatcacataaccaggctggttgtggcgagctttaacatacatgggggccgcgatgctcctgacctgctcaaaataataaccgagcccttcaccaagctgattatacagctggatgaatctgtcatcacatccattgcgactggggacgaatccttgcggaatcattccctgatccagatttggtgccaccccgacagcctgcaagcacctacttcgatgtcaagggccgaggccaattcctctcaaacactcgggaacgccactatggagaagtgcaaccacattttcgtagatactggactgcctgatcttgctgtgggcctcattctcttagctggtagcctcgtcctattatgtacttgcctcatactgttagtgaaaatgctcaactccctgctgaagggacaggtggccaaagtaatccagaaggttattaacactgattttccagcccctttcacgtgggtaaccggttacttcgcaatggtggttggtgcaagtatgacgtttgtcgtccagtcatcatctgtgttcaccagcgcaatcacaccgctcatcgggttgggagtaattagcatagaaagagcatacccacttaccctcggctccaacattggaactacaacaacagcaatcctggcagccttggccagcccccgcgaaaaactgtccagtgccttccagatagccctgtgccatttcttcttcaatattagtgggatcctactctggtaccctgtgccttgtactaggttaccaatccgcatggcgaaggcactcggcaaaagaaccgcgaaatacagatggtttgctgtcttgtacctgctcgtctgtttcctgctgttacccagcctagtctttggcattagcatggccggctggcaggtcatggttggtgtcggcactccctttggggccctccttgccttcgtcgtcctcatcaacgtcctccaaagtcggtcccctggtcacctccccaagtggctgcaaacctgggattttctcccaaggtggatgcattccctgaagcccttggaccacctgattactcgggccaccctctgctgcgcccgcccggagccacgctcaccacctttgcccccacgggtgttcctagaagagctgccacctgcgactccttccccaaggctggcactgcctgcccatcacaatgcaacccggttatag

SEQ ID NO: 134638 - DNA, 1920 bp, Artificial Sequence
  derived and/or modified sequence
atgctgagctatggggaacgcctgggatctcctgctgtctcccccttacccgtgaggggaggccacgtgatgcgtggcactgccttcgcctatgtcccctccccacaagtgttgcacagaatcccgggtacctcagcctatgccttcccttcactgggtccagtggcattggctgagcacacatgtccatgcggcgaggtccttgaacgccacgagccgctgcctgcgaaactggctcttgaagaagaacagaaacctgaaagtaggctggtgcccaaactgcgacaggcaggcgcaatgttactgaaagtgccattgatgctgacattcttatatctgtttgtgtgcagcctggacatgctctcaagcgctttccagctggcaggcggaaaggtcgctggcgatattttcaaggacaacgccattctaagtaatccggtcgccggtcttgtggtcggtattctcgtgacagtactggtgcagagctccagtacatccacaagtatcatcgtaagtatggtgagcagtggcttattggaagtgtctagcgccattcccattatcatgggtagcaatatcgggacaagtgtcacaaacaccatcgtggccctgatgcaggctggcgacagaaccgattttcggagagcattcgcaggtgcaactgtgcacgattgcttcaattggctatccgtgctcgtgctgttgcctctggaggccgctaccgggtatttgcaccacatcactcgattggtggtcgcaagctttaacatccacggcggaagagacgccccagatctgcttaaaatcattaccgaaccctttacaaagctcataatccagctcgatgaatctgtaatcacctcgatagctaccggagacgaatccttgagaaaccacagcctgattcagatctggtgccaccccgatagtctccaggcaccaactagcatgagccgggcagaagcgaactcaagccagaccctggggaacgctacaatggaaaagtgcaaccacatttttgtcgacacgggactgcccgacctggcagtaggcctgattctcctcgcaggtagtctcgttttactttgtacttgcctgattttgctggtcaagatgctcaattctttgctgaaagggcaggtcgccaaagtgattcagaaggtgatcaataccgattttccagctccttttacttgggtgacgggttattttgccatggtcgtaggtgctagcatgaccttcgtagtgcagtctagtagtgtgtttacctccgccataactccactaatcggcctgggggtgataagcattgaacgcgcataccccctgaccctagggtcgaatataggaacaacaaccacggctattctggctgctctcgcttctccacgggagaaactgtcaagcgccttccagatcgctctttgccattttttcttcaacatcagcggcatcttgttgtggtaccctgtgccatgtacccgactgcccatcagaatggccaaagccctgggaaaacgaacagccaagtacagatggttcgccgtgttgtacctcctggtatgtttcctcttgctcccctccctggtgtttgggatctctatggctggctggcaggtgatggtgggagtgggtactccgttcggagcactactggcctttgtcgtgttaatcaacgtcttacaatcaaggtccccgggacatctgcctaaatggttgcagacttgggatttcctaccccgatggatgcattcattaaaacctcttgaccacctgatcacacgcgcaaccctatgctgcgcacgcccagaacccagatcccctccactgcctcccagggtcttcctggaggagttgcctccagccaccccaagccctcgcctagcattgcctgcgcatcataacgccacacgcctgtag

SEQ ID NO: 134639 - DNA, 2573 bp, Artificial Sequence
  derived and/or modified sequence
cttcattgagctgctgagcagaagctgaaacacagaattctaagcgttgctgagacccactgacctgcagacctcatagtgggtgcccaggatgttgtcctacggagagaggctggggtcccctgctgtctccccactcccagtccgtggggggcatgtgatgcgagggacggcctttgcctacgtgcccagccctcaggtcctacacaggatcccggggacctctgcctatgccttccccagcctgggccctgtggcccttgctgagcacacctgcccctgtggggaggtcctggagcgccatgaaccactgcctgccaagctggccctggaggaggagcagaagccagagtccaggctggtccccaagctgcgccaggctggcgccatgctgctcaaggtgccactgatgctcaccttcctctacctcttcgtctgctccctggacatgctcagctcggccttccagctggctggagggaaggtggctggtgacatcttcaaggataacgccatcctgtccaacccggtggccgggctggtggtggggatcctggtgaccgtgctggtgcagagctccagcacctccacatccatcatcgtcagcatggtctcctctggcttgctggaggtgagctctgccatccccatcatcatgggctccaacatcggcacctctgtcaccaacaccatcgtggccctgatgcaggcgggggacaggactgacttccggcgggccttcgcgggggccacggtgcatgactgctttaactggctgtcagtgctggtcctgctgcccctggaggctgccactggctacctgcaccacatcactcgacttgtggtggcctccttcaacatccatggtggccgtgatgctcctgacctgctcaagatcatcacagagcccttcacgaagctcatcatccagctggacgagtctgtgataaccagcattgccactggtgatgagtccctgaggaaccacagtctcatccagatctggtgccacccagactccttacaggctcccacctccatgtccagagcagaggccaactccagccagacccttggaaatgccaccatggagaaatgcaaccacatctttgtggacactggcctaccggacctggctgtggggctcatcctgctggcaggatccctggtgctgctgtgcacctgcctcatcctcctagtcaagatgctcaactccctgctcaagggccaagtggccaaggtcatccagaaggtcatcaatacggacttccctgcccccttcacctgggtcacaggctactttgccatggtggtgggcgccagcatgaccttcgtggtccagagcagttctgtgttcacctcggccatcaccccactcatcggtcttggtgtgatcagcattgagagggcctacccgctcacactgggttccaacatcggcaccaccaccacggccatcctggctgccctggccagccccagggagaagctgtccagcgctttccagattgccctctgtcacttcttcttcaacatctcgggtatccttctgtggtacccggtgccctgcacacgcctgcccatccgcatggccaaggcgctggggaaacgcacggccaagtaccgctggtttgccgtcctctatctccttgtctgcttcctgctgctgccctcactggtgtttggcatctccatggcaggctggcaggtcatggtaggtgtgggcacgcccttcggggccctgctggccttcgtggtgctcatcaatgtcctgcagagtcggagtcccgggcacctgcccaagtggttacagacatgggacttcctgcctcgctggatgcactccctgaagcccctggaccacctcatcacccgcgccaccctatgctgtgccaggcctgagccccgctcacccccgctgccccccagggtcttcctggaggagctaccccctgccacaccctccccccgtcttgcactgcctgctcaccacaatgccacccgcctctaggctgtgggcccagactacagcctggaatggggaaggcctggggtggaaaggcaggggagggagggtgtgtgtaggtatgtgcatgtgcctgtgccaccctgggtgccagtctctccttctgtagctccgcaaagctctgggcttgtgtgagagtgtcggtgtgtgtgcatgtgtgggggtgagtctgcatgtgcacctgtcatgtgtagaagcttgtatttgtgtacaggtgtgccagcccatgcaggtgtacacagacacacctgtgggaggctgtgtgcaggctgcaggatatctgggtatgatttcaggtcctctgcacgtgtacacatgactaggataggcaggagtaagggtgggtctgggtatatgactgtgcagctgtttgtgcatagatgttggtgcctgcgttactgaatttgcacacctccttgccaccttccttcctccaagataccatctcctcatcctaacccaggtcttcggcaccaccacaattaattcccttcccaacacttgcctgatggaaaaaaaacaaaggaattaaaactctcctcaggca

SEQ ID NO: 134640 - DNA, 1920 bp, Artificial Sequence
  derived and/or modified sequence
atgctgagctacggcgagagactgggcagccccgccgtgagccccctgcccgtgagaggcggccacgtgatgagaggcaccgccttcgcctacgtgcccagcccccaggtgctgcacagaatccccggcaccagcgcctacgccttccccagcctgggccccgtggccctggccgagcacacctgcccctgcggcgaggtgctggagagacacgagcccctgcccgccaagctggccctggaggaggagcagaagcccgagagcagactggtgcccaagctgagacaggccggcgccatgctgctgaaggtgcccctgatgctgaccttcctgtacctgttcgtgtgcagcctggacatgctgagcagcgccttccagctggccggcggcaaggtggccggcgacatcttcaaggacaacgccatcctgagcaaccccgtggccggcctggtggtgggcatcctggtgaccgtgctggtgcagagcagcagcaccagcaccagcatcatcgtgagcatggtgagcagcggcctgctggaggtgagcagcgccatccccatcatcatgggcagcaacatcggcaccagcgtgaccaacaccatcgtggccctgatgcaggccggcgacagaaccgacttcagaagagccttcgccggcgccaccgtgcacgactgcttcaactggctgagcgtgctggtgctgctgcccctggaggccgccaccggctacctgcaccacatcaccagactggtggtggccagcttcaacatccacggcggcagagacgcccccgacctgctgaagatcatcaccgagcccttcaccaagctgatcatccagctggacgagagcgtgatcaccagcatcgccaccggcgacgagagcctgagaaaccacagcctgatccagatctggtgccaccccgacagcctgcaggcccccaccagcatgagcagagccgaggccaacagcagccagaccctgggcaacgccaccatggagaagtgcaaccacatcttcgtggacaccggcctgcccgacctggccgtgggcctgatcctgctggccggcagcctggtgctgctgtgcacctgcctgatcctgctggtgaagatgctgaacagcctgctgaagggccaggtggccaaggtgatccagaaggtgatcaacaccgacttccccgcccccttcacctgggtgaccggctacttcgccatggtggtgggcgccagcatgaccttcgtggtgcagagcagcagcgtgttcaccagcgccatcacccccctgatcggcctgggcgtgatcagcatcgagagagcctaccccctgaccctgggcagcaacatcggcaccaccaccaccgccatcctggccgccctggccagccccagagagaagctgagcagcgccttccagatcgccctgtgccacttcttcttcaacatcagcggcatcctgctgtggtaccccgtgccctgcaccagactgcccatcagaatggccaaggccctgggcaagagaaccgccaagtacagatggttcgccgtgctgtacctgctggtgtgcttcctgctgctgcccagcctggtgttcggcatcagcatggccggctggcaggtgatggtgggcgtgggcacccccttcggcgccctgctggccttcgtggtgctgatcaacgtgctgcagagcagaagccccggccacctgcccaagtggctgcagacctgggacttcctgcccagatggatgcacagcctgaagcccctggaccacctgatcaccagagccaccctgtgctgcgccagacccgagcccagaagcccccccctgccccccagagtgttcctggaggagctgccccccgccacccccagccccagactggccctgcccgcccaccacaacgccaccagactgtag

SEQ ID NO: 134641 - protein, 514 aa, Artificial Sequence
  derived and/or modified sequence
MALSELALVRWLQESRRSRKLILFIVFLALLLDNMLLTVVVPIIPSYLYSIKHEKNATEIQTARPVHTASISDSFQSIFSYYDNSTMVTGNATRDLTLHQTATQHMVTNASAVPSDCPSEDKDLLNENVQVGLLFASKATVQLITNPFIGLLTNRIGYPIPIFAGFCIMFVSTIMFAFSSSYAFLLIARSLQGIGSSCSSVAGMGMLASVYTDDEERGNVMGIALGGLAMGVLVGPPFGSVLYEFVGKTAPFLVLAALVLLDGAIQLFVLQPSRVQPESQKGTPLTTLLKDPYILIAAGSICFANMGIAMLEPALPIWMMETMCSRKWQLGVAFLPASISYLIGTNIFGILAHKMGRWLCALLGMIIVGVSILCIPFAKNIYGLIAPNFGVGFAIGMVDSSMMPIMGYLVDLRHVSVYGSVYAIADVAFCMGYAIGPSAGGAIAKAIGFPWLMTIIGIIDILFAPLCFFLRSPPAKEEKMAILMDHNCPIKTKMYTQNNIQSYPIGEDEESESD

SEQ ID NO: 134642 - DNA, 1545 bp, Artificial Sequence
  derived and/or modified sequence
atggcgctttccgagctagccctcgtgcgctggctgcaggaatcacggaggtctaggaagctgattctgtttattgtcttcctggccctgttactggataacatgctactcacagtcgttgtgcctatcataccttcttatctatactccattaaacatgagaagaacgcgacagaaatccagacagctagacctgtgcacaccgcaagcattagcgactcattccagagtattttttcctactatgacaactcgacaatggtgacaggcaatgcaacaagggatctgactctccatcaaaccgctacccagcatatggtgacaaacgcttctgctgtgccctccgattgcccctccgaggataaagatctcctcaatgaaaacgtccaggttgggctgcttttcgccagtaaggcaacagtccagctgatcactaatcccttcatcggactgcttacaaatcggattgggtacccaatacccatcttcgctgggttctgcatcatgttcgtgtccaccataatgtttgctttcagcagtagctatgccttcctgctcatcgccaggagcctacagggaatcggttccagttgtagtagtgtggctggtatgggaatgctggccagcgtgtacacagacgatgaggagagaggtaacgtcatgggcatcgccttgggcggcctggccatgggggtccttgtcggacctccattcggtagcgtgctatacgaattcgtcggtaagacagcccccttcttagtgctggcagctctggtactgttagacggcgccatccaactctttgtgctgcagccttccagagtccaacctgaatcacagaagggaaccccacttacaaccctactgaaggacccttatatcttgatagcggcaggctccatatgtttcgctaacatgggcattgccatgctcgagcctgcactgccaatatggatgatggaaacaatgtgctctagaaaatggcagttgggtgtcgcctttcttccagctagcatctcctatctgatcggaactaacatctttgggatactagcccacaaaatgggacgttggctttgtgccctgctggggatgatcattgttggggtcagcattctgtgcatccctttcgccaaaaatatttacgggcttattgctcccaactttggcgtcggctttgcaatcggaatggtggactcgtctatgatgccaattatgggctatttggtagacttgcggcatgtgagcgtctacggctcagtgtacgctattgccgatgttgccttctgcatggggtatgcaatcggaccctccgcgggcggggcgatagctaaggcaatcgggtttccttggctgatgacaatcatcggcattattgatatcctgttcgcccctctgtgtttttttctgcgtagtccgccagccaaggaggaaaagatggccatcctgatggaccataactgccccattaaaaccaaaatgtatacgcagaataatattcaaagctaccccatcggggaggatgaggaatccgaatctgactag

SEQ ID NO: 134643 - DNA, 1545 bp, Artificial Sequence
  derived and/or modified sequence
atggccctgtctgagctggccctggtgcgctggctgcaggagagccgccgcagcaggaagctgatcctcttcatcgtgttcctggccctgctgctggacaacatgctgctgactgtggtggtgcccatcatccccagctacctgtacagcatcaagcatgagaagaatgccacagagatccagacagcccggcctgtgcacacagccagcatcagtgacagcttccagagcatcttctcctactatgacaacagcaccatggtgactggaaatgccacccgggacctgaccctgcaccagacagccacccagcacatggtgaccaatgccagcgctgtgcccagcgactgccccagcgaggacaaggacctgctgaatgaaaatgtgcaggtgggcctgctgtttgccagcaaggccaccgtgcagctgatcaccaaccccttcatcggcctgctgaccaaccgcatcggctaccccatccccatctttgctggcttctgcatcatgtttgtgtccaccatcatgtttgccttcagcagcagctatgccttcctgctgattgcccggagcctgcagggcatcggcagcagctgcagctctgtggccggcatgggcatgctggcctctgtgtacacagatgatgaggagagaggaaatgtgatgggcatcgccctgggcggcctggccatgggcgtgctggtgggcccccccttcggctctgtgctgtatgaatttgtgggcaagacagcccccttcctggtgctggccgccctggtgctgctggatggagccatccagctgtttgtgctgcagcccagccgggtgcagcctgagagccagaagggcacccccctgaccaccctgctgaaggacccctacatcctgattgctgctggcagcatctgctttgccaacatgggcatcgccatgctggagcccgccctgcccatctggatgatggagaccatgtgcagcaggaagtggcagctgggcgtggccttcctgcctgccagcatctcctacctgattggcaccaacatcttcggcatcctggcccacaagatgggccgctggctgtgtgccctgctgggcatgatcatcgtgggcgtgtccatcctgtgcatcccctttgccaagaacatctacggcctgattgcccccaactttggagtgggctttgccatcggcatggtggacagctccatgatgcccatcatgggctacctggtggacctgcggcacgtgtctgtgtatggctctgtgtatgccatcgcagatgtggccttctgcatgggctacgccatcggccccagcgctggaggagccatcgccaaggccatcggcttcccctggctgatgaccatcatcggcatcatcgacatcctgtttgcccccctgtgcttcttcctgcggagccccccagccaaggaggagaagatggccatcctgatggaccacaactgccccatcaagaccaagatgtacacccagaacaacatccagagctaccccatcggagaagatgaggagagcgagagtgactag

SEQ ID NO: 134644 - DNA, 1545 bp, Artificial Sequence
  derived and/or modified sequence
atggccctgagcgagctggccctggtgcggtggctgcaggagagccggcggtcgaggaagctgattctgtttatcgttttcttagcactcctccttgataatatgcttctcaccgtggtcgttcccatcatcccttcttacctctatagtatcaagcatgaaaagaatgccacagagattcaaacagctcgccccgtacataccgcatcaatctccgatagcttccagtccatcttttcttattacgacaattcaacaatggtcacaggcaatgccacacgtgacctgacactgcaccagactgccacccagcacatggtcaccaacgcctcggcggtccccagcgactgcccgagcgaagataaagacctcttgaacgagaatgtacaagtcggcttactctttgcctcaaaagctaccgtacagctaatcactaacccgttcattggacttctgacaaaccggatcggctacccaatacccatctttgctggcttctgtattatgttcgtgagcaccattatgttcgccttttccagcagctacgccttcctcctaatcgcaaggagcttacaagggatcggatcatcttgctcttcagttgccgggatgggaatgctggctagtgtctatacagacgatgaggagaggggaaacgtcatgggcattgctctaggcggtctggcaatgggtgtgttggttggccccccattcggatcagtgctatatgagtttgtgggaaagacagcaccttttctggtgctcgccgccctggtgctgctggacggagcgatccaactgttcgtgctgcagccgagccgggttcaacccgaatcccagaagggcacgcccctgactactctgttgaaagacccatatatcctcatcgccgccggaagtatatgtttcgccaatatgggaatcgcgatgcttgagcctgcccttccgatctggatgatggagactatgtgctcccgaaaatggcagctcggagttgcttttctgccagcaagcatatcctatctgatcggaaccaacatcttcggtatcctcgcacataagatgggtaggtggctgtgtgccctgctcggcatgatcatagtgggagtgagtattttgtgcatcccatttgctaaaaatatttatggtcttatcgcaccgaacttcggtgtaggttttgctatcgggatggttgacagttctatgatgcccattatgggctacctggttgaccttcgtcatgtgagtgtttatgggtctgtgtatgccattgccgacgtcgctttctgcatggggtacgccattgggccttcggcagggggagcgatcgccaaggccataggttttccctggttgatgacgattatcggcattattgacatcctgtttgccccattgtgcttcttcctgagaagcccgcctgcaaaagaagagaaaatggccattctgatggaccacaattgtccaatcaagaccaagatgtatacgcagaacaatatacagtcttacccaatcggggaagatgaggaatcagaatcagattag

SEQ ID NO: 134645 - DNA, 1545 bp, Artificial Sequence
  derived and/or modified sequence
atggccttatcagaacttgctctggtgagatggctgcaagagagcaggaggtcaagaaagctcatacttttcattgtctttcttgctttactgctagacaacatgctgcttacagtagttgttcctattattccatcctatttgtatagcatcaagcatgagaaaaatgccaccgagattcagactgcgcgtcctgtgcataccgccagcatcagcgattctttccagtccattttctcttattatgacaatagtactatggtcactggcaacgccacccgcgacctgacacttcaccagactgctactcagcacatggtgacaaacgcctcagccgtgccctccgactgccccagtgaggacaaggacctgcttaacgagaatgttcaggtcggcctgctgtttgcttctaaggccaccgtccagctgatcaccaatccctttattggactcctgaccaatcgcattggatatccgattccaatcttcgcaggtttctgcatcatgttcgtttccaccatcatgtttgctttcagcagctcatatgccttcctgctgatagctcgctccctgcaagggatagggtcatcctgctcgagtgtcgcgggaatgggcatgctcgcatccgtgtacacggatgacgaggaaaggggaaacgtgatgggcattgcactgggtgggctggctatgggtgtgctggttgggccacctttcggctctgtcctctatgagttcgttggcaagacggccccttttctggtcctggcggctttggtgctgctcgacggagctattcagttatttgttctccagccatcacgagtacagcccgagagtcagaagggcacccctctgacaacattgcttaaagatccctatatcctgatcgccgctggtagcatatgcttcgcaaacatgggaatcgcgatgcttgagcctgccctaccaatttggatgatggaaacaatgtgttcaaggaagtggcagcttggagtagccttccttccggcatccatctcataccttatcgggacaaacattttcggcatattagctcacaagatggggaggtggctctgtgccctgcttggaatgatcattgtgggggtgtcaatattgtgcattcccttcgctaaaaacatctatggccttattgccccaaatttcggcgttggctttgccattgggatggtggattcctctatgatgccgatcatgggctaccttgtggacttacgccacgtgtccgtgtacggcagtgtttatgctatcgcggacgtggccttttgcatggggtatgccataggtccaagtgccggaggcgctatcgccaaggccattggttttccctggctgatgactatcatcgggattatagatattctgttcgctcccctgtgcttttttctgagatctcctcccgcaaaggaggagaagatggcaattttaatggatcataactgccccatcaagaccaagatgtatacacaaaataatatacagtcgtatcccataggagaggacgaggagtcagagagtgactag

SEQ ID NO: 134646 - DNA, 3852 bp, Artificial Sequence
  derived and/or modified sequence
gagcggcggcggcggggcgctggggcggagactgcgacccggagccgcccggactgacggagcccactgcggtgcgggcgttggcgcgggcacggaggacccgggcaggcatcgcaagcgaccccgagcggagccccggagccatggccctgagcgagctggcgctggtccgctggctgcaggagagccgccgctcgcggaagctcatcctgttcatcgtgttcctggcgctgctgctggacaacatgctgctcactgtcgtggtccccatcatcccaagttatctgtacagcattaagcatgagaagaatgctacagaaatccagacggccaggccagtgcacactgcctccatctcagacagcttccagagcatcttctcctattatgataactcgactatggtcaccgggaatgctaccagagacctgacacttcatcagaccgccacacagcacatggtgaccaacgcgtccgctgttccttccgactgtcccagtgaagacaaagacctcctgaatgaaaacgtgcaagttggtctgttgtttgcctcgaaagccaccgtccagctcatcaccaaccctttcataggactactgaccaacagaattggctatccaattcccatatttgcgggattctgcatcatgtttgtctcaacaattatgtttgccttctccagcagctatgccttcctgctgattgccaggtcgctgcagggcatcggctcgtcctgctcctctgtggctgggatgggcatgcttgccagtgtctacacagatgatgaagagagaggcaacgtcatgggaatcgccttgggaggcctggccatgggggtcttagtgggcccccccttcgggagtgtgctctatgagtttgtggggaagacggctccgttcctggtgctggccgccctggtactcttggatggagctattcagctctttgtgctccagccgtcccgggtgcagccagagagtcagaaggggacacccctaaccacgctgctgaaggacccgtacatcctcattgctgcaggctccatctgctttgcaaacatgggcatcgccatgctggagccagccctgcccatctggatgatggagaccatgtgttcccgaaagtggcagctgggcgttgccttcttgccagctagtatctcttatctcattggaaccaatatttttgggatacttgcacacaaaatggggaggtggctttgtgctcttctgggaatgataattgttggagtcagcattttatgtattccatttgcaaaaaacatttatggactcatagctccgaactttggagttggttttgcaattggaatggtggattcgtcaatgatgcctatcatgggctacctcgtagacctgcggcacgtgtccgtctatgggagtgtgtacgccattgcggatgtggcattttgtatggggtatgctataggtccttctgctggtggtgctattgcaaaggcaattggatttccatggctcatgacaattattgggataattgatattctttttgcccctctctgcttttttcttcgaagtccacctgccaaagaagaaaaaatggctattctcatggatcacaactgccctattaaaacaaaaatgtacactcagaataatatccagtcatatccgataggtgaagatgaagaatctgaaagtgactgagatgagatcctcaaaaatcatcaaagtgtttaattgtataaaacagtgtttccagtgacacaactcatccagaactgtcttagtcataccatccatccctggtgaaagagtaaaaccaaaggttattatttcctttccatggttatggtcgattgccaacagccttataaagaaaaagaagcttttctaggggtttgtataaatagtgttgaaactttattttatgtatttaattttattaaatatcatacaatatattttgatgaaataggtattgtgtaaatctataaatatttgaatccaaaccaaatataattttttaacttacattaacaaacatttgggcaaaaatcatattggtaatgagtgtttaaaattaaagcacacattatctctgagactcttccaacaaagagaaactagaatgaagtctgaaaaacagaatcaagtaagacagcatgttatatagtgacactgaatgttatttaacttgtagttactatcaatatatttatgcgttaaacagctagttctctcaagtgtagaggacaagaacttgtgtcagttatcttttgaatccataaatcttagctggcattagttttctatgtaatcacctacctagagagagttgtaaattatatgttaacatgttatctggttggcagcaaacactaaagccaataaaggaaaaacagtaaatgttccgaaagcagagaaaagcaaccaaacatattgttatgaactaaaagctttccctttaagatgcatacttgtcttactggatgaagaaaattgagggtacatgtaccttatactgtcaaggttgtttaaacatgataaggttaatcgccatctacttcaagttttagaaaaggaaacaagaagctgaaaacagctgctctgactttaatatctgactatatctttgatctgtttgcaggtcatccaagtgttttctaggaatatatttattttaggttgtctgaaactactattttttagactcctgaaagttgttcacatcaatgtgaagacaaattttaaatgaaaatgaagaatgaaattatgtcttgaatcatatattaagaagtaaaaataatagtgatcaggcagaaaagaaaaatggaacatctaaaaatgtatgtgctaactatatcatccagtgtgcagtgttgtgtatttttctaagcatgacaacattgatgtgccttttcagtgtaacagcaaatactgttagtgaacattgtcaatttatgtcattttgttaagagatatgactggagtgtgcagtgtggaatgtctctaatactacttgtgaatcctgcagttctataatcataaacaaaaattacttagtttcgttaagctaagattgtgtttgtgttaacttcgacatcaaggagcaaagaactttagaacagactcctcaatcttgtgactttcttattctctaggaaagtaacacttcgtttcatgaagcttttctgtggggcttcgattatttcaagtctggtttctaagtgcagtgtgtttgaagcaaacgaacttccaactcacttatttggcattgggcaacttggccaagtctgccactttggaagatggctctggaggaaactctcatatggctaaaaaggcaggctagtttcttacttctacaggggtagagccttaaaaaagaacgtgctacaaattggttctctttgagggtttctggttctccctgcccccaataccatatactttattgcaattttatttttgcctttacggctctgtgtctttctgcaagaaggcctggcaaaggtatgcctgctgttggtccctcgggataagataaaatataaataaaaccttcagaactgttttggagcaaaagatagcttgtacttggggaaaaaaattctaagttcttttatatgactaatattcttggttagcaagactggaaagaggtgtttttttaaaatgtacataccagaacaaagaacatacagctctctgaacatttattttttgaacagaggtggtttttatgtttggacctggtaatacagatacaaaaactttaatgaggtagcaatgaatattcaactgtttgactgctaagtgtatctgtccatattttagcaagtttacttaataaatcttctgaaccatg

SEQ ID NO: 134647 - DNA, 1545 bp, Artificial Sequence
  derived and/or modified sequence
atggccctgagcgagctggccctggtgagatggctgcaggagagcagaagaagcagaaagctgatcctgttcatcgtgttcctggccctgctgctggacaacatgctgctgaccgtggtggtgcccatcatccccagctacctgtacagcatcaagcacgagaagaacgccaccgagatccagaccgccagacccgtgcacaccgccagcatcagcgacagcttccagagcatcttcagctactacgacaacagcaccatggtgaccggcaacgccaccagagacctgaccctgcaccagaccgccacccagcacatggtgaccaacgccagcgccgtgcccagcgactgccccagcgaggacaaggacctgctgaacgagaacgtgcaggtgggcctgctgttcgccagcaaggccaccgtgcagctgatcaccaaccccttcatcggcctgctgaccaacagaatcggctaccccatccccatcttcgccggcttctgcatcatgttcgtgagcaccatcatgttcgccttcagcagcagctacgccttcctgctgatcgccagaagcctgcagggcatcggcagcagctgcagcagcgtggccggcatgggcatgctggccagcgtgtacaccgacgacgaggagagaggcaacgtgatgggcatcgccctgggcggcctggccatgggcgtgctggtgggcccccccttcggcagcgtgctgtacgagttcgtgggcaagaccgcccccttcctggtgctggccgccctggtgctgctggacggcgccatccagctgttcgtgctgcagcccagcagagtgcagcccgagagccagaagggcacccccctgaccaccctgctgaaggacccctacatcctgatcgccgccggcagcatctgcttcgccaacatgggcatcgccatgctggagcccgccctgcccatctggatgatggagaccatgtgcagcagaaagtggcagctgggcgtggccttcctgcccgccagcatcagctacctgatcggcaccaacatcttcggcatcctggcccacaagatgggcagatggctgtgcgccctgctgggcatgatcatcgtgggcgtgagcatcctgtgcatccccttcgccaagaacatctacggcctgatcgcccccaacttcggcgtgggcttcgccatcggcatggtggacagcagcatgatgcccatcatgggctacctggtggacctgagacacgtgagcgtgtacggcagcgtgtacgccatcgccgacgtggccttctgcatgggctacgccatcggccccagcgccggcggcgccatcgccaaggccatcggcttcccctggctgatgaccatcatcggcatcatcgacatcctgttcgcccccctgtgcttcttcctgagaagcccccccgccaaggaggagaagatggccatcctgatggaccacaactgccccatcaagaccaagatgtacacccagaacaacatccagagctaccccatcggcgaggacgaggagagcgagagcgactag

SEQ ID NO: 134648 - protein, 532 aa, Artificial Sequence
  derived and/or modified sequence
MESAEPAGQARAAATKLSEAVGAALQEPRRQRRLVLVIVCVALLLDNMLYMVIVPIVPDYIAHMRGGGEGPTRTPEVWEPTLPLPTPANASAYTANTSASPTAAWPAGSALRPRYPTESEDVKIGVLFASKAILQLLVNPLSGPFIDRMSYDVPLLIGLGVMFASTVLFAFAEDYATLFAARSLQGLGSAFADTSGIAMIADKYPEEPERSRALGVALAFISFGSLVAPPFGGILYEFAGKRVPFLVLAAVSLFDALLLLAVAKPFSAAARARANLPVGTPIHRLMLDPYIAVVAGALTTCNIPLAFLEPTIATWMKHTMAASEWEMGMAWLPAFVPHVLGVYLTVRLAARYPHLQWLYGALGLAVIGASSCIVPACRSFAPLVVSLCGLCFGIALVDTALLPTLAFLVDVRHVSVYGSVYAIADISYSVAYALGPIVAGHIVHSLGFEQLSLGMGLANLLYAPVLLLLRNVGLLTRSRSERDVLLDEPPQGLYDAVRLRERPVSGQDGEPRSPPGPFDACEDDYNYYYTRS

SEQ ID NO: 134649 - DNA, 1599 bp, Artificial Sequence
  derived and/or modified sequence
atggaatctgccgaacccgcggggcaagcccgtgcagctgccacaaagctgtcagaggctgttggcgccgccctgcaagaacctagaaggcagagacggttagtgctcgtgattgtttgtgtggctctcttgctcgacaacatgctttacatggtcattgtccccattgttcccgactatatcgctcacatgcgggggggcggcgagggccccacaaggactcccgaggtttgggaacctaccctacccctccctaccccagctaatgcctctgcgtataccgctaacaccagcgcatcaccgacagcagcttggcctgctggctcagcactcagaccccgctatccgacagaaagcgaggacgttaagatcggagtgcttttcgcaagcaaagccatacttcagctgctggtaaaccctttaagtggtccgttcattgatcgcatgagttacgatgtgcccctgcttatcggcctgggcgtgatgttcgccagtactgtgctcttcgccttcgccgaggactacgctacacttttcgctgctcggagcttgcagggcctgggttctgcgttcgccgatacatccgggattgccatgatagcagataagtaccccgaggagcccgaacggtccagagctcttggggtcgcactcgccttcatctcttttggcagcttagtggctcctcccttcggaggaatactgtacgagtttgccggcaagagagtccccttcctggtgctggccgcagtgtcccttttcgacgctctgctcctgctggctgtggccaaaccattctccgccgcagctcgggcacgcgccaacctgcctgtcgggactccaatccataggctgatgctcgacccctacattgccgtcgtcgccggggctctcactacttgtaacatccctctcgcgtttcttgagcctaccatcgcaacttggatgaagcatactatggcggcttcagagtgggagatgggaatggcctggctccctgcatttgtgcctcacgtgttaggtgtgtatctgaccgtgcgcctagcggccaggtacccccacttacaatggctgtacggcgcgttaggactagccgtgatcggtgcctcctcctgcattgtccctgcttgtagatcgttcgcaccactcgtggtctctctctgcggcctgtgcttcggaattgccctcgttgacactgctctgctccctactctggcctttctggtcgatgttagacacgtgtcagtctatggctcagtgtacgcaattgcggacattagctacagcgtagcttatgcgttaggaccaatagtcgctggtcatatcgtgcacagtctgggctttgaacagctatccttagggatggggctcgccaacctgctgtatgcgcccgtgctacttttgttgcgaaatgtgggattgttgacgagatcacggtcggaaagggacgtgctcctggacgagcccccacagggcctctacgacgcagtccggctgcgggagcgacccgtgtccggccaggacggcgagccacggtctcctcccggcccctttgatgcctgtgaagacgactataattactattatacccggtcctag

SEQ ID NO: 134650 - DNA, 1599 bp, Artificial Sequence
  derived and/or modified sequence
atggagagcgctgagcctgctggccaggcccgggctgctgccaccaagctgtctgaggccgtgggcgccgccctgcaggagccccggcggcagaggcggctggtgctggtgattgtgtgtgtggccctgctgctggacaacatgctgtacatggtgattgtgcccatcgtgcctgactacatcgcccacatgaggggcggcggggagggccccaccaggaccccagaggtgtgggagcccaccctgcccctgcccaccccagccaatgccagcgcctacacagccaacaccagcgccagccccacagctgcctggccagctggcagcgccctgcggccccgctaccccacagaaagtgaagatgtgaagattggagtgctgtttgccagcaaggccatcctgcagctgctggtgaaccccctgagcggccccttcatcgacaggatgtcctatgatgtgcccctgctgattggcctgggcgtgatgtttgccagcacagtgctgtttgcctttgctgaagattatgccaccctgtttgctgcccggagcctgcagggcctgggcagcgcctttgctgacaccagcggcatcgccatgattgctgacaagtacccagaggagcctgagaggagccgggccctgggcgtggccctggccttcatcagctttggcagcctggtggcccccccatttggaggcatcctgtatgaatttgctgggaagagggtgcccttcctggtgctggccgctgtgtccctgtttgatgccctgctgctgctggccgtggccaagcccttctctgctgctgcccgggcccgggccaacctgcctgtgggcacccccatccaccggctgatgctggacccctacatcgctgtggtggccggggccctgaccacctgcaacatccccctggccttcctggagcccaccatcgccacctggatgaagcacaccatggccgccagcgagtgggagatgggcatggcctggctgcctgcctttgtgccccacgtgctgggcgtgtacctgactgtgcggctggccgcccgctacccccacctgcagtggctgtatggagccctgggcctggccgtgattggagccagcagctgcatcgtgcctgcctgccgcagctttgcccccctggtggtgtccctgtgtggcctgtgcttcggcatcgccctggtggacacagccctgctgcccaccctggccttcctggtggatgtgagacatgtgtctgtgtatggctctgtgtatgccatcgctgacatctcctacagcgtggcctatgccctgggccccatcgtggccggccacatcgtgcacagcctgggctttgagcagctgagcctgggcatgggcctggccaacctgctgtatgcccctgtgctgctgctgctgagaaatgtgggcctgctgaccaggagccgctcagaaagagatgtgctgctggatgagcccccccagggcctgtatgatgctgtgcggctgcgggagaggcctgtgtctggccaggatggagagcccaggagccccccaggcccctttgatgcctgtgaagatgactacaactactactacaccaggagctag

SEQ ID NO: 134651 - DNA, 1599 bp, Artificial Sequence
  derived and/or modified sequence
atggagagcgccgagcccgccggccaggcccgggccgccgccaccaagttgtcagaagctgtgggggcagctctacaggagcctagacgccagagacgccttgttttggttatcgtttgcgtagccctattgcttgacaatatgctgtacatggtgattgtgcccatagttcccgactatattgcccacatgcgtggcggcggggaggggcccactcggacacccgaagtttgggaacccacccttccactgcccaccccagctaacgcctctgcttataccgcaaatactagcgcctcccctacagcagcttggcccgcaggatccgccctgagacctaggtaccctactgagagcgaggatgtcaagatcggcgtgttatttgctagtaaggctatattgcaactgctggtcaatcccctatcaggcccttttattgaccggatgtcctacgatgtgcccctcctgatcggtctgggtgttatgttcgcttcaacagtcctgtttgccttcgccgaagattacgccaccctgtttgcagcccggtctctgcagggactgggttccgcattcgcggatacctccggcatcgctatgatagcagacaagtacccagaggaaccagagcggtcgcgggccctcggggttgcactggcatttatttccttcggcagcctggtggctcctcccttcggaggaattctttatgagtttgcaggcaagagagtaccattcttggtgctagcagccgttagcctgttcgacgctctactgctccttgccgtcgctaagccgttttccgccgcagcccgcgcacgggccaacctacccgtgggcacgccgatccacaggcttatgttggatccctatatcgcagttgtggctggggccttaaccacctgcaacattcctctggccttcctcgaacctaccattgccacatggatgaaacacacaatggctgcttcagagtgggaaatgggaatggcttggctgccagcgtttgtaccacatgtcctcggcgtgtacctgaccgttcgccttgcagcacgttatccacatctgcagtggctctacggagccctcggcctagccgttatcggagcttcatcatgtatcgtcccggcctgtcggtctttcgcccccctggttgtttcgctttgcggtctgtgttttggcatagcattggtcgataccgccctgctgccaaccctggcttttcttgtcgacgtccgacacgtcagtgtctacggatctgtgtacgccatcgcagacatatcctacagcgtggcttatgcgttggggccaattgtggctggccacatcgtccacagcctgggtttcgagcaactgagtcttggtatgggactggcaaacttactttacgcgcctgtgctcctcttgctcaggaatgtcggacttctcactcgttccagatctgaacgcgacgtgctcttggacgagccaccccagggcttatacgacgccgtgaggctgagagaaaggcctgtctccggtcaagatggagagccccgttcaccccctggacctttcgacgcatgtgaggacgactacaactactactacacccgttcgtag

SEQ ID NO: 134652 - DNA, 1599 bp, Artificial Sequence
  derived and/or modified sequence
atggaatccgctgagcctgccggacaggcccgagccgcagccactaagctcagcgaagctgtcggagccgcattgcaagagcctcgcaggcaaagacggctcgtcctggtcatcgtgtgcgtggccctcctactcgataacatgctgtacatggtgatcgtgcctattgtgccagattacatcgcacacatgcggggtggcggtgagggacccacacggactcccgaggtatgggagccaaccttgcccctgcctactccggcaaacgccagtgcctatactgctaatacctccgcaagccccaccgccgcatggcccgcaggctctgccctgcgcccacgataccccacagagagcgaggacgtaaaaatcggggttttgtttgcctctaaggctattctgcagctgttagttaatcccctaagtggaccgttcattgacaggatgtcctatgatgtgccgctgttgatcggacttggagttatgttcgccagcaccgtgttgtttgcattcgcggaggattacgcgacactgttcgctgccagaagcctgcagggcctaggaagcgctttcgcggacaccagtgggatcgcgatgatcgcagataagtatcccgaagaacccgaacgttcgagagctctgggcgtggccctcgcctttatatctttcgggagcctggtggcgccaccttttggagggattctctacgagttcgccggaaaaagagttccattcctggtcctggctgccgtgtcacttttcgatgccctcctgctcttagccgtggccaaaccattttctgccgcagcaagggctcgcgcaaatctcccagtgggaaccccaattcacaggctgatgctggatccatacatcgcagtggtggccggtgccttaactacgtgcaatatccctcttgcctttctggagcctaccatagccacctggatgaaacacaccatggccgcatccgaatgggaaatggggatggcctggctaccggcattcgtgcctcacgtgctcggtgtctatctgacagttcgcttggctgccaggtatcctcatctgcaatggctttacggagcattaggcctggctgtgatcggagccagttcctgtatagtgcccgcatgccgcagctttgcccctttggtggtgtcactatgcggcctctgcttcggaatcgccttggtggatacagctcttctgccaactctggcgtttctggtcgacgttcgtcacgtatccgtgtacggctcggtgtacgccatcgccgatatcagctattcggtggcttatgcccttggcccaattgtcgcaggccacattgttcatagtctcggctttgagcaactgtctctagggatggggctggctaacctgctgtacgcaccagtgctgctgttactgcgtaacgttggcctcctgactcgatcacggtctgaaagagacgtcctacttgatgaacccccacaaggactgtatgatgccgttagactcagagagcgccctgtttccgggcaggatggcgaacccaggtctccccctgggcctttcgacgcttgtgaagatgattacaactactactatacaagatcttag

SEQ ID NO: 134653 - DNA, 2419 bp, Artificial Sequence
  derived and/or modified sequence
ggaggaggcaagagccgacgcgaggggaggggagcgcagcggcggggctaacgggcgggcaagcgggcgggcggcaacagcatgtccctcggccagcgcgggcggcctcttagcgcggcgggggctgctctgggcgcgccccgggcgaagtgcgcccagtctccggccccggcccctcggcgcgcccgacttcccggccgcccctgagcccagcagccgcgggtcccgggatcggctaagagtagctgcaacgcctcgccggacggagtcctttcctttcccgggacgctgggccatgagctccgcggccacctgaggcacaggggagtctgctcggccaggacagcctccccgaagtcccgtgccctcgcctctgcactgcgggacgccagcgctcggccctggcggaggcgtcctcggaagagcatcggggtgggggcatggaatccgcggaacctgcgggccaggcccgggcggcggccaccaagctgtcggaggctgtgggcgcggcgctgcaggagccccggcggcagaggcgcctggtgcttgttatcgtgtgcgtggcgctgttactggacaacatgctgtacatggtcatcgtgcccatagtgcccgactacatcgcccacatgcgcgggggcggcgagggccccacccggactcccgaggtgtgggagcccaccctgccgctgcccactccggccaatgccagcgcctacacggccaacacctcggcgtccccgacagctgcgtggccagcgggctcagcccttcggccccgctaccctacggagagcgaagacgtgaagatcggggtgctgtttgcttccaaggctatcctgcagctgctagtgaaccccttgagcgggcccttcatcgaccgcatgagctacgacgtgccgctgctgatcggcctgggcgtcatgttcgcctctacagtcctgttcgccttcgccgaggactacgccacgctgttcgcggcgcgcagcctgcagggcctgggctcagccttcgccgacacgtctggcatagccatgatcgccgataagtacccggaggagccggagcgcagtcgtgcactgggcgtggcgctggccttcattagcttcggaagcctagtggccccgcccttcgggggcatcctctatgagttcgccggcaagcgcgtgcccttcttggtgctagctgccgtgtcgctctttgacgcgctgttgctgctggcagtggccaaacccttctcggcggctgcacgggctcgggccaacctgccagtgggcactcccatccaccgcctcatgctagacccctacattgccgtggtggccggcgcgctcaccacctgtaacattcccctcgccttcctcgaacccaccattgccacgtggatgaagcatacgatggcggcttccgagtgggagatgggcatggcctggctgccggccttcgtgcctcatgtgctgggcgtctacctcaccgtgcgcctggcggcgcgctacccacacctgcagtggctgtacggcgcgcttgggctggctgtgatcggcgccagctcgtgcatcgtgcccgcctgccgctccttcgcgccgctagtggtctcactatgcggcctctgttttggcatagccctagtcgacacagcactgctgcccacgctcgccttcctggtggacgtgcgccatgtctcagtctatggcagcgtctacgccatcgccgacatctcctattcggtggcctacgcgctcgggcccatagtggcaggccacattgtgcactcgctgggctttgagcagctcagccttggcatgggactggccaacctgctctatgctcccgtcttgctgctgctccgcaacgtgggcctcctgacgcgctcccgttccgagcgcgatgtgctgcttgatgagccaccgcaaggtctgtacgatgcggtgcgcctgcgtgagcgtcctgtgtctggccaggacggcgagcctcgcagcccgcctggcccttttgatgcgtgcgaggacgactacaactactactacacccgcagctagcatccccactcctcctccagcccacccaaccgccttgggtcaagggggctgctctgcaagcccactggccagctctggctcagggcccacctcctccagcgagtaccccagccactcctcaaccttgacttctgcccaaatcccctccctgtgacccgttccatatccctttctctcttgtccaatggggcttggagcaccgaggccagcgaagccatcgcgctccttgcggaggtgaagaggaccctgagtccccacctgcggctcccctgtgtagagcctgcatctgtctgtccttccttccattgctcccagtgccaaacttgggccgctgcaccgcggcgcctccgcccaaatcaataaactgtgtctgtcccagg

SEQ ID NO: 134654 - DNA, 1599 bp, Artificial Sequence
  derived and/or modified sequence
atggagagcgccgagcccgccggccaggccagagccgccgccaccaagctgagcgaggccgtgggcgccgccctgcaggagcccagaagacagagaagactggtgctggtgatcgtgtgcgtggccctgctgctggacaacatgctgtacatggtgatcgtgcccatcgtgcccgactacatcgcccacatgagaggcggcggcgagggccccaccagaacccccgaggtgtgggagcccaccctgcccctgcccacccccgccaacgccagcgcctacaccgccaacaccagcgccagccccaccgccgcctggcccgccggcagcgccctgagacccagataccccaccgagagcgaggacgtgaagatcggcgtgctgttcgccagcaaggccatcctgcagctgctggtgaaccccctgagcggccccttcatcgacagaatgagctacgacgtgcccctgctgatcggcctgggcgtgatgttcgccagcaccgtgctgttcgccttcgccgaggactacgccaccctgttcgccgccagaagcctgcagggcctgggcagcgccttcgccgacaccagcggcatcgccatgatcgccgacaagtaccccgaggagcccgagagaagcagagccctgggcgtggccctggccttcatcagcttcggcagcctggtggccccccccttcggcggcatcctgtacgagttcgccggcaagagagtgcccttcctggtgctggccgccgtgagcctgttcgacgccctgctgctgctggccgtggccaagcccttcagcgccgccgccagagccagagccaacctgcccgtgggcacccccatccacagactgatgctggacccctacatcgccgtggtggccggcgccctgaccacctgcaacatccccctggccttcctggagcccaccatcgccacctggatgaagcacaccatggccgccagcgagtgggagatgggcatggcctggctgcccgccttcgtgccccacgtgctgggcgtgtacctgaccgtgagactggccgccagatacccccacctgcagtggctgtacggcgccctgggcctggccgtgatcggcgccagcagctgcatcgtgcccgcctgcagaagcttcgcccccctggtggtgagcctgtgcggcctgtgcttcggcatcgccctggtggacaccgccctgctgcccaccctggccttcctggtggacgtgagacacgtgagcgtgtacggcagcgtgtacgccatcgccgacatcagctacagcgtggcctacgccctgggccccatcgtggccggccacatcgtgcacagcctgggcttcgagcagctgagcctgggcatgggcctggccaacctgctgtacgcccccgtgctgctgctgctgagaaacgtgggcctgctgaccagaagcagaagcgagagagacgtgctgctggacgagcccccccagggcctgtacgacgccgtgagactgagagagagacccgtgagcggccaggacggcgagcccagaagcccccccggccccttcgacgcctgcgaggacgactacaactactactacaccagaagctag

SEQ ID NO: 134655 - protein, 554 aa, Artificial Sequence
  derived and/or modified sequence
MPTVDDILEQVGESGWFQKQAFLILCLLSAAFAPICVGIVFLGFTPDHHCQSPGVAELSQRCGWSPAEELNYTVPGLGPAGEAFLGQCRRYEVDWNQSALSCVDPLASLATNRSHLPLGPCQDGWVYDTPGSSIVTEFNLVCADSWKLDLFQSCLNAGFLFGSLGVGYFADRFGRKLCLLGTVLVNAVSGVLMAFSPNYMSMLLFRLLQGLVSKGNWMAGYTLITEFVGSGSRRTVAIMYQMAFTVGLVALTGLAYALPHWRWLQLAVSLPTFLFLLYYWCVPESPRWLLSQKRNTEAIKIMDHIAQKNGKLPPADLKMLSLEEDVTEKLSPSFADLFRTPRLRKRTFILMYLWFTDSVLYQGLILHMGATSGNLYLDFLYSALVEIPGAFIALITIDRVGRIYPMAMSNLLAGAACLVMIFISPDLHWLNIIIMCVGRMGITIAIQMICLVNAELYPTFVRNLGVMVCSSLCDIGGIITPFIVFRLREVWQALPLILFAVLGLLAAGVTLLLPETKGVALPETMKDAENLGRKAKPKENTIYLKVQTSEPSGT

SEQ ID NO: 134656 - DNA, 1665 bp, Artificial Sequence
  derived and/or modified sequence
atgcctacagtggatgatattcttgagcaggttggggaatcaggctggtttcagaagcaagcgttcctgatcctatgccttcttagtgcagccttcgcccccatctgtgtgggcattgtgttcttaggatttacacccgatcatcactgccaaagtcctggcgtggcggagttaagccagagatgcggttggtctcctgccgaggagctgaactacactgtgccagggcttggacctgccggtgaagccttcttaggccagtgtcggcgatacgaagtggactggaatcaatccgccctctcgtgtgtagaccctctcgcctccttggctaccaaccgctcacatcttcccctagggccttgccaagatggctgggtgtacgataccccagggtcgtccatagtgactgagtttaacctggtatgcgctgattcctggaagctcgatctcttccaatcctgcctaaatgccggttttttgttcggcagtctgggtgtgggatacttcgcagatagattcggacgcaagctgtgcctgctggggaccgtcctggtgaacgcagtctctggtgttcttatggcctttagtccgaactatatgagcatgctcctattccgcctgcttcagggccttgtgtccaaggggaattggatggccggctacactctcatcactgagttcgtgggctctgggagtagacggactgtcgcgatcatgtaccagatggccttcacagtcggtttagtcgctttgactggtttggcctatgcactgccccattggcggtggctgcaactcgcagtttctttacccacttttctctttctgctgtactattggtgcgtgcccgagagcccacgctggctgctgtcccagaagaggaacactgaggctataaagattatggaccacattgctcagaagaatggaaagctaccaccggccgacctgaagatgttatcgttagaggaggatgtcacagaaaaactgtcaccctcctttgcggatctgttccgcacccctcggctgcgcaagagaacttttattttaatgtatctgtggttcactgacagcgtcctgtatcagggcctgattttacatatgggggccacgagcggcaatctgtacctagacttcctgtattctgcccttgttgagatcccaggcgcattcatcgccctcattactattgatcgggtcggacggatataccccatggccatgtccaatctcttagccggcgccgcctgtttagtgatgatattcatctcccccgatctgcactggctgaacattatcatcatgtgcgttggacggatgggtatcaccattgccatccaaatgatctgccttgttaatgccgaattataccccacgttcgtgagaaatttgggtgtaatggtgtgttcatccttatgcgatataggtggcatcattaccccattcatcgtgtttagattacgggaggtgtggcaggccctgccgctgatcctgtttgccgtgcttggtctactcgccgctggggtcaccctgcttttacccgaaacaaagggggttgcactccctgagacaatgaaggatgctgagaatttaggccgcaaagcaaaaccaaaagagaacaccatttatctgaaggtacaaaccagtgagccatctgggacctag

SEQ ID NO: 134657 - DNA, 1665 bp, Artificial Sequence
  derived and/or modified sequence
atgcccaccgtggatgacatcctggagcaggtgggggagagcggctggttccagaagcaggccttcctgatcctgtgcctgctgtctgctgcctttgcccccatctgtgtgggcatcgtgttcctgggcttcaccccagaccaccactgccagagccctggggtggccgagctgagccagagatgtggctggagccctgctgaggagctgaactacacagtgcccggcctgggccctgctggggaggccttcctgggccagtgcagaagatatgaggtggactggaaccagagcgccctgagctgtgtggaccccctggccagcctggccaccaacagaagccacctgcccctgggcccctgccaggacggctgggtgtatgacaccccaggcagcagcatcgtgacagagttcaacctggtgtgtgccgacagctggaagctggacctcttccagagctgcctgaatgccggcttcctgtttggcagcctgggcgtgggctactttgctgacagatttggaaggaagctgtgcctgctgggcaccgtgctggtgaatgctgtgtctggagtgctgatggccttcagccccaactacatgtccatgctgctcttccggctgctgcagggcctggtgtccaagggcaactggatggccggctacaccctcatcacagaatttgtgggcagcggcagcagaagaacagtggccatcatgtaccagatggccttcaccgtgggcctggtggccctgaccggcctggcctatgccctgccccactggcgctggctgcagctggccgtgtccctgcccaccttcctgttcctgctgtactactggtgtgtgcctgagagcccccgctggctgctgagccagaagaggaacacagaggccatcaagatcatggaccacatcgcccagaagaatggcaagctgcccccagctgacctgaagatgctgagcctggaggaggatgtgacagagaagctgagccccagctttgctgacctcttccgcaccccccggctgaggaagaggaccttcatcctgatgtacctgtggttcacagacagcgtgctgtaccagggcctcatcctgcacatgggcgccaccagcggcaacctgtacctggacttcctgtacagcgccctggtggagatccctggggccttcatcgccctgatcaccatcgacagagtgggccgcatctaccccatggccatgagcaacctgctggccggggccgcctgcctggtgatgatcttcatcagcccagacctgcactggctgaacatcatcatcatgtgtgtgggccgcatgggcatcaccatcgccatccagatgatctgcctggtgaatgctgagctgtaccccacctttgtgaggaacctgggcgtgatggtgtgcagcagcctgtgtgacattggaggcatcatcacccccttcatcgtgttccggctgcgggaggtgtggcaggccctgcccctcatcctgtttgctgtgctgggcctgctggccgccggcgtgaccctgctgctgcctgagaccaagggcgtggccctgcctgagaccatgaaggatgctgagaacctgggcaggaaggccaagcccaaggagaacaccatctacctgaaggtgcagaccagcgagcccagcggcacctag

SEQ ID NO: 134658 - DNA, 1665 bp, Artificial Sequence
  derived and/or modified sequence
atgcccaccgtggacgacatcctggagcaggtgggcgagagcggctggttccagaagcaggcttttctgattctgtgtctactttctgcagcatttgcccctatctgcgtgggaatagttttcctcgggtttacccccgatcaccattgtcagtcacccggggtagcggagctgtctcaacgctgtgggtggagccccgctgaggagctgaactatacagtccccggcttgggacctgccggtgaagcctttcttggccaatgccgaaggtatgaggtggactggaaccagtctgccctgagctgtgttgatcccctagcatccctggctactaaccgtagtcacctgccactcggtccatgccaggatggttgggtctacgacacccctggcagctctattgttaccgagtttaatctggtgtgtgccgattcttggaagctggatcttttccagagctgcctgaacgcaggattcctattcggttccctgggcgtgggatatttcgccgaccggtttggccgcaaactgtgtctgcttggcactgttctggtgaatgccgtcagtggcgttctgatggcttttagtccaaattacatgtccatgttactatttagactccttcagggactggtatcaaaaggtaactggatggcaggatacactctgattaccgaatttgtcggatctgggtcaaggcggacggtcgccatcatgtatcagatggccttcactgtgggattggtcgcactgaccggactcgcttatgcactaccccattggcgctggctgcagttagcagtgagccttcctacctttctgttcttgctgtattactggtgtgttccagagagcccgaggtggcttctgagccagaagagaaatacagaggctatcaaaataatggaccatatcgcacagaagaacgggaagctgcctcccgcggatcttaagatgcttagtctcgaggaagatgttacggaaaaattgtcacctagctttgccgacctattccgaacgccccgcttacggaaacggacctttattctgatgtatctatggtttaccgacagtgtgctgtatcaaggtctcattctgcacatgggcgcaaccagtggaaatctctacctcgatttcctgtattcagccctggtcgaaatacctggggcattcattgctttgatcaccatcgaccgcgttggacgcatctaccctatggcaatgagcaatctgctggcaggcgctgcatgcctggtgatgatatttatctccccagatcttcattggctgaacatcatcatcatgtgcgtgggaagaatgggaatcacaattgctattcagatgatttgcctggtgaatgccgagctgtatcccacgtttgtgagaaaccttggggtgatggtttgttcctcactgtgcgacatcggcggcattatcactcccttcattgtcttcaggctacgggaggtgtggcaggcactccctttgattctctttgccgtcttaggattgctggccgccggcgtaacactgttgctacccgagacgaagggagtagccctgcccgagacaatgaaagatgccgaaaacctggggcgcaaagcaaagcctaaggagaacactatttacctcaaagtgcagactagcgaaccttcagggacatag

SEQ ID NO: 134659 - DNA, 1665 bp, Artificial Sequence
  derived and/or modified sequence
atgccaaccgttgacgacattctggagcaggtaggcgaatccggctggtttcagaagcaggccttcctcatactatgcctcttatctgccgctttcgctccaatttgcgtcggtatcgttttcctcggatttactccagatcatcattgccagtccccaggcgtcgcggaactgtcccagagatgcggatggtctcccgcagaagaacttaactacactgtacctggcctcggacctgccggtgaggcattcttaggtcagtgccgtagatatgaggtagattggaatcagtcagccttatcctgtgtggatccgctcgccagcttggccactaacagaagtcatctccctctgggtccctgtcaggacggttgggtgtatgataccccaggatcatccatcgtgactgagtttaacctagtttgtgctgattcctggaaattagatctgttccaaagctgcctgaacgccggttttctatttgggagcctgggcgttggttatttcgccgatcgttttggccgaaagttgtgcctgcttgggacagtgttggtcaacgccgtatctggcgtgttaatggctttttcacccaattacatgagcatgttgctatttcgcctgctgcagggactagtatccaagggcaactggatggccggatatactcttatcacggaatttgtgggttctggcagccgtaggaccgtggccattatgtaccaaatggcttttactgttggcctggttgctctgacagggcttgcttacgcgctaccgcactggaggtggctccagctggccgttagcctacctacctttctgtttctgctctattactggtgcgtccctgagtcccctcggtggctgctctcccagaagaggaacacggaggcaatcaaaataatggaccacattgcccaaaagaacggcaagctcccaccggctgatctgaagatgctgagcctagaggaagacgtcactgagaagctgtccccctcttttgccgacttgtttcgcactccccgactgaggaaaaggacgttcatcctgatgtatttatggttcactgactctgtgttgtatcagggtttgatactccatatgggggctacctccggaaacctatatctggattttctttactcagccctcgtggaaatcccaggggcttttatcgcgttaatcactatagaccgcgttggtaggatctaccccatggccatgagcaatctgctcgctggggctgcatgtctggttatgatcttcatatcaccggacctgcattggctgaatattatcatcatgtgcgtgggcagaatgggtatcactatcgctatccaaatgatctgcttagtgaacgcagagttgtatcccaccttcgtgcgtaatctcggagtgatggtgtgctcctcattgtgtgacatcggagggattataactcccttcatagtattcagattgagggaagtgtggcaggcgctcccacttatattgtttgccgtgctgggcctcctggccgcaggtgtaactctattgctgccagagacaaagggggtagcactgcctgagacgatgaaagacgctgagaacctggggcgtaaagctaaacccaaggagaacacaatttacctgaaagtacagacaagcgagccgtccggtacatag

SEQ ID NO: 134660 - DNA, 1948 bp, Artificial Sequence
  derived and/or modified sequence
ctacttggttgccttccagatgtttcacacttggacagcaaactgatttcaaaccactccttttcaaagatctctgagggagacattgcacctggccactgcagcccagagcaggtctggccacggccatgagcatgctgagccatcatgcccaccgtggatgacattctggagcaggttggggagtctggctggttccagaagcaagccttcctcatcttatgcctgctgtcggctgcctttgcgcccatctgtgtgggcatcgtcttcctgggtttcacacctgaccaccactgccagagtcctggggtggctgagctgagccagcgctgtggctggagccctgcggaggagctgaactatacagtgccaggcctggggcccgcgggcgaggccttccttggccagtgcaggcgctatgaagtggactggaaccagagcgccctcagctgtgtagaccccctggctagcctggccaccaacaggagccacctgccgctgggtccctgccaggatggctgggtgtatgacacgcccggctcttccatcgtcactgagttcaacctggtgtgtgctgactcctggaagctggacctctttcagtcctgtttgaatgcgggcttcttgtttggctctctcggtgttggctactttgcagacaggtttggccgtaagctgtgtctcctgggaactgtgctggtcaacgcggtgtcgggcgtgctcatggccttctcgcccaactacatgtccatgctgctcttccgcctgctgcagggcctggtcagcaagggcaactggatggctggctacaccctaatcacagaatttgttggctcgggctccagaagaacggtggcgatcatgtaccagatggccttcacggtggggctggtggcgcttaccgggctggcctacgccctgcctcactggcgctggctgcagctggcagtctccctgcccaccttcctcttcctgctctactactggtgtgtgccggagtcccctcggtggctgttatcacaaaaaagaaacactgaagcaataaagataatggaccacatcgctcaaaagaatgggaagttgcctcctgctgatttaaagatgctttccctcgaagaggatgtcaccgaaaagctgagcccttcatttgcagacctgttccgcacgccgcgcctgaggaagcgcaccttcatcctgatgtacctgtggttcacggactctgtgctctatcaggggctcatcctgcacatgggcgccaccagcgggaacctctacctggatttcctttactccgctctggtcgaaatcccgggggccttcatagccctcatcaccattgaccgcgtgggccgcatctaccccatggccatgtcaaatttgttggcgggggcagcctgcctcgtcatgatttttatctcacctgacctgcactggttaaacatcataatcatgtgtgttggccgaatgggaatcaccattgcaatacaaatgatctgcctggtgaatgctgagctgtaccccacattcgtcaggaacctcggagtgatggtgtgttcctccctgtgtgacataggtgggataatcacccccttcatagtcttcaggctgagggaggtctggcaagccttgcccctcattttgtttgcggtgttgggcctgcttgccgcgggagtgacgctacttcttccagagaccaagggggtcgctttgccagagaccatgaaggacgccgagaaccttgggagaaaagcaaagcccaaagaaaacacgatttaccttaaggtccaaacctcagaaccctcgggcacctgagagagatgttttgcggcgatgtcgtgttggagggatgaagatggagttatcctctgcagaaattcctagacgccttcacttctctgtattcttcctcatacttgcctacccccaaattaatatcagtcctaaagaa

SEQ ID NO: 134661 - DNA, 1665 bp, Artificial Sequence
  derived and/or modified sequence
atgcccaccgtggacgacatcctggagcaggtgggcgagagcggctggttccagaagcaggccttcctgatcctgtgcctgctgagcgccgccttcgcccccatctgcgtgggcatcgtgttcctgggcttcacccccgaccaccactgccagagccccggcgtggccgagctgagccagagatgcggctggagccccgccgaggagctgaactacaccgtgcccggcctgggccccgccggcgaggccttcctgggccagtgcagaagatacgaggtggactggaaccagagcgccctgagctgcgtggaccccctggccagcctggccaccaacagaagccacctgcccctgggcccctgccaggacggctgggtgtacgacacccccggcagcagcatcgtgaccgagttcaacctggtgtgcgccgacagctggaagctggacctgttccagagctgcctgaacgccggcttcctgttcggcagcctgggcgtgggctacttcgccgacagattcggcagaaagctgtgcctgctgggcaccgtgctggtgaacgccgtgagcggcgtgctgatggccttcagccccaactacatgagcatgctgctgttcagactgctgcagggcctggtgagcaagggcaactggatggccggctacaccctgatcaccgagttcgtgggcagcggcagcagaagaaccgtggccatcatgtaccagatggccttcaccgtgggcctggtggccctgaccggcctggcctacgccctgccccactggagatggctgcagctggccgtgagcctgcccaccttcctgttcctgctgtactactggtgcgtgcccgagagccccagatggctgctgagccagaagagaaacaccgaggccatcaagatcatggaccacatcgcccagaagaacggcaagctgccccccgccgacctgaagatgctgagcctggaggaggacgtgaccgagaagctgagccccagcttcgccgacctgttcagaacccccagactgagaaagagaaccttcatcctgatgtacctgtggttcaccgacagcgtgctgtaccagggcctgatcctgcacatgggcgccaccagcggcaacctgtacctggacttcctgtacagcgccctggtggagatccccggcgccttcatcgccctgatcaccatcgacagagtgggcagaatctaccccatggccatgagcaacctgctggccggcgccgcctgcctggtgatgatcttcatcagccccgacctgcactggctgaacatcatcatcatgtgcgtgggcagaatgggcatcaccatcgccatccagatgatctgcctggtgaacgccgagctgtaccccaccttcgtgagaaacctgggcgtgatggtgtgcagcagcctgtgcgacatcggcggcatcatcacccccttcatcgtgttcagactgagagaggtgtggcaggccctgcccctgatcctgttcgccgtgctgggcctgctggccgccggcgtgaccctgctgctgcccgagaccaagggcgtggccctgcccgagaccatgaaggacgccgagaacctgggcagaaaggccaagcccaaggagaacaccatctacctgaaggtgcagaccagcgagcccagcggcacctag

SEQ ID NO: 134662 - protein, 334 aa, Artificial Sequence
  derived and/or modified sequence
MFFLLALLSATFAPIYVGIVFLGFTPDHRCRSPGVAELSLRCGWSPAEELNYTVPGPGPAGEASPRQCRRYEVDWNQSTFDCVDPLASLDTNRSRLPLGPCRDGWVYETPGSSIVTEFNLVCANSWMLDLFQSSVNVGFFIGSMSIGYIADRFGRKLCLLTTVLINAAAGVLMAISPTYTWMLIFRLIQGLVSKAGWLIGYILITEFVGRRYRRTVGIFYQVAYTVGLLVLAGVAYALPHWRWLQFTVSLPNFFFLLYYWCIPESPRWLISQNKNAEAMRIIKHIAKKNGKSLPASLQRLRLEEETGKKLNPSFLDLVRTPQIRKHTMILMYNW

SEQ ID NO: 134663 - protein, 555 aa, Artificial Sequence
  derived and/or modified sequence
MPTTVDDVLEHGGEFHFFQKQMFFLLALLSATFAPIYVGIVFLGFTPDHRCRSPGVAELSLRCGWSPAEELNYTVPGPGPAGEASPRQCRRYEVDWNQSTFDCVDPLASLDTNRSRLPLGPCRDGWVYETPGSSIVTEFNLVCANSWMLDLFQSSVNVGFFIGSMSIGYIADRFGRKLCLLTTVLINAAAGVLMAISPTYTWMLIFRLIQGLVSKAGWLIGYILITEFVGRRYRRTVGIFYQVAYTVGLLVLAGVAYALPHWRWLQFTVSLPNFFFLLYYWCIPESPRWLISQNKNAEAMRIIKHIAKKNGKSLPASLQRLRLEEETGKKLNPSFLDLVRTPQIRKHTMILMYNWFTSSVLYQGLIMHMGLAGDNIYLDFFYSALVEFPAAFMIILTIDRIGRRYPWAASNMVAGAACLASVFIPGDLQWLKIIISCLGRMGITMAYEIVCLVNAELYPTFIRNLGVHICSSMCDIGGIITPFLVYRLTNIWLELPLMVFGVLGLVAGGLVLLLPETKGKALPETIEEAENMQRPRKNKEKMIYLQVQKLDIPLN

SEQ ID NO: 134664 - DNA, 1005 bp, Artificial Sequence
  derived and/or modified sequence
atgttctttttgctggcactgctgagcgcaacctttgcccccatctatgtgggtattgtatttctgggatttactcctgaccatcgctgccggtccccgggagttgctgagctttcactgcgatgtggttggagtcccgctgaagaactcaattataccgtgcccggacccggccccgccggtgaggcatcacctcgccagtgtagacggtacgaagtggactggaaccagtctacattcgattgcgtggacccgctggcttctttggataccaacaggagcagacttcccctcggaccctgtcgagatggctgggtgtatgaaacacccggcagctccatcgttacggagtttaatctagtttgcgcgaactcgtggatgcttgatttattccagagcagcgtgaatgtgggcttctttatcgggtcgatgtcaatcgggtacattgccgacaggttcggacgtaaactgtgcctgctgactactgtgctgatcaacgccgccgctggtgtattgatggctatttcacccacatatacatggatgctgatcttccgtctcattcagggacttgtctcgaaagctggctggttgatcggttatatcctgattacagagttcgtaggaagacggtaccgccggaccgtagggatcttctaccaggtggcgtacacagtcggcttattggtactcgctggggtggcttatgcacttccacactggcgctggttgcaattcaccgttagtttacctaacttcttcttcttgctgtattattggtgtatccctgagagtccacgctggctgatcagccagaataagaacgctgaggctatgcgcattattaagcatatcgccaagaagaatgggaaatctctgccagcaagtctgcagagattaagactcgaagaagaaacaggcaagaagctgaatccaagcttcctagatcttgtacggactccccaaattcggaaacacacgatgatcttaatgtacaattggtag

SEQ ID NO: 134665 - DNA, 1668 bp, Artificial Sequence
  derived and/or modified sequence
atgccaactacagtagatgatgttctcgaacacggcggcgaattccacttctttcagaagcaaatgttcttcttgctggctctcctctctgcaacatttgcccccatctatgtggggatcgtgtttttgggattcacgccagatcacagatgtcggagccccggtgtcgccgaattgtccttgcgctgcgggtggtcccctgccgaggagttaaactacaccgtccctggccctggccccgccggggaggcttctccacggcagtgcaggcgctacgaggtagattggaaccagtcaacattcgactgtgtggatccccttgcttcactggataccaaccgcagcagactgcctcttggaccctgtcgagatggatgggtctacgagacacctgggtccagtattgttacagaattcaatctagtgtgcgctaatagttggatgttggacctcttccaaagtagtgtcaatgtggggttttttatcggaagtatgagtatcggttatatcgctgatcgatttggacggaaactctgcttattgaccacagtgctcataaatgcagccgctggagtactcatggcaatcagccccacttacacatggatgctgattttcaggttgatacagggcttagtcagtaaggccgggtggctgatcggctacattctgattacagagtttgtaggccgtaggtaccggcgcacagtaggaatattctatcaggttgcctacacagtgggcttgttggttctggctggcgtcgcctacgcgcttccccattggcgctggctccagttcactgtgagtctcccaaattttttctttctgctctattactggtgcattcctgagtccccccggtggttaatctctcagaacaaaaatgctgaggccatgcgcattattaaacatatcgcaaagaagaatggaaagtctctgccggccagcttgcagcggttgcgcctggaggaggagacaggtaaaaagctgaaccccagcttcctcgacctggtacggacccctcagatccggaagcacacaatgatcctaatgtataattggtttacaagttccgtgctgtaccaggggctgataatgcacatgggcttggcaggggacaatatctacttggactttttttatagcgctctcgtggaatttccggcagcattcatgatcattctaaccatcgaccggataggacggcggtacccctgggctgcgtccaacatggtggcaggagccgcctgcctcgcctcagtgttcattccgggcgatcttcaatggctcaagattatcatctcatgtctcggccgtatgggaattaccatggcctacgagattgtgtgtctcgttaatgcggagctgtatccaacatttatccggaatttgggggtacacatctgcagtagtatgtgtgacattgggggcatcataacgccgttcctggtataccggctgaccaatatctggctagagcttccactcatggtctttggggtcctcggccttgtcgctggtggtttggtcctgctcctgcccgagacgaaaggaaaggcactcccagagacaatcgaggaagccgaaaacatgcagagaccaaggaaaaataaggaaaagatgatctatttacaggttcagaagctcgacattcctcttaactag

SEQ ID NO: 134666 - DNA, 1005 bp, Artificial Sequence
  derived and/or modified sequence
atgttcttcctgctggccctgctgagcgccacctttgcccccatctacgtgggcatcgtgttcctgggcttcaccccagaccaccgctgccgcagccctggggtggccgagctgagcctgcgctgtggctggagccctgctgaggagctgaactacacagtgcccggccctggccctgctggggaggccagcccccggcagtgcagaagatatgaggtggactggaaccagagcacctttgactgtgtggaccccctggccagcctggacaccaacagaagccggctgcccctgggcccctgcagagatggctgggtgtatgagaccccaggcagcagcatcgtgacagagttcaacctggtgtgtgccaacagctggatgctggacctcttccagagctctgtgaatgtgggcttcttcatcggctccatgagcatcggctacatcgctgacagatttggaaggaagctgtgcctgctgaccaccgtgctgatcaatgctgctgctggggtgctgatggccatcagccccacctacacctggatgctgatcttccgcctcatccagggcctggtgtccaaggccggctggctgattggctacatcctgatcacagaatttgtgggccgccgctacagaagaacagtgggcatcttctaccaggtggcctacacagtgggcctgctggtgctggccggcgtggcctatgccctgccccactggcgctggctgcagttcaccgtgtccctgcccaacttcttcttcctgctgtactactggtgcatccctgagagcccccgctggctgatcagccagaacaagaatgctgaggccatgaggatcatcaagcacatcgccaagaagaatggcaagagcctgcctgccagcctgcagaggctgcggctggaggaggagaccgggaagaagctgaaccccagcttcctggacctggtgaggaccccccagatcaggaagcacaccatgatcctgatgtacaactggtag

SEQ ID NO: 134667 - DNA, 1668 bp, Artificial Sequence
  derived and/or modified sequence
atgcccaccaccgtggatgatgtgctggagcacggcggggagttccacttcttccagaagcagatgttcttcctgctggccctgctgagcgccacctttgcccccatctacgtgggcatcgtgttcctgggcttcaccccagaccaccgctgccgcagccctggggtggccgagctgagcctgcgctgtggctggagccctgctgaggagctgaactacacagtgcccggccctggccctgctggggaggccagcccccggcagtgccgccgctatgaggtggactggaaccagagcacctttgactgtgtggaccccctggccagcctggacaccaacagaagccggctgcccctgggcccctgcagagatggctgggtgtatgagaccccaggcagcagcatcgtgacagagttcaacctggtgtgtgccaacagctggatgctggacctcttccagagctctgtgaatgtgggcttcttcatcggctccatgagcatcggctacatcgctgaccgcttcggcaggaagctgtgcctgctgaccaccgtgctgatcaatgctgctgctggggtgctgatggccatcagccccacctacacctggatgctgatcttccgcctcatccagggcctggtgtccaaggccggctggctgattggctacatcctgatcacagaatttgtgggccgccgctacagaagaacagtgggcatcttctaccaggtggcctacacagtgggcctgctggtgctggccggcgtggcctatgccctgccccactggcgctggctgcagttcaccgtgtccctgcccaacttcttcttcctgctgtactactggtgcatccctgagagcccccgctggctgatcagccagaacaagaatgctgaggccatgaggatcatcaagcacatcgccaagaagaatggcaagagcctgcctgccagcctgcagaggctgcggctggaggaggagaccgggaagaagctgaaccccagcttcctggacctggtgaggaccccccagatcaggaagcacaccatgatcctgatgtacaactggttcaccagctctgtgctgtaccagggcctcatcatgcacatgggcctggccggggacaacatctacctggacttcttctacagcgccctggtggagttccctgctgccttcatgatcatcctgaccatcgacagaattggaagacgctacccctgggccgccagcaacatggtggccggggccgcctgcctggcctctgtgttcatccctggggacctgcagtggctgaagatcatcatcagctgcctgggccgcatgggcatcaccatggcctatgaaattgtgtgcctggtgaatgctgagctgtaccccaccttcatccggaacctgggcgtgcacatctgcagctccatgtgtgacatcggcggcatcatcacccccttcctggtgtaccgcctgaccaacatctggctggagctgcccctgatggtgtttggagtgctgggcctggtggccggcggcctggtgctgctgctgcctgagaccaagggcaaggccctgcctgagaccatcgaggaggccgagaacatgcagaggcccaggaagaacaaggagaagatgatctacctgcaggtgcagaagctggacatccccctgaactag

SEQ ID NO: 134668 - DNA, 1005 bp, Artificial Sequence
  derived and/or modified sequence
atgttcttcctgctggccctgctgagcgccaccttcgcccccatctacgtgggaattgttttcctggggtttacccccgaccaccgctgcagatcccctggagtggccgaattgagcttgcgctgcggctggtctccagcagaagagctgaactatacagtgccagggcccgggccagccggcgaagcctctccccgccagtgcaggcggtacgaggtcgactggaaccaatccaccttcgattgcgtggaccccctggcttctttggataccaatcggtcccgactccctttggggccatgtagggacggttgggtttacgaaacccctggcagctccatcgtgacggaattcaacttggtctgcgccaattcatggatgcttgacttatttcagagcagtgtcaatgtcggattctttattggttctatgtccatcggctatattgctgatagatttggtcggaagctctgtctcttaacgaccgtactgatcaacgcagctgcgggagtgttgatggccatatcccctacatacacctggatgctgattttcaggttgattcagggcctggtcagcaaggcaggttggctgatcggctatatactgataaccgagttcgtcggtcgtcgatacagaagaacagtgggcatcttctatcaggtggcctataccgtcggtcttttggtcctagctggcgtagcttacgccttacctcactggcgatggctgcagttcacagtgtcccttcctaacttttttttccttctctattattggtgtattcctgagtccccacggtggctcatctcgcagaacaagaacgccgaggccatgaggattatcaagcacatcgcaaagaagaatggtaaaagcctaccggcatcgctgcagagactgcgcctcgaggaggagacaggaaaaaagctgaatccatcttttctcgacctggtaagaacacctcagattcgaaagcacaccatgatactgatgtacaattggtag

SEQ ID NO: 134669 - DNA, 1668 bp, Artificial Sequence
  derived and/or modified sequence
atgcccaccaccgtggacgacgtgctggagcacggcggcgagttccatttttttcagaaacagatgttcttcttgctggcgctgctcagtgctacgttcgcaccaatctatgtggggattgtatttttggggtttacacccgaccatcggtgcagaagcccaggcgtcgcagagctgtccctccggtgtggctggtcacccgcggaggagctgaactatacggtacctggacctgggccggccggcgaggccagcccccgtcagtgtcggaggtacgaggtagactggaaccagtccacgttcgattgtgtggatcccctggcttctctggatacaaacagatcacgactcccactcggcccctgtcgagatggatgggtgtacgaaacgcccggcagcagcattgtgactgagttcaacctggtttgcgcaaactcatggatgcttgacctcttccaatcgtccgtgaacgtcggcttttttataggatcaatgtccatcgggtacatcgctgatcggttcgggaggaagctgtgcctgcttactactgtactgattaatgccgccgctggtgtgcttatggcaatatctcccacgtatacatggatgcttatctttaggttaattcagggactggtctccaaggcgggctggttgattggctacattctcattaccgagttcgttggacgccgatacaggagaactgtgggtatattctaccaggtggcatacacggttggactgctggtgctggccggagtagcatatgctctgcctcactggcggtggttacaatttacagttagcctccctaactttttctttttgctgtactattggtgcatccccgagtccccacggtggctgatctctcagaacaagaatgccgaagccatgcggataattaaacatatagccaagaaaaacggcaagtcgctcccagcctctctgcagcgcctgcgtttggaagaagagaccggaaagaagctgaacccttctttcttggatttggtccgcaccccgcaaattagaaagcatactatgattctgatgtataattggtttacctcaagcgtactctaccaaggcctgattatgcacatggggctcgccggcgataatatctacctcgatttcttttacagtgccctcgtcgaatttccagcagcttttatgataatcctgaccattgaccgaatcggacgtcggtacccttgggccgcctctaatatggtcgcaggggccgcctgtctcgctagcgtctttatccccggggatctgcagtggttgaaaataatcattagttgtctggggcgtatgggcatcaccatggcctatgagatcgtgtgtctcgtaaacgccgagctataccctacattcatcaggaacctgggtgtccacatttgtagctctatgtgcgatatcggaggcatcataactccctttctcgtgtacagactgactaatatatggctcgagctgcccctcatggtgtttggcgtgcttggcctggtggctggcggactggtcctgctgctccccgagaccaagggtaaagccctaccagaaaccatcgaggaggcggagaatatgcagagaccaaggaaaaacaaagaaaaaatgatatatctgcaagtccaaaaactcgacattccattaaattag

SEQ ID NO: 134670 - DNA, 1005 bp, Artificial Sequence
  derived and/or modified sequence
atgttcttcctgctggcattgctttcagcaactttcgcacccatttacgtgggcatcgtgttcctcggctttacgccagaccatcgctgtaggagcccaggcgtggcagagctctctttgaggtgcggttggtccccagctgaggagctcaactacactgtgccgggtccgggacctgctggggaagctagcccgagacagtgcagacgatacgaggtggattggaaccagagcaccttcgattgtgtggacccactggcctcgttggacaccaatcggagccggctacccctcggtccttgccgcgacggatgggtttacgagacacccggatcatccattgttacagaattcaacctcgtctgcgcgaactcctggatgcttgacctgttccagtctagtgtgaatgtggggttcttcattgggtcaatgtcgattggctatattgccgaccgcttcggtcgaaagctgtgtctgttaacaactgtgctaatcaatgctgccgctggtgtgctgatggccattagtcccacctatacgtggatgttaatctttcgtctcatccagggactggtatctaaggccggttggctaataggttatatactcattaccgaatttgtcggaaggagatacaggagaactgtggggattttttaccaagtagcgtacactgtaggcctgcttgtgctggccggtgtggcatacgccctgccccattggcggtggctgcagtttaccgtctcgctgcccaatttttttttcctgctgtattactggtgtatacctgagagccctcgctggttaatctcccagaacaaaaatgcagaagccatgcgcataataaagcacattgccaaaaagaacggtaagtctctgccagcatccctgcagcggctgcggttggaggaggagaccggcaagaagctgaatccaagttttctggacctggtcaggacgccccaaattcgcaaacataccatgattcttatgtacaactggtag

SEQ ID NO: 134671 - DNA, 1668 bp, Artificial Sequence
  derived and/or modified sequence
atgccgactaccgtggacgacgttctggagcatgggggtgagtttcacttttttcagaagcagatgttctttctactggcgctgctgtctgccacatttgcacccatatatgtggggatcgtgtttttgggattcacaccagaccacagatgccgaagcccaggtgttgctgaattaagcttgagatgcgggtggtcccccgcagaagaacttaactacaccgtcccaggtcctggtcccgctggcgaagcaagccccagacaatgccggcgatacgaagttgactggaaccaaagtacgttcgactgtgtagatcccctcgcctccctggatacgaatagatcgcggctgcctctaggaccatgccgcgatgggtgggtgtatgaaactcccggatcaagcatcgtgacagaattcaatttggtttgcgcaaatagttggatgctggacctgtttcaaagttccgtaaatgtgggatttttcattggatccatgtctataggttacatcgcagatagattcggcaggaaattgtgcctcctgaccactgtgttaataaatgcggcagctggagtactcatggcaattagccctacctacacatggatgctgatatttcgtcttatccagggcttggtgtccaaggccggttggctgatcggttatattctcatcactgagtttgtgggcaggaggtatcgcagaacggttggcattttctaccaggtcgcctatacagtgggtctgcttgtattagctggcgtggcgtacgccctcccacattggagatggttacagtttacagtgtcattaccgaactttttttttctactgtactactggtgtatcccagaatcaccaagatggcttatcagccagaataaaaatgccgaggccatgagaatcatcaagcacatcgcaaaaaagaatggaaaatcgcttcccgcaagtctccagaggcttagactcgaagaagagactgggaagaaactgaatcctagctttctcgatctggtacggactccgcagatacgcaaacataccatgatcctgatgtacaattggtttacctcaagtgtgttgtatcaggggctcatcatgcatatgggtctggctggggacaatatttacctcgattttttttattcagcactagtcgagttcccagccgcatttatgatcattctgactatagatcgtataggcaggcggtacccatgggctgctagcaatatggtcgccggtgctgcatgcctggcttcggtatttataccaggcgacctgcagtggctaaagattattattagctgtctaggcagaatggggatcactatggcctacgagattgtctgtctggtgaacgctgagttatatcccactttcatcagaaacctcggcgtgcatatctgctcaagcatgtgtgatattggaggtatcatcaccccctttctggtgtatcgcctgactaacatatggctggagctgcccctcatggtctttggtgtactggggttggtcgccggaggactggtcctgctcctccccgagaccaaggggaaggccctgcctgaaacaattgaagaggccgaaaatatgcagaggcctcgaaaaaacaaggagaagatgatttatctgcaggtccagaagcttgacattccgctcaattag

SEQ ID NO: 134672 - DNA, 3737 bp, Artificial Sequence
  derived and/or modified sequence
gctgaacagtgctctcgctgaggtcagggggagaagatggcaggggtgaatccttgacgatcacggagtaaggacgagaatgcagtttgcttcccacaggcccctccctcaacatgccaagattcctacctggggcatcaagactgcaggtggggccaagaaaagacatggacactcaaagtcaagctctttgacggggaacaggtgcagacagagcagccttggcttccggctcatgcactcacgatgctggctgcgaatgggaagtccctaaacagaactgagccccctcattcagctcagagcaaacggggctggcagcagcccagggcaccacgaagcagagtgcctctgtgtgcccaacacagccgcagtggaggtcaatggatgtccttgccggcgccctgctttttgcttttttaagaaaataagaagcctgcagctgcggcaaggagaaagaccccgtgggtcgctccttttagactacgctattacacctgctgactatccaatagaaaaaagaaggagaaggaaaatcgggttaactttctggtatttagtttgcagatatgtcagcaggccaccttctctacttggcaggatcacgatgtattaagaatccttttgtccaccaggaaagacaaatttcctgtttgtcttgcatttagatgcaacaacatcatcctaaagagatgcccctgatgtgtgagagcagaaaggggtgatccctttcttccttatcctaaggctcacggccaacacccctataacaaaagacaggttaacaagagaaaagcatgacaaatttatttgatcacgttttacatgacacaggagccttcattcagaatgaagacccacagatacagggaaaactggatggcagtatagaactgtagttggacaaaaagggcagcagcccatgttcgcaggctgaggggaaaacccagcaaggcctgtctgttcagatccgtcttggcccctctgtgcagcactccttcctccaggcaccggggacaagactcctctggaatgcgggtctggatttctttacggcccactgttacacagaaaggcagcggggaagttacagtggtatttctaggctttctggctggctttggggagaaaagagtctggtttccacgagctgctttgaggaagaaggattctcagttctatggcttgccccgggggagaatgatgggtgagagaagagacaggagggcaggagaaggtcagagagagagactttgcttctgaggcctccaccttggggcatggatttctgagccccaacagaccttgacagaaaaatctaggacacaaagatagtggcttggacacacctgcctgcatttacacttgacctgtctgcgacgtaaacactttcctctttccctccagatgggttaaggggaaggacacttcagggttgaaacgcaggaataccagattggatttcactttttccagaagcaaatgtttttcctcttggctctgctctcggctaccttcgcgcccatctacgtgggcatcgtcttcctgggcttcacccctgaccaccgctgccggagccccggagtggccgagctgagtctgcgctgcggctggagtcctgcagaggaactgaactacacggtgccgggcccaggacctgcgggcgaagcctccccaagacagtgtaggcgctacgaggtggactggaaccagagcaccttcgactgcgtggaccccctggccagcctggacaccaacaggagccgcctgccactgggcccctgccgggacggctgggtgtacgagacgcctggctcgtccatcgtcaccgagtttaacctggtatgtgccaactcctggatgttggacctattccagtcatcagtgaatgtaggattctttattggctctatgagtatcggctacatagcagacaggtttggccgtaagctctgcctcctaactacagtcctcataaatgctgcagctggagttctcatggccatttccccaacctatacgtggatgttaatttttcgcttaatccaaggactggtcagcaaagcaggctggttaataggctacatcctgattacagaatttgttgggcggagatatcggagaacagtggggattttttaccaagttgcctatacagttgggctcctggtgctagctggggtggcttacgcacttcctcactggaggtggttgcagttcacagtttctctgcccaacttcttcttcttgctctattactggtgcatacctgagtctcccaggtggctgatctcccagaataagaatgctgaagccatgagaatcattaagcacatcgcaaagaaaaatggaaaatctctacccgcctcccttcagcgcctgagacttgaagaggaaactggcaagaaattgaacccttcatttcttgacttggtcagaactcctcagataaggaaacatactatgatattgatgtacaactggtaaggaatatttttcactttgaaatgcctccaaattgttttaatcacagtcatccatagtaaggaagggaagaaaacatgacctcatcccggtattagcgctgacggtgggcagcaatgtgggttgtgtctggtaggttttcctgatcgtgtttttcttgggcaaatattaagatcggtgtagcccctaagcacagatcaaggcaatggcaacctcggcttcacattggaatcacctgggagcttacaaaataccaaagccaaaacccccagaaatactgatttaattgttctagggtagggcttggaaaccaatagttttttaattctccaggtgattcaaatgcatagcccaactagagaactattggtataacttaattgatgatgcatgtagatctctattgtagtacagaactggcaaaaaacaaacaaacaaaaaacagggttgtggggggattgccttttctttcctttttttcttttctacctggagaaaaaataaatttctgaacaagaataattccagtggcttcacagcccagtgacttgatctttattgtgtttgctacctacaggctgctctcagagcttcaagccatgctttctctagtggggaatgcatcttttcagggcacattggatctccacccaggcaaatggagatttacaatcactgacaaaagcaaagctcatgaggaattactttagcaacctttacaatagtgcacaggagaggcagctttgaaatttggcctcattatccttctttccttttctgagtaatcgtgacttttgttgattatcctcatattttccattacatgtaatgactatgtttagttaataaactagaaacattgtccaaatgttgttcgtaacaggccaggagagaagtcaccaagaagggaggccgtactcacttggtcttctggtttcctaaaatttgaattaagtagtcagttctttcgatcccaattgcactagaataccccaaagagagaaataactcacaaccactaataacttgatatagttttactaaataaatcattccattggccaggcacagtggctcacacctggaatcccagcatttcgggaggctgaggcaggcagatcacatgaagccaggagttcaagaccagcctggttaacatggcaaaaccccatgtctactaaaagcacaaaaattagcaggtggtacacgtctgtaatcccaactactagggaggctgaggcaggggaataact

SEQ ID NO: 134673 - DNA, 2597 bp, Artificial Sequence
  derived and/or modified sequence
gttataataaacacgacaggcatcctgggagtgagctcagggcatttgggaagtgcagaaggacatgcacccccgctggaggggtgcacctttgaagtcagctggaccaaggaaaggccctgccctgaaggctggtcacttgcagaggtaaactcccctctttgacttctggccagggtttgtgctgagctggctgcagccgctctcagcctcgctccgggcacgtcgggcagcctcgggccctcctgcctgcaggatcatgcccaccaccgtggacgatgtcctggagcatggaggggagtttcactttttccagaagcaaatgtttttcctcttggctctgctctcggctaccttcgcgcccatctacgtgggcatcgtcttcctgggcttcacccctgaccaccgctgccggagccccggagtggccgagctgagtctgcgctgcggctggagtcctgcagaggaactgaactacacggtgccgggcccaggacctgcgggcgaagcctccccaagacagtgtaggcgctacgaggtggactggaaccagagcaccttcgactgcgtggaccccctggccagcctggacaccaacaggagccgcctgccactgggcccctgccgggacggctgggtgtacgagacgcctggctcgtccatcgtcaccgagtttaacctggtatgtgccaactcctggatgttggacctattccagtcatcagtgaatgtaggattctttattggctctatgagtatcggctacatagcagacaggtttggccgtaagctctgcctcctaactacagtcctcataaatgctgcagctggagttctcatggccatttccccaacctatacgtggatgttaatttttcgcttaatccaaggactggtcagcaaagcaggctggttaataggctacatcctgattacagaatttgttgggcggagatatcggagaacagtggggattttttaccaagttgcctatacagttgggctcctggtgctagctggggtggcttacgcacttcctcactggaggtggttgcagttcacagtttctctgcccaacttcttcttcttgctctattactggtgcatacctgagtctcccaggtggctgatctcccagaataagaatgctgaagccatgagaatcattaagcacatcgcaaagaaaaatggaaaatctctacccgcctcccttcagcgcctgagacttgaagaggaaactggcaagaaattgaacccttcatttcttgacttggtcagaactcctcagataaggaaacatactatgatattgatgtacaactggttcacgagctctgtgctctaccagggcctcatcatgcacatgggccttgcaggtgacaatatctacctggatttcttctactctgccctggttgaattcccagctgccttcatgatcatcctcaccatcgaccgcatcggacgccgttacccttgggctgcatcaaatatggttgcaggggcagcctgtctggcctcagtttttatacctggtgatctacaatggctaaaaattattatctcatgcttgggaagaatggggatcacaatggcctatgagatagtctgcctggtcaatgctgagctgtaccccacattcattaggaatcttggcgtccacatctgttcctcaatgtgtgacattggtggcatcatcacgccattcctggtctaccggctcactaacatctggcttgagctcccgctgatggttttcggcgtgcttggcttggttgctggaggtctggtgctgttgcttccagaaactaaagggaaagctttgcctgagaccatcgaggaagccgaaaatatgcaaagaccaagaaaaaataaagaaaagatgatttacctccaagttcagaaactagacattccattgaactaagaagagagaccgttgctgctgtcatgacctagctttgatggcagcaagaccaaaagtagaaatccctgcactcatcacaaagcccatacaactcaaccaaacttacccctgagccctatcaacctaggtctacagccagtggagtctattgtacactgtggaaaaatacccatgggaccagatcctgccaaattcttccagctcactttattctcagcattcctaggacattggacattggttttctggagggttttttttccatctttgtatttttttaaatttgattcttttctttgcaatgctatctaaccagaatacataggggaactgtgggctaggcaaacaaaatagaaaaaagtgtgaaaaacagtaaagttgggagaggagcatctattttcttaaagaaataaaacacccaaaacaatataaagttgtccagaatgtatgtcaagaattttagataggcctttcagtaacacaggtgaagaaatttttaaaaatacattgattattatctaggttagacttaaagtgaatctcaaataaaagaatcaggaatacaacttaagtgatcatgaggtccttccatatttagattgggtaagcatgaatgtgtattttctacaaaagaccttgagaagagttcaataaaaaatgttagcattat

SEQ ID NO: 134674 - DNA, 1005 bp, Artificial Sequence
  derived and/or modified sequence
atgttcttcctgctggccctgctgagcgccaccttcgcccccatctacgtgggcatcgtgttcctgggcttcacccccgaccacagatgcagaagccccggcgtggccgagctgagcctgagatgcggctggagccccgccgaggagctgaactacaccgtgcccggccccggccccgccggcgaggccagccccagacagtgcagaagatacgaggtggactggaaccagagcaccttcgactgcgtggaccccctggccagcctggacaccaacagaagcagactgcccctgggcccctgcagagacggctgggtgtacgagacccccggcagcagcatcgtgaccgagttcaacctggtgtgcgccaacagctggatgctggacctgttccagagcagcgtgaacgtgggcttcttcatcggcagcatgagcatcggctacatcgccgacagattcggcagaaagctgtgcctgctgaccaccgtgctgatcaacgccgccgccggcgtgctgatggccatcagccccacctacacctggatgctgatcttcagactgatccagggcctggtgagcaaggccggctggctgatcggctacatcctgatcaccgagttcgtgggcagaagatacagaagaaccgtgggcatcttctaccaggtggcctacaccgtgggcctgctggtgctggccggcgtggcctacgccctgccccactggagatggctgcagttcaccgtgagcctgcccaacttcttcttcctgctgtactactggtgcatccccgagagccccagatggctgatcagccagaacaagaacgccgaggccatgagaatcatcaagcacatcgccaagaagaacggcaagagcctgcccgccagcctgcagagactgagactggaggaggagaccggcaagaagctgaaccccagcttcctggacctggtgagaaccccccagatcagaaagcacaccatgatcctgatgtacaactggtag

SEQ ID NO: 134675 - DNA, 1668 bp, Artificial Sequence
  derived and/or modified sequence
atgcccaccaccgtggacgacgtgctggagcacggcggcgagttccacttcttccagaagcagatgttcttcctgctggccctgctgagcgccaccttcgcccccatctacgtgggcatcgtgttcctgggcttcacccccgaccacagatgcagaagccccggcgtggccgagctgagcctgagatgcggctggagccccgccgaggagctgaactacaccgtgcccggccccggccccgccggcgaggccagccccagacagtgcagaagatacgaggtggactggaaccagagcaccttcgactgcgtggaccccctggccagcctggacaccaacagaagcagactgcccctgggcccctgcagagacggctgggtgtacgagacccccggcagcagcatcgtgaccgagttcaacctggtgtgcgccaacagctggatgctggacctgttccagagcagcgtgaacgtgggcttcttcatcggcagcatgagcatcggctacatcgccgacagattcggcagaaagctgtgcctgctgaccaccgtgctgatcaacgccgccgccggcgtgctgatggccatcagccccacctacacctggatgctgatcttcagactgatccagggcctggtgagcaaggccggctggctgatcggctacatcctgatcaccgagttcgtgggcagaagatacagaagaaccgtgggcatcttctaccaggtggcctacaccgtgggcctgctggtgctggccggcgtggcctacgccctgccccactggagatggctgcagttcaccgtgagcctgcccaacttcttcttcctgctgtactactggtgcatccccgagagccccagatggctgatcagccagaacaagaacgccgaggccatgagaatcatcaagcacatcgccaagaagaacggcaagagcctgcccgccagcctgcagagactgagactggaggaggagaccggcaagaagctgaaccccagcttcctggacctggtgagaaccccccagatcagaaagcacaccatgatcctgatgtacaactggttcaccagcagcgtgctgtaccagggcctgatcatgcacatgggcctggccggcgacaacatctacctggacttcttctacagcgccctggtggagttccccgccgccttcatgatcatcctgaccatcgacagaatcggcagaagatacccctgggccgccagcaacatggtggccggcgccgcctgcctggccagcgtgttcatccccggcgacctgcagtggctgaagatcatcatcagctgcctgggcagaatgggcatcaccatggcctacgagatcgtgtgcctggtgaacgccgagctgtaccccaccttcatcagaaacctgggcgtgcacatctgcagcagcatgtgcgacatcggcggcatcatcacccccttcctggtgtacagactgaccaacatctggctggagctgcccctgatggtgttcggcgtgctgggcctggtggccggcggcctggtgctgctgctgcccgagaccaagggcaaggccctgcccgagaccatcgaggaggccgagaacatgcagagacccagaaagaacaaggagaagatgatctacctgcaggtgcagaagctggacatccccctgaactag

SEQ ID NO: 134676 - protein, 551 aa, Artificial Sequence
  derived and/or modified sequence
MRDYDEVIAFLGEWGPFQRLIFFLLSASIIPNGFNGMSVVFLAGTPEHRCRVPDAANLSSAWRNNSVPLRLRDGREVPHSCSRYRLATIANFSALGLEPGRDVDLGQLEQESCLDGWEFSQDVYLSTVVTEWNLVCEDNWKVPLTTSLFFVGVLLGSFVSGQLSDRFGRKNVLFATMAVQTGFSFLQIFSISWEMFTVLFVIVGMGQISNYVVAFILGTEILGKSVRIIFSTLGVCTFFAVGYMLLPLFAYFIRDWRMLLLALTVPGVLCVPLWWFIPESPRWLISQRRFREAEDIIQKAAKMNNIAVPAVIFDSVEELNPLKQQKAFILDLFRTRNIAIMTIMSLLLWMLTSVGYFALSLDAPNLHGDAYLNCFLSALIEIPAYITAWLLLRTLPRRYIIAAVLFWGGGVLLFIQLVPVDYYFLSIGLVMLGKFGITSAFSMLYVFTAELYPTLVRNMAVGVTSTASRVGSIIAPYFVYLGAYNRMLPYIVMGSLTVLIGILTLFFPESLGMTLPETLEQMQKVKWFRSGKKTRDSMETEENPKVLITAF

SEQ ID NO: 134677 - DNA, 1656 bp, Artificial Sequence
  derived and/or modified sequence
atgcgggactatgatgaagtgattgctttcctgggcgagtggggccctttccagcgtcttatcttctttctcctgtccgcctctattatcccaaacggattcaatggaatgagtgtagtgttcctcgcaggtacaccagaacatcgatgcagagtgccggatgctgctaatcttagctcggcctggagaaacaattccgttcccttaagactgcgcgatggaagggaagtaccccacagctgctcccgctaccggttggctacaattgccaacttcagtgctctaggcctagaaccaggccgcgatgttgatttagggcagcttgaacaggaaagctgcctagatgggtgggagtttagccaggatgtgtatctgtctacggttgtaaccgagtggaatctggtgtgcgaagacaattggaaggtgcctctcacaacatcactttttttcgtcggagtcctgctcggatcgttcgtgtccggccagttgagtgatcggttcggaagaaagaatgttttgttcgctacgatggctgtccagaccggcttttcgtttctacagatcttcagcatctcgtgggagatgttcaccgtgctgtttgtgatcgtaggcatgggccagatctctaactacgtggtcgcgttcattctgggaaccgagattcttggaaagagtgtccgtatcatattttccactctcggtgtgtgcacattcttcgccgtgggctatatgctgttgccattgttcgcttacttcatcagggattggagaatgctcctgcttgccctcactgtccccggcgtgctctgtgtacctctctggtggtttatcccagaaagccctaggtggctaatcagtcagaggagattccgggaagccgaggacattatccagaaagcagcgaagatgaacaatattgctgttcccgccgtcatcttcgattctgtggaggaattaaatcctctcaaacagcagaaggccttcatattggacctcttccgaactcggaatatagcgatcatgaccattatgagccttctgctgtggatgctgacctctgtgggttatttcgccctctccctcgatgcccctaatcttcacggtgacgcttatctgaattgtttcctgtccgcattgattgagatccctgcgtacattactgcctggctccttttacgtaccctgcccagaagatacataatagcagcagttctcttctggggcggcggcgttctgctttttatccagcttgttccagttgattattattttctctcaataggactggtaatgctggggaagtttggaatcacgagcgccttcagcatgttgtatgtgtttaccgccgaattataccctacattggtgcggaacatggcagtgggggtgacatctacagcttccagagtgggatccatcatagctccatattttgtgtatctgggcgcatacaatcgcatgctgccttacattgtaatggggagcctgaccgtgttaattggcatcctcactctgttctttccagagtctctaggaatgaccctgccagagacactggaacagatgcaaaaagtaaaatggtttcgctccggaaagaaaaccagggacagtatggagactgaggagaatccaaaagtgttaattacagctttttag

SEQ ID NO: 134678 - DNA, 1656 bp, Artificial Sequence
  derived and/or modified sequence
atgagggactatgatgaagtcatcgccttcctgggggagtggggccccttccagaggctcatcttcttcctgctgagcgccagcatcatccccaacggcttcaacggcatgtctgtggtgttcctggccggcaccccagagcaccgctgccgggtgcctgatgctgccaacctgagcagcgcctggaggaacaacagcgtgcccctgcggctgagagatggccgggaggtgccccacagctgcagccgctaccgcctggccaccatcgccaacttcagcgccctgggcctggagcccggcagagatgtggacctgggccagctggagcaggagagctgcctggatggctgggagttcagccaggatgtgtacctgagcacagtggtgacagagtggaacctggtgtgtgaggacaactggaaggtgcccctgaccaccagcctcttctttgtgggcgtgctgctgggcagctttgtgtctggccagctgagtgacagatttggaaggaagaatgtgctgtttgccaccatggctgtgcagacaggcttctccttcctgcagatcttcagcatctcctgggagatgttcaccgtgctcttcgtcatcgtgggcatgggccagatcagcaactacgtggtggccttcatcctgggcacagagatcctgggcaagtctgtgcgcatcatcttcagcaccctgggcgtgtgcaccttctttgctgtgggctacatgctgctgcccctgtttgcctacttcatccgggactggaggatgctgctgctggccctgactgtgcctggggtgctgtgtgtgcccctgtggtggttcatccctgagagcccccgctggctgatcagccagaggcgcttccgggaggccgaggacatcatccagaaggccgccaagatgaacaacattgctgtgcctgctgtgatctttgattctgtggaggagctgaaccccctgaagcagcagaaggccttcatcctggacctcttccgcaccaggaacatcgccatcatgaccatcatgagcctgctgctgtggatgctgacctctgtgggctactttgccctgagcctggatgcccccaacctgcatggagatgcctacctgaactgcttcctgagcgccctgattgagatcccagcctacatcacagcctggctgctgctgcggaccctgccccggcgctacatcatcgctgctgtgctcttctggggcggcggcgtgctgctcttcatccagctggtgcctgtggactactacttcctgagcatcggcctggtgatgctgggcaagtttggcatcaccagcgccttctccatgctgtatgtgttcaccgctgagctgtaccccaccctggtgaggaacatggctgtgggcgtgaccagcacagccagccgggtgggcagcatcatcgccccctactttgtgtacctgggcgcctacaacaggatgctgccctacatcgtgatgggcagcctgactgtgctgattggcatcctgaccctcttcttccctgagagcctgggcatgaccctgcctgagaccctggagcagatgcagaaggtgaagtggttccgcagcggcaagaagacccgggacagcatggagacagaggagaaccccaaggtgctgatcacagccttctag

SEQ ID NO: 134679 - DNA, 1656 bp, Artificial Sequence
  derived and/or modified sequence
atgcgggactacgacgaggtgatcgccttcctgggcgagtggggcccgtttcaacgcctgattttcttcttactatccgcctccatcatcccaaatggattcaacggcatgtctgtggtgttcctcgctggcacaccggaacatcggtgtagggtgcccgacgcagccaatttaagctccgcctggagaaacaacagcgttccgttgaggttacgcgacggcagagaggttccacactcttgtagccgctacaggctggccactattgctaatttcagcgcactcggactggagcctggccgagatgtcgacttggggcaacttgagcaagagtcctgtctggatggatgggaattttcccaagacgtgtatctgtctaccgttgtcactgagtggaatctggtttgcgaggacaactggaaggtgcctttgactacctctctgttctttgtgggggtactactgggatcttttgtcagcggtcagctctctgacaggtttggtcggaaaaacgttctctttgccacgatggcagtacagactggcttttcctttttacagatattttccattagctgggagatgtttaccgtactcttcgtcatagtgggtatgggccaaatttctaactatgtggtggctttcatcctgggcaccgagatattgggcaaatcagtccgcatcatttttagcaccctgggagtctgcacattcttcgctgtaggctacatgctgctgccattatttgcatatttcatacgcgactggaggatgctcctgctggcgctgactgtgccaggtgttttgtgcgtgcccctgtggtggtttattcccgagtctcctagatggctgatttcgcagaggcgcttccgcgaggctgaggatattattcagaaggccgccaaaatgaacaatatagctgtgccagctgtaatttttgactccgttgaggagctgaatcccctgaagcaacagaaggccttcatcttggacttatttcgcacccgaaatatcgctattatgacaatcatgtccctactgctgtggatgctcacctctgtaggctactttgccctgagtctggacgcccccaacctgcacggcgatgcatatttgaactgttttctctcagccttgattgaaataccagcatacattaccgcttggttattgctcaggactctgcccaggaggtacattatcgcagctgtcctcttctggggcggaggagtcctgttgtttattcagctcgtgcccgtcgactactactttctgtcgataggactggtcatgctcgggaaatttggaatcacctctgctttctctatgctgtatgtgtttacagccgaactatatcccactttggtgcgcaacatggccgtgggcgtaactagcaccgcttctcgcgtcgggtctataattgccccctattttgtgtacctgggcgcctacaatagaatgctaccctatatcgtcatgggctccttgactgtgctgattggaattctgaccttattttttcctgagagtcttggaatgactttacccgagacccttgaacagatgcagaaggtgaaatggttccgttccggtaagaaaaccagggattccatggagaccgaggagaatcccaaggtgctgatcactgccttctag

SEQ ID NO: 134680 - DNA, 1656 bp, Artificial Sequence
  derived and/or modified sequence
atgcgcgactacgacgaagtgattgcgttcctgggagagtgggggccattccagagactgatcttttttttgctcagcgccagcatcatcccaaatggctttaacgggatgtctgtggtgtttctcgccggaacaccggaacataggtgtcgcgtacctgacgccgctaacctgagtagtgcttggaggaacaatagcgtcccactgagactgagagacggcagggaggtccctcactcctgcagcaggtatcgcctggctaccattgcaaatttctcagcactcgggctcgaacccggaagagacgttgacctcggccagctagagcaggagagctgcctggacggctgggaattctcgcaggacgtatatttgagcactgtggttactgaatggaatcttgtatgcgaagacaactggaaggttccattgacaacatcactgttttttgtgggagtcctgttgggcagcttcgtgtctgggcagctgagtgatcgatttgggcgtaagaatgtgttattcgccaccatggcagtccagactggctttagctttttacagatcttttccatcagttgggaaatgtttactgtgctatttgtcattgtgggcatgggacagatcagtaactatgtggtggccttcatcctgggtaccgagattctgggaaagtctgtcagaatcatattttctacacttggtgtgtgtacgttcttcgccgtggggtatatgctgttaccgctgtttgcctacttcattcgggattggaggatgctgctacttgcgctgacagtgcccggtgtgctgtgtgtccccctgtggtggttcattccagaatcccccaggtggctgatctcccagagaaggtttcgcgaggcggaggatattattcagaaggcagctaagatgaacaacattgcagttcccgcagtgattttcgatagtgtggaggagctgaaccccttgaagcagcagaaggcgtttatcctcgacctcttccgcacgcgtaacattgctatcatgaccataatgagtctgcttctgtggatgctcacctccgttggctatttcgctcttagcctcgacgctcctaacctgcacggggacgcttacctaaattgtttcctcagcgcattaattgaaattccagcctacatcacagcttggctgctgctgaggacattacctaggagatacattattgcagccgttctgttctggggcggaggcgtgctgctgtttatacaattagttccggtcgattactacttcctctccatcggcctggttatgctgggcaagtttggtattacgtcagctttcagtatgctctatgtgtttaccgcagaactctaccctaccctagtgcgtaacatggcagtcggggtcacctctactgcatccagggttggtagcataatagccccttatttcgtatacctgggggcttataatcggatgcttccctatatcgtcatgggctcattgaccgtcctcataggtattctcacccttttctttccggaatcgcttggaatgacccttccagagaccttggagcaaatgcagaaagtgaaatggttccgatctggaaagaaaacacgcgacagcatggaaaccgaggaaaatcctaaagtgcttatcactgctttttag

SEQ ID NO: 134681 - DNA, 2201 bp, Artificial Sequence
  derived and/or modified sequence
cgccttcagcctgtttcccaggaacggtccccggcttcgcgccccaatttctaacagcctgcctgtcccccgggaacgttctaacatccttggggagcgccccagctacaagacactgtcctgagaacgctgtcatcacccgtagttgcaagtttcggagcggcagtgggaagcatgcgggactacgacgaggtgatcgccttcctgggcgagtgggggcccttccagcgcctcatcttcttcctgctcagcgccagcatcatccccaatggcttcaatggtatgtcagtcgtgttcctggcggggaccccggagcaccgctgtcgagtgccggacgccgcgaacctgagcagcgcctggcgcaacaacagtgtcccgctgcggctgcgggacggccgcgaggtgccccacagctgcagccgctaccggctcgccaccatcgccaacttctcggcgctcgggctggagccggggcgcgacgtggacctggggcagctggagcaggagagctgcctggatggctgggagttcagccaggacgtctacctgtccaccgtcgtgaccgagtggaatctggtgtgtgaggacaactggaaggtgcccctcaccacctccctgttcttcgtaggcgtgctcctcggctccttcgtgtccgggcagctgtcagacaggtttggcaggaagaacgttctcttcgcaaccatggctgtacagactggcttcagcttcctgcagattttctccatcagctgggagatgttcactgtgttatttgtcatcgtgggcatgggccagatctccaactatgtggtagccttcatactaggaacagaaattcttggcaagtcagttcgtattatattctctacattaggagtgtgcacattttttgcagttggctatatgctgctgccactgtttgcttacttcatcagagactggcggatgctgctgctggcgctgacggtgccgggagtgctgtgtgtcccgctgtggtggttcattcctgaatctccccgatggctgatatcccagagaagatttagagaggctgaagatatcatccaaaaagctgcaaaaatgaacaacatagctgtaccagcagtgatatttgattctgtggaggagctaaatcccctgaagcagcagaaagctttcattctggacctgttcaggactcggaatattgccataatgaccattatgtctttgctgctatggatgctgacctcagtgggttactttgctctgtctctggatgctcctaatttacatggagatgcctacctgaactgtttcctctctgccttgattgaaattccagcttacattacagcctggctgctattgcgaaccctgcccaggcgttatatcatagctgcagtactgttctggggaggaggtgtgcttctcttcattcaactggtacctgtggattattacttcttatccattggtctggtcatgctgggaaaatttgggatcacctctgctttctccatgctgtatgtcttcactgctgagctctacccaaccctggtcaggaacatggcggtgggggtcacatccacggcctccagagtgggcagcatcattgccccctactttgtttacctcggtgcttacaacagaatgctgccctacatcgtcatgggtagtctgactgtcctgattggaatcctcaccctttttttccctgaaagtttgggaatgactcttccagaaaccttagagcagatgcagaaagtgaaatggttcagatctgggaaaaaaacaagagactcaatggagacagaagaaaatcccaaggttctaataactgcattctgaaaaaatatctaccccatttggtgaagtgaaaaacagaaaaataagaccctgtggagaaattcgttgttcccactgaaatggactgactgtaacgattgacaccaaaatgaaccttgctatcaagaaatgctcgtcatacagtaaactctggatgattcttccagataatgtccttgctttacaaaccaaccatttctagagagtctccttactcattaattcaatgaaatggattggtaagatgtcttgaaaacatgttagtcaaggactggtaaaatacatataaagattaacactcatttccaatcatacaaatactatccaaataaaaataacatcattgtattaacgcaaatattaggtgacaacaa

SEQ ID NO: 134682 - DNA, 1656 bp, Artificial Sequence
  derived and/or modified sequence
atgagagactacgacgaggtgatcgccttcctgggcgagtggggccccttccagagactgatcttcttcctgctgagcgccagcatcatccccaacggcttcaacggcatgagcgtggtgttcctggccggcacccccgagcacagatgcagagtgcccgacgccgccaacctgagcagcgcctggagaaacaacagcgtgcccctgagactgagagacggcagagaggtgccccacagctgcagcagatacagactggccaccatcgccaacttcagcgccctgggcctggagcccggcagagacgtggacctgggccagctggagcaggagagctgcctggacggctgggagttcagccaggacgtgtacctgagcaccgtggtgaccgagtggaacctggtgtgcgaggacaactggaaggtgcccctgaccaccagcctgttcttcgtgggcgtgctgctgggcagcttcgtgagcggccagctgagcgacagattcggcagaaagaacgtgctgttcgccaccatggccgtgcagaccggcttcagcttcctgcagatcttcagcatcagctgggagatgttcaccgtgctgttcgtgatcgtgggcatgggccagatcagcaactacgtggtggccttcatcctgggcaccgagatcctgggcaagagcgtgagaatcatcttcagcaccctgggcgtgtgcaccttcttcgccgtgggctacatgctgctgcccctgttcgcctacttcatcagagactggagaatgctgctgctggccctgaccgtgcccggcgtgctgtgcgtgcccctgtggtggttcatccccgagagccccagatggctgatcagccagagaagattcagagaggccgaggacatcatccagaaggccgccaagatgaacaacatcgccgtgcccgccgtgatcttcgacagcgtggaggagctgaaccccctgaagcagcagaaggccttcatcctggacctgttcagaaccagaaacatcgccatcatgaccatcatgagcctgctgctgtggatgctgaccagcgtgggctacttcgccctgagcctggacgcccccaacctgcacggcgacgcctacctgaactgcttcctgagcgccctgatcgagatccccgcctacatcaccgcctggctgctgctgagaaccctgcccagaagatacatcatcgccgccgtgctgttctggggcggcggcgtgctgctgttcatccagctggtgcccgtggactactacttcctgagcatcggcctggtgatgctgggcaagttcggcatcaccagcgccttcagcatgctgtacgtgttcaccgccgagctgtaccccaccctggtgagaaacatggccgtgggcgtgaccagcaccgccagcagagtgggcagcatcatcgccccctacttcgtgtacctgggcgcctacaacagaatgctgccctacatcgtgatgggcagcctgaccgtgctgatcggcatcctgaccctgttcttccccgagagcctgggcatgaccctgcccgagaccctggagcagatgcagaaggtgaagtggttcagaagcggcaagaagaccagagacagcatggagaccgaggagaaccccaaggtgctgatcaccgccttctag

SEQ ID NO: 134683 - protein, 557 aa, Artificial Sequence
  derived and/or modified sequence
MRDYDEVTAFLGEWGPFQRLIFFLLSASIIPNGFTGLSSVFLIATPEHRCRVPDAANLSSAWRNHTVPLRLRDGREVPHSCRRYRLATIANFSALGLEPGRDVDLGQLEQESCLDGWEFSQDVYLSTIVTEWNLVCEDDWKAPLTISLFFVGVLLGSFISGQLSDRFGRKNVLFVTMGMQTGFSFLQIFSKNFEMFVVLFVLVGMGQISNYVAAFVLGTEILGKSVRIIFSTLGVCIFYAFGYMVLPLFAYFIRDWRMLLVALTMPGVLCVALWWFIPESPRWLISQGRFEEAEVIIRKAAKANGIVVPSTIFDPSELQDLSSKKQQSHNILDLLRTWNIRMVTIMSIMLWMTISVGYFGLSLDTPNLHGDIFVNCFLSAMVEVPAYVLAWLLLQYLPRRYSMATALFLGGSVLLFMQLVPPDLYYLATVLVMVGKFGVTAAFSMVYVYTAELYPTVVRNMGVGVSSTASRLGSILSPYFVYLGAYDRFLPYILMGSLTILTAILTLFLPESFGTPLPDTIDQMLRVKGMKHRKTPSHTRMLKDGQERPTILKSTAF

SEQ ID NO: 134684 - DNA, 1674 bp, Artificial Sequence
  derived and/or modified sequence
atgagggattatgatgaggtcacagccttccttggggagtggggaccgttccagaggttgatcttcttcctcctctctgcctccatcattccaaacggttttaccggcctgtcttctgtgttcctgatcgcaaccccggaacaccggtgtcgcgtacctgatgctgcgaacctatcttcagcttggcggaaccataccgtccctcttagattgagggatggcagagaggtgccacactcctgtcgacgttaccgactggcaaccatcgccaatttcagtgcccttggcctcgaaccgggaagagacgttgacctgggacagctcgagcaggagtcctgccttgatggatgggaattctcacaggatgtctacctgagcacgatcgtgacggagtggaacctcgtgtgtgaggatgactggaaagcgccactcactataagtctgttcttcgtcggtgtactgctgggctccttcataagcggacagctctccgacagatttggcaggaaaaacgtgctctttgtcacgatgggaatgcaaaccggatttagctttctccagatattttcgaagaatttcgaaatgttcgtcgtgttattcgtgttggttgggatgggtcagataagcaattatgtagctgcctttgtactcggtactgaaatactgggaaaaagtgtgagaatcatttttagcaccctcggagtgtgtatcttttatgctttcggctacatggtgctgccactgtttgcttactttatccgggattggcgcatgttgcttgttgcgctgactatgcctggagttctttgcgtggccctgtggtggtttataccagaatctcctcgatggctcatatctcaaggtagatttgaagaggccgaggtaatcatacgcaaggccgctaaggcaaatggcatcgtcgtcccctccactattttcgatccaagtgaacttcaggacctctcatcaaaaaagcagcaatcccacaacattcttgacctgctcagaacctggaacatcagaatggtgacaatcatgagtatcatgctttggatgacaatatctgtgggctatttcggcctatcgctcgacacacccaatttgcacggcgacatctttgtcaactgtttcttgtctgccatggttgaggttccagcttatgtgctggcctggctgctactgcagtacctgcctagacggtatagtatggctacagctctcttcctgggggggagcgtgctcctatttatgcagctcgtcccaccagatctgtactacctggccacagtattagttatggtcgggaagttcggggtcaccgctgctttctcaatggtgtatgtttacacggctgagctgtatccaacggtggtccgcaatatgggcgtgggtgtcagctctacagcctcacgcttgggctcgatcctgtcaccctactttgtgtacctgggggcttacgatagatttctcccatacatcttgatggggagcttaacgattctcacggcaattttgacactgtttctgccagagagctttggcacccccctcccagatactatcgatcagatgctcagggtgaaaggtatgaagcacagaaaaacaccctcacataccagaatgctaaaggatggacaggagaggcctacaattctaaagagcacagccttctag

SEQ ID NO: 134685 - DNA, 1674 bp, Artificial Sequence
  derived and/or modified sequence
atgagggactatgatgaggtgacagccttcctgggggagtggggccccttccagaggctcatcttcttcctgctgagcgccagcatcatccccaacggcttcaccggcctgagctctgtgttcctgattgccaccccagagcaccgctgccgggtgcctgatgctgccaacctgagcagcgcctggaggaaccacacagtgcccctgcggctgagagatggccgggaggtgccccacagctgccgccgctaccgcctggccaccatcgccaacttcagcgccctgggcctggagcccggcagagatgtggacctgggccagctggagcaggagagctgcctggatggctgggagttcagccaggatgtgtacctgagcaccatcgtgacagagtggaacctggtgtgtgaagatgactggaaggcccccctgaccatcagcctcttctttgtgggcgtgctgctgggcagcttcatcagcggccagctgagtgacagatttggaaggaagaatgtgctgtttgtgaccatgggcatgcagacaggcttctccttcctgcagatcttcagcaagaactttgagatgtttgtggtgctgtttgtgctggtgggcatgggccagatcagcaactacgtggccgcctttgtgctgggcacagagatcctgggcaagtctgtgcgcatcatcttcagcaccctgggcgtgtgcatcttctacgccttcggctacatggtgctgcccctgtttgcctacttcatccgggactggaggatgctgctggtggccctgaccatgcctggggtgctgtgtgtggccctgtggtggttcatccctgagagcccccgctggctgatcagccagggccgctttgaggaggccgaggtgatcatcaggaaggccgccaaggccaacggcatcgtggtgcccagcaccatctttgaccccagcgagctgcaggacctgagcagcaagaagcagcagagccacaacatcctggacctgctgcggacctggaacatccgcatggtgaccatcatgagcatcatgctgtggatgaccatctctgtgggctacttcggcctgagcctggacacccccaacctgcatggagacatctttgtgaactgcttcctgagcgccatggtggaggtgcctgcctacgtgctggcctggctgctgctgcagtacctgccccggcgctacagcatggccacagccctcttcctgggcggctctgtgctgctcttcatgcagctggtgcccccagacctgtactacctggccaccgtgctggtgatggtgggcaagtttggagtgacagctgccttctccatggtgtatgtgtacacagctgagctgtaccccaccgtggtgaggaacatgggcgtgggcgtgagcagcacagccagccggctgggcagcatcctgagcccctactttgtgtacctgggcgcctatgaccgcttcctgccctacatcctgatgggcagcctgaccatcctgacagccatcctgaccctcttcctgcctgagagctttggcacccccctgcctgacaccatcgaccagatgctgcgggtgaagggcatgaagcacaggaagacccccagccacaccaggatgctgaaggatggccaggagcggcccaccatcctgaagagcacagccttctag

SEQ ID NO: 134686 - DNA, 1674 bp, Artificial Sequence
  derived and/or modified sequence
atgcgggactacgacgaggtgaccgccttcctgggcgagtggggcccatttcagcgattaatcttcttccttctgtcagcatctatcatccccaacgggttcactggattgtcaagtgtgttcctgatcgcaacacccgagcatcgctgccgggtcccggatgccgctaacctttcaagtgcctggaggaaccatacagtaccactgcgcttgagggacgggcgggaggtgccccacagctgtcggcgctacaggcttgccacaatagccaatttttccgccttgggcttagagcctggccgggacgtagatctgggccagttagagcaggagagttgcctcgatggctgggagtttagtcaagatgtctacttatcaaccatagtcacagagtggaatttggtctgcgaggatgattggaaggcccctcttaccattagcctgttctttgttggggttctcctcgggtccttcatctctggccagctgtctgatcgttttggtcggaaaaacgtactgttcgtgacaatgggaatgcaaacagggttctcgtttctgcaaatcttttcaaagaatttcgagatgtttgtggtattatttgtgctagtgggtatgggtcagatatctaactacgttgccgcattcgttttggggactgaaatcctgggcaagagtgtccgtattattttttccactctaggagtatgcatcttctacgctttcggatatatggtactgccgctgttcgcatactttattcgggactggaggatgctcttggtcgctcttaccatgccgggagtcctttgtgtggcactctggtggtttatccctgaatcccccaggtggctgatctcacagggccgctttgaagaggccgaggtgattattaggaaggctgccaaggccaatgggattgtggttccaagcacaatttttgacccatctgagttacaggatttgtctagtaagaagcagcagagccacaacatcctggacttgctccgcacatggaacattagaatggtcactataatgtccatcatgctgtggatgactattagcgtggggtactttggactgagcttagacactcccaacctccacggagacatttttgtgaattgcttcctgagtgcaatggtggaggtccctgcttacgttctggcgtggttacttctgcagtatcttcccagaagatactccatggccactgccctgtttctggggggatccgtgctcctttttatgcagctagtccctcctgacctctactacctcgccactgtgctggtaatggtgggtaagttcggcgtgactgcagccttttccatggtctatgtgtacactgctgagttgtaccctacggtcgttaggaatatgggcgttggcgtcagttcaacggcctcaagacttggcagcatcttaagcccctactttgtgtatctcggggcctacgatcgatttcttccttacatcttgatgggtagtttgaccattctgacagctatattaaccctgttcctgccagagtcgttcgggaccccactgccggacaccatcgaccagatgttacgcgtcaaaggcatgaaacaccgaaagaccccgagtcacacgcgaatgttgaaagatgggcaggaacgacccacaattctcaagtcaaccgcattttag

SEQ ID NO: 134687 - DNA, 1674 bp, Artificial Sequence
  derived and/or modified sequence
atgcgagactatgacgaagtgaccgccttccttggtgagtggggaccttttcagaggctgatttttttcctactatctgcatctataatccctaacgggtttacaggcctgtcgtccgtcttcttgatcgccaccccagaacaccgctgccgagtccccgacgctgccaatctgtccagtgcatggcggaatcatactgtgcctctgaggctgcgcgacggcagagaggtgccgcacagctgtcgcaggtataggcttgcaactatcgctaacttctctgctttaggtctggaacctggtagagatgtggatctaggacagctagaacaagagtcatgtctggacggctgggagttttcacaagatgtgtacctgtcaaccatcgttaccgagtggaatttggtttgtgaagacgattggaaagcgccactgaccattagtctgttctttgtcggggtactgctgggaagttttattagtggccagcttagcgaccgtttcgggagaaagaacgtgttgttcgtgaccatggggatgcagactggcttttctttcctccagattttctcgaaaaatttcgagatgttcgtggtgctgttcgtgcttgtcggaatgggccagatctccaattatgtggctgcctttgttcttggcaccgagatcctcggcaagtctgtgaggattatattttctactctcggtgtatgcattttttacgctttcggatatatggtcttgcccctctttgcctattttatcagagactggcggatgctgttggtcgccttgactatgcctggggtgctgtgtgtggctctttggtggttcataccggaatcaccccgatggctgattagccagggcagatttgaagaggctgaagtaattattaggaaggctgccaaagccaacggaattgtcgtcccttctactatattcgacccttccgaactacaggacctgtcctcaaagaaacagcagtcacacaatattctcgatctgttgcgtacctggaatatccgaatggtgaccatcatgtccatcatgttgtggatgactatcagcgtgggatattttgggttgagcttagatactcccaacttgcacggcgatatcttcgtgaattgtttcctatcagcgatggttgaggtgcccgcatatgttttagcctggttactcctgcagtacttgccgcgaaggtatagtatggccactgccctctttctggggggttctgtgctgttatttatgcagctagtcccgcctgatctttattatctcgcaacggttctcgtaatggtgggcaagtttggagtcaccgctgccttctccatggtgtacgtttacacggccgaattataccccacagtagtgcgcaatatgggcgtgggtgtatcttcgacagcttctcggttagggtctattctgtctccatacttcgtctacctgggtgcttatgatcgatttttgccttacattctgatggggtcactgaccatcctcactgcaattctgactctgttcctgccagagtcctttggtacccctttacccgatacaatcgatcaaatgcttcgcgtgaaggggatgaaacacagaaagacccccagtcacacgcgcatgcttaaggacggtcaggaaagaccaactatcctcaagagcacagcattctag

SEQ ID NO: 134688 - DNA, 3237 bp, Artificial Sequence
  derived and/or modified sequence
gcggcccaggcccgcaaccttccctggtcgtgcgccctatgtaaggccagccgcggcaggaccaaggcggcggtgtcagctcgcgagcctaccctccgcggacggtcttgggtcgcctgctgcctggcttgcctggtcggcggcgggtgccccgcgcgcacgcgcaaagcccgccgcgttccccgaccccaggccgcgctctgtgggcctctgagggcggcatgcgggactacgacgaggtgaccgccttcctgggcgagtgggggcccttccagcgcctcatcttcttcctgctcagcgccagcatcatccccaatggcttcaccggcctgtcctccgtgttcctgatagcgaccccggagcaccgctgccgggtgccggacgccgcgaacctgagcagcgcctggcgcaaccacactgtcccactgcggctgcgggacggccgcgaggtgccccacagctgccgccgctaccggctcgccaccatcgccaacttctcggcgcttgggctggagccggggcgcgacgtggacctggggcagctggagcaggagagctgtctggatggctgggagttcagtcaggacgtctacctgtccaccattgtgaccgagtggaacctggtgtgtgaggacgactggaaggccccactcacaatctccttgttcttcgtgggtgtgctgttgggctccttcatttcagggcagctgtcagacaggtttggccggaagaatgtgctgttcgtgaccatgggcatgcagacaggcttcagcttcctgcagatcttctcgaagaattttgagatgtttgtcgtgctgtttgtccttgtaggcatgggccagatctccaactatgtggcagcatttgtcctggggacagaaattcttggcaagtcagttcgtataatattctctacgttaggagtgtgcatattttatgcatttggctacatggtgctgccactgtttgcttacttcatccgagactggcggatgctgctggtggcgctgacgatgccgggggtgctatgcgtggcactctggtggttcatccctgagtccccccgatggctcatctctcagggacgatttgaagaggcagaggtgatcatccgcaaggctgccaaagccaatgggattgttgtgccttccactatctttgacccgagtgagttacaagacctaagttccaagaagcagcagtcccacaacattctggatctgcttcgaacctggaatatccggatggtcaccatcatgtccataatgctgtggatgaccatatcagtgggctattttgggctttcgcttgatactcctaacttgcatggggacatctttgtgaactgcttcctttcagcgatggttgaagtcccagcatatgtgttggcctggctgctgctgcaatatttgccccggcgctattccatggccactgccctcttcctgggtggcagtgtccttctcttcatgcagctggtacccccagacttgtattatttggctacagtcctggtgatggtgggcaagtttggagtcacggctgccttttccatggtctacgtgtacacagccgagctgtatcccacagtggtgagaaacatgggtgtgggagtcagctccacagcatcccgcctgggcagcatcctgtctccctacttcgtttaccttggtgcctacgaccgcttcctgccctacattctcatgggaagtctgaccatcctgacagccatcctcaccttgtttctcccagagagcttcggtaccccactcccagacaccattgaccagatgctaagagtcaaaggaatgaaacacagaaaaactccaagtcacacaaggatgttaaaagatggtcaagaaaggcccacaatccttaaaagcacagccttctaacatcgcttccagtaagggagaaactgaagaggaaagactgtcttgccagaaatggccagcttgtgcagactccgagtccttcagtgacaaaaggcctttgctgtttgtcctcttgacctgtgtctgacttgctcctggatgggcacccacactcagaggctacatatggccctagagcaccaccttcctctagggacactggggctacctacagacaacttcatctaagtcctaactattacaatgatggactcagcacctccaaagcagttaatttttcactagaaccagtgagatctggaggaatgtgagaagcatatgctaaatgtacattttaattttagactacttgaaaaggcccctaataaggctagaggtctaagtcccccacccctttccccactcccctctagtggtgaactttagaggaaaaggaagtaattgcacaaggagtttgattcttaccttttctcagttacagaggacattaactggatcattgcttccccagggcaggagagcgcagagctagggaaagtgaaaggtaatgaagatggagcagaatgagcagatgcagatcaccagcaaagtgcactgatgtgtgagctcttaagaccactcagcatgacgactgagtagacttgtttacatctgatcaaagcactgggcttgtccaggctcataataaatgctccattgaatctactattcttgttttccactgctgtggaaacctccttgctactatagcgtcttatgtatggtttaaaggaaatttatcaggtgagagagatgagcaacgttgtcttttctctcaaagctgtaatgtgggttttgttttattgtttatttgtttgttgttgtatccttttctccttgttatttgcccttcagaatgcacttgggaaaggctggttccttagcctcctggtttgtgtctttttttttttttttttaaaacagaatcactctggcaattgtctgcagctgccactggtgcaaggccttaccagccctagcctctagcacttctctaagtgccaaaaacagtgtcattgtgtgtgttcctttcttgatacttagtcatgggaggatattacaaaaaagaaatttaaattgtgttcatagtctttcagagtagctcactttagtcctgtaactttattgggtgatattttgtgttcagtgtaattgtcttctctttgctgattatgttaccatggtactcctaaagcatatgcctcacctggttaaaaaagaacaaacatgtttttgtgaaagctactgaagtgccttgggaaatgagaaagttttaataagtaaaatgattttttaaataaca

SEQ ID NO: 134689 - DNA, 1674 bp, Artificial Sequence
  derived and/or modified sequence
atgagagactacgacgaggtgaccgccttcctgggcgagtggggccccttccagagactgatcttcttcctgctgagcgccagcatcatccccaacggcttcaccggcctgagcagcgtgttcctgatcgccacccccgagcacagatgcagagtgcccgacgccgccaacctgagcagcgcctggagaaaccacaccgtgcccctgagactgagagacggcagagaggtgccccacagctgcagaagatacagactggccaccatcgccaacttcagcgccctgggcctggagcccggcagagacgtggacctgggccagctggagcaggagagctgcctggacggctgggagttcagccaggacgtgtacctgagcaccatcgtgaccgagtggaacctggtgtgcgaggacgactggaaggcccccctgaccatcagcctgttcttcgtgggcgtgctgctgggcagcttcatcagcggccagctgagcgacagattcggcagaaagaacgtgctgttcgtgaccatgggcatgcagaccggcttcagcttcctgcagatcttcagcaagaacttcgagatgttcgtggtgctgttcgtgctggtgggcatgggccagatcagcaactacgtggccgccttcgtgctgggcaccgagatcctgggcaagagcgtgagaatcatcttcagcaccctgggcgtgtgcatcttctacgccttcggctacatggtgctgcccctgttcgcctacttcatcagagactggagaatgctgctggtggccctgaccatgcccggcgtgctgtgcgtggccctgtggtggttcatccccgagagccccagatggctgatcagccagggcagattcgaggaggccgaggtgatcatcagaaaggccgccaaggccaacggcatcgtggtgcccagcaccatcttcgaccccagcgagctgcaggacctgagcagcaagaagcagcagagccacaacatcctggacctgctgagaacctggaacatcagaatggtgaccatcatgagcatcatgctgtggatgaccatcagcgtgggctacttcggcctgagcctggacacccccaacctgcacggcgacatcttcgtgaactgcttcctgagcgccatggtggaggtgcccgcctacgtgctggcctggctgctgctgcagtacctgcccagaagatacagcatggccaccgccctgttcctgggcggcagcgtgctgctgttcatgcagctggtgccccccgacctgtactacctggccaccgtgctggtgatggtgggcaagttcggcgtgaccgccgccttcagcatggtgtacgtgtacaccgccgagctgtaccccaccgtggtgagaaacatgggcgtgggcgtgagcagcaccgccagcagactgggcagcatcctgagcccctacttcgtgtacctgggcgcctacgacagattcctgccctacatcctgatgggcagcctgaccatcctgaccgccatcctgaccctgttcctgcccgagagcttcggcacccccctgcccgacaccatcgaccagatgctgagagtgaagggcatgaagcacagaaagacccccagccacaccagaatgctgaaggacggccaggagagacccaccatcctgaagagcaccgccttctag

SEQ ID NO: 134690 - protein, 1534 aa, Artificial Sequence
  derived and/or modified sequence
MALTPGWGSSAGPVRPELWLLLWAAAWRLGASACPALCTCTGTTVDCHGTGLQAIPKNIPRNTERLELNGNNITRIHKNDFAGLKQLRVLQLMENQIGAVERGAFDDMKELERLRLNRNQLHMLPELLFQNNQALSRLDLSENAIQAIPRKAFRGATDLKNLQLDKNQISCIEEGAFRALRGLEVLTLNNNNITTIPVSSFNHMPKLRTFRLHSNHLFCDCHLAWLSQWLRQRPTIGLFTQCSGPASLRGLNVAEVQKSEFSCSGQGEAGRVPTCTLSSGSCPAMCTCSNGIVDCRGKGLTAIPANLPETMTEIRLELNGIKSIPPGAFSPYRKLRRIDLSNNQIAEIAPDAFQGLRSLNSLVLYGNKITDLPRGVFGGLYTLQLLLLNANKINCIRPDAFQDLQNLSLLSLYDNKIQSLAKGTFTSLRAIQTLHLAQNPFICDCNLKWLADFLRTNPIETSGARCASPRRLANKRIGQIKSKKFRCSAKEQYFIPGTEDYQLNSECNSDVVCPHKCRCEANVVECSSLKLTKIPERIPQSTAELRLNNNEISILEATGMFKKLTHLKKINLSNNKVSEIEDGAFEGAASVSELHLTANQLESIRSGMFRGLDGLRTLMLRNNRISCIHNDSFTGLRNVRLLSLYDNQITTVSPGAFDTLQSLSTLNLLANPFNCNCQLAWLGGWLRKRKIVTGNPRCQNPDFLRQIPLQDVAFPDFRCEEGQEEGGCLPRPQCPQECACLDTVVRCSNKHLRALPKGIPKNVTELYLDGNQFTLVPGQLSTFKYLQLVDLSNNKISSLSNSSFTNMSQLTTLILSYNALQCIPPLAFQGLRSLRLLSLHGNDISTLQEGIFADVTSLSHLAIGANPLYCDCHLRWLSSWVKTGYKEPGIARCAGPQDMEGKLLLTTPAKKFECQGPPTLAVQAKCDLCLSSPCQNQGTCHNDPLEVYRCACPSGYKGRDCEVSLDSCSSGPCENGGTCHAQEGEDAPFTCSCPTGFEGPTCGVNTDDCVDHACANGGVCVDGVGNYTCQCPLQYEGKACEQLVDLCSPDLNPCQHEAQCVGTPDGPRCECMPGYAGDNCSENQDDCRDHRCQNGAQCMDEVNSYSCLCAEGYSGQLCEIPPHLPAPKSPCEGTECQNGANCVDQGNRPVCQCLPGFGGPECEKLLSVNFVDRDTYLQFTDLQNWPRANITLQVSTAEDNGILLYNGDNDHIAVELYQGHVRVSYDPGSYPSSAIYSAETINDGQFHTVELVAFDQMVNLSIDGGSPMTMDNFGKHYTLNSEAPLYVGGMPVDVNSAAFRLWQILNGTGFHGCIRNLYINNELQDFTKTQMKPGVVPGCEPCRKLYCLHGICQPNATPGPMCHCEAGWVGLHCDQPADGPCHGHKCVHGQCVPLDALSYSCQCQDGYSGALCNQAGALAEPCRGLQCLHGHCQASGTKGAHCVCDPGFSGELCEQESECRGDPVRDFHQVQRGYAICQTTRPLSWVECRGSCPGQGCCQGLRLKRRKFTFECSDGTSFAEEVEKPTKCGCALCA

SEQ ID NO: 134691 - protein, 782 aa, Artificial Sequence [sequence omitted]

SEQ ID NO: 134692 - protein, 409 aa, Artificial Sequence
  derived and/or modified sequence
MALTPGWGSSAGPVRPELWLLLWAAAWRLGASACPALCTCTGTTVDCHGTGLQAIPKNIPRNTERLELNGNNITRIHKNDFAGLKQLRVLQLMENQIGAVERGAFDDMKELERLRLNRNQLHMLPELLFQNNQALSRLDLSENAIQAIPRKAFRGATDLKNLQLDKNQISCIEEGAFRALRGLEVLTLNNNNITTIPVSSFNHMPKLRTFRLHSNHLFCDCHLAWLSQWLRQRPTIGLFTQCSGPASLRGLNVAEVQKSEFSCSGQGEAGRVPTCTLSSGSCPAMCTCSNGIVDCRGKGLTAIPANLPETMTEIRLELNGIKSIPPGAFSPYRKLRRIDLSNNQIAEIAPDAFQGLRSLNSLHTGPVTCPHTTGTHSSHCRAFAVAVPHSRNDLEAMFEEEVPRIFYSA

SEQ ID NO: 134693 - protein, 380 aa, Artificial Sequence
  derived and/or modified sequence
MALTPGWGSSAGPVRPELWLLLWAAAWRLGASACPALCTCTGTTVDCHGTGLQAIPKNIPRNTERLELNGNNITRIHKNDFAGLKQLRVLQLMENQIGAVERGAFDDMKELERLDLSENAIQAIPRKAFRGATDLKNLQLDKNQISCIEEGAFRALRGLEVLTLNNNNITTIPVSSFNHMPKLRTFRLHSNHLFCDCHLAWLSQWLRQRPTIGLFTQCSGPASLRGLNVAEVQKSEFSCSGQGEAGRVPTCTLSSGSCPAMCTCSNGIVDCRGKGLTAIPANLPETMTEIRLELNGIKSIPPGAFSPYRKLRRIDLSNNQIAEIAPDAFQGLRSLNSLVLYGNKITDLPRGVFGGLYTLQLLLLNANKINCIRPDAFQDL

SEQ ID NO: 134694 - protein, 815 aa, Artificial Sequence
  derived and/or modified sequence
MALTPGWGSSAGPVRPELWLLLWAAAWRLGASACPALCTCTGTTVDCHGTGLQAIPKNIPRNTERLELNGNNITRIHKNDFAGLKQLRVLQLMENQIGAVERGAFDDMKELERLRLNRNQLHMLPELLFQNNQALSRLDLSENAIQAIPRKAFRGATDLKNLQLDKNQISCIEEGAFRALRGLEVLTLNNNNITTIPVSSFNHMPKLRTFRLHSNHLFCDCHLAWLSQWLRQRPTIGLFTQCSGPASLRGLNVAEVQKSEFSCSGQGEAGRVPTCTLSSGSCPAMCTCSNGIVDCRGKGLTAIPANLPETMTEIRLELNGIKSIPPGAFSPYRKLRRICPLSFCSPCRDLSNNQIAEIAPDAFQGLRSLNSLVLYGNKITDLPRGVFGGLYTLQLLLLNANKINCIRPDAFQDLQNLSLLSLYDNKIQSLAKGTFTSLRAIQTLHLAQNPFICDCNLKWLADFLRTNPIETSGARCASPRRLANKRIGQIKSKKFRCSAKEQYFIPGTEDYQLNSECNSDVVCPHKCRCEANVVECSSLKLTKIPERIPQSTAELRLNNNEISILEATGMFKKLTHLKKINLSNNKVSEIEDGAFEGAASVSELHLTANQLESIRSGMFRGLDGLRTLMLRNNRISCIHNDSFTGLRNVRLLSLYDNQITTVSPGAFDTLQSLSTLNLLANPFNCNCQLAWLGGWLRKRKIVTGNPRCQNPDFLRQIPLQDVAFPDFRCEEGQEEGGCLPRPQCPQECACLDTVVRCSNKHLRALPKGIPKNVTELYLDGNQFTLVPGQLSTFKYLQLVILSYNALQCIPPLAFQ

SEQ ID NO: 134695 - protein, 1461 aa, Artificial Sequence
  derived and/or modified sequence
MALTPGWGSSAGPVRPELWLLLWAAAWRLGASACPALCTCTGTTVDCHGTGLQAIPKNIPRNTERLELNGNNITRIHKNDFAGLKQLRVLQLMENQIGAVERGAFDDMKELERLRLNRNQLHMLPELLFQNNQALSRLDLSENAIQAIPRKAFRGATDLKNLQLDKNQISCIEEGAFRALRGLEVLTLNNNNITTIPVSSFNHMPKLRTFRLHSNHLFCDCHLAWLSQWLRQRPTIGLFTQCSGPASLRGLNVAEVQKSEFSCSGQGEAGRVPTCTLSSGSCPAMCTCSNGIVDCRGKGLTAIPANLPETMTEIRLELNGIKSIPPGAFSPYRKLRRIDLSNNQIAEIAPDAFQGLRSLNSLVLYGNKITDLPRGVFGGLYTLQLLLLNANKINCIRPDAFQDLQNLSLLSLYDNKIQSLAKGTFTSLRAIQTLHLAQNPFICDCNLKWLADFLRTNPIETSGARCASPRRLANKRIGQIKSKKFRCSAKEQYFIPGTEDYQLNSECNSDVVCPHKCRCEANVVECSSLKLTKIPERIPQSTAELRLNNNEISILEATGMFKKLTHLKKINLSNNKVSEIEDGAFEGAASVSELHLTANQLESIRSGMFRGLDGLRTLMLRNNRISCIHNDSFTGLRNVRLLSLYDNQITTVSPGAFDTLQSLSTLNLLANPFNCNCQLAWLGGWLRKRKIVTGNPRCQNPDFLRQIPLQDVAFPDFRCEEGQEEGGCLPRPQCPQECACLDTVVRCSNKHLRALPKGIPKNVTELYLDGNQFTLVPGQLSTFKYLQLVDLSNNKISSLSNSSFTNMSQLTTLILSYNALQCIPPLAFQGLRSLRLLSLHGNDISTLQEGIFADVTSLSHLAIGANPLYCDCHLRWLSSWVKTGYKEPGIARCAGPQDMEGKLLLTTPAKKFECQGPPTLAVQAKCDLCLSSPCQNQGTCHNDPLEVYRCACPSGYKGRDCEVSLDSCSSGPCENGGTCHAQEGEDAPFTCSCPTGFEGPTCGVNTDDCVDHACANGGVCVDGVGNYTCQCPLQYEGKACEQLVDLCSPDLNPCQHEAQCVGTPDGPRCECMPGYAGDNCSENQDDCRDHRCQNGAQCMDEVNSYSCLCAEGYSGQLCEIPPHLPAPKSPCEGTECQNGANCVDQGNRPVCQCLPGFGGPECEKLLSVNFVDRDTYLQFTDLQNWPRANITLQVSTAEDNGILLYNGDNDHIAVELYQGHVRVSYDPGSYPSSAIYSAETINDGQFHTVELVAFDQMVNLSIDGGSPMTMDNFGKHYTLNSEAPLYVGGMPVDVNSAAFRLWQILNGTGFHGCIRNLYINNELQDFTKTQMKPGVVPGCEPCRKLYCLHGICQPNATPGPMCHCEAGWVGLHCDQPADGPCHGHKCVHGQCVPLDALSYSCQCQDGYSGALCNQSPSAGGTLSGTFTRSRGAMPSARPRAPCHGWSAGARAQARAAARAFG

SEQ ID NO: 134696 - DNA, 4605 bp, Artificial Sequence
  derived and/or modified sequence
atggccctgacacctggctggggctccagtgcaggtcccgtgaggcctgagctatggttactcctttgggcagccgcatggcgacttggtgccagcgcctgtcccgcactttgtacctgtaccggcactactgtcgactgtcatggcacaggccttcaagctatccctaagaatattcccaggaataccgaacgcttggagctcaatggtaataacattacaaggatccacaaaaatgacttcgctggcctgaaacagctgcgggtgctccagttgatggagaaccagatcggagccgtcgagaggggtgcttttgatgatatgaaagagcttgagcggctgcggcttaatagaaatcaactgcacatgcttcctgagttgctcttccagaataatcaggcactgtcacgactggatcttagtgagaacgccatacaggccattccccgaaaagcttttaggggcgcaaccgatttgaaaaatctgcagctggataaaaaccagatttcctgtatcgaggaaggtgcatttcgcgctctgagaggcctggaggtgctgactctgaacaacaataatatcaccaccatccctgttagttccttcaaccacatgccaaaattgcgtacattccgattgcattccaaccatcttttttgcgactgtcacctcgcctggctgtcccagtggctgagacaacggcctaccatcggtctctttacacagtgctctggtcctgcctctctgcgtggtctgaacgtcgctgaggtgcagaagagcgagttctcgtgctcaggtcagggggaagcagggagggtgcccacatgcaccctgtctagtggatcttgtcctgccatgtgtacgtgctcgaatggtattgttgactgtagaggcaaagggctgacagcaattcctgcaaacctcccagaaactatgactgaaatccgcctggagctaaatggaatcaagagcatacctccgggagcattctctccatataggaaactccgcagaatagacttgtcgaataatcagatagcagaaatcgcccctgacgcatttcagggcctgcggagtctgaacagcttagttctatacggtaacaaaataacagacctgcctcgcggagtttttgggggactgtacactctgcagctgctgctacttaacgcaaacaagattaactgtattcggccagatgcgttccaggatctgcagaacctctccctgctgtcgttatatgataacaagatccaatctctggctaaggggactttcactagtctgagagccattcagacactgcatttagcccagaatccttttatctgcgattgtaatttgaagtggttagcagactttttacgcaccaaccccattgaaacatcaggggcacgttgcgccagtcctcgacgtcttgccaacaagaggattggccagattaagtccaagaaatttcggtgctcagccaaagaacagtattttatccctgggacagaggattatcaactgaattccgaatgcaactctgacgttgtgtgtccccacaaatgccgctgcgaggctaacgtagtggagtgttcttccttaaagctgacaaagatcccagagcgcatacctcagtcgacagccgaactgcgactgaacaataatgagatttcgattctggaggcaactggaatgttcaaaaagctgacacacctgaaaaagattaatcttagtaataataaagtgtcagaaatcgaggacggtgctttcgaaggcgctgcctcggtcagtgagctccatttaaccgctaaccaactggagtccatcagatccggcatgttcagaggcctggatgggcttagaacactgatgctcaggaacaatagaatctcttgtatccacaacgactcgttcacggggttgcgcaatgtccgtcttctctccttatacgataatcaaataaccacggtgagccccggtgcatttgacacgctacagagtctgagcaccctgaatctgctagcaaatccctttaactgtaactgtcagttagcctggttgggcggttggttgagaaaacgcaaaatcgttaccggaaaccccagatgccagaacccggattttttgcgccagattccactgcaggatgtggcctttcctgacttcagatgcgaagaaggtcaggaagagggcggatgtctgccacggcctcaatgtccacaggagtgcgcctgtcttgatacagtcgtccgatgctctaacaaacacctccgcgcactcccaaagggtattccaaagaatgtgacagaactgtacctggacggaaaccagtttactttagttccaggacagctgtccacattcaagtatctgcagctagtggatctgtccaacaataagatctcctcactgagtaatagcagttttaccaatatgagtcaactgaccaccctgattctctcatataacgcgctacagtgtatacctcctttggccttccaaggactacgttcgctcaggctcttatccctgcacggcaatgatatctctactctgcaggaagggatctttgcagatgttactagcttgtcgcatctggccatcggagccaacccactgtactgtgattgtcacctgagatggctgtcttcatgggttaaaaccggttataaagaaccagggatcgcgagatgcgcaggaccccaggatatggagggtaagctgctactgactaccccagctaaaaagtttgaatgccagggccctcctactttggccgtgcaagccaagtgcgacctctgcctgtcctccccatgccagaaccagggcacctgccacaacgatcccctcgaggtgtatcgttgtgcctgccccagcgggtacaaaggcagagattgcgaagtatctttggattcctgcagttccggcccatgcgaaaacggtggcacctgtcatgcccaggagggggaggacgctccattcacgtgtagttgccccaccggatttgaaggcccaacatgcggtgtcaatacagacgactgcgtggatcatgcttgcgccaacgggggagtctgcgttgacggagtgggaaattacacatgtcagtgccccctgcagtacgagggcaaggcgtgcgaacagttagtggatctatgcagtcccgacctgaatccttgccagcatgaagcccaatgtgttggaaccccggacggccctcggtgtgagtgtatgcctggctatgccggagataactgttccgaaaaccaggatgactgccgggatcaccgctgtcagaacggagctcagtgtatggacgaagtgaacagctactcctgtctctgcgccgaagggtactctgggcaactgtgtgaaatacctcctcacttaccagctccgaagagcccctgcgagggcacagagtgccaaaacggcgctaactgtgtggatcaagggaaccggccagtctgccagtgtctaccaggcttcggtggtcccgagtgcgaaaagctgctatcagtaaactttgtcgaccgcgatacttatctgcagttcaccgatctgcagaattggccacgcgctaatatcaccctgcaggtgtctacggctgaagataacggaattctcctgtataacggcgataatgaccacatcgccgtcgagctgtaccagggacatgtgagggtgagctacgatccgggaagctatccaagtagtgctatatattctgccgaaaccatcaatgatggacagtttcacacagtcgaattggtggccttcgaccagatggttaacctcagcatcgacggcggtagtccaatgactatggacaattttggtaagcattacactttaaactcagaagccccactctatgtggggggtatgccagtggatgtcaacagcgctgcattccgattatggcaaatcctcaacggcacaggcttccatggctgcatccgcaatctctatattaacaacgagctgcaggatttcaccaaaacgcaaatgaagcctggtgtagtgcctggttgtgaaccctgtcgaaagctgtactgtctgcacggaatctgtcaacccaatgccacccccggacccatgtgccactgtgaggctggatgggtgggactacactgcgatcagccggcagacggcccttgtcacggccataagtgcgtgcacgggcagtgcgtgcccctcgacgcattgagttactcctgtcagtgtcaggatggctattcgggggcactgtgtaaccaggctggagctctggccgagccttgccgtggcctgcagtgcctgcacggacattgtcaagcttcggggaccaaaggggcacattgtgtatgcgacccaggattttctggcgagctgtgtgagcaagaaagcgagtgcagaggggaccccgtgcgtgattttcaccaggtgcaacgcggatatgccatttgccagacaacccgccctttatcctgggtggagtgcagagggagttgtcctggtcagggatgctgccagggacttaggctgaagcgtaggaaatttacattcgagtgttccgacggcacgagctttgccgaagaagtggaaaagcccactaaatgcggctgcgccttgtgcgcatag

SEQ ID NO: 134697 - DNA, 2349 bp, Artificial Sequence
  derived and/or modified sequence
ctgtggctgctgctgtgggccgcagcgtggagactgggggcaagcgcctgccctgccctgtgtacttgcaccggcacaactgtggactgtcacgggactggactccaggcaattccaaagaacatcccccgaaacactgagcggctggaactgaacgggaacaacatcacaagaattcacaagaacgatttcgctggcctgaaacaactacgggtactgcagcttatggaaaatcagatcggagctgtagagaggggcgcattcgatgacatgaaggaactcgaacggcttaggcttaatcgaaaccagctccacatgctgccagagttgttgttccagaataatcaggctctctctaggctggatctgtctgaaaacgcgatccaggcaattcccaggaaagcatttaggggtgctactgaccttaaaaatttgcaactggacaaaaatcagatttcctgcatcgaggaaggtgcattccgcgctctccgagggctggaagtgctgactcttaataataataatataacgacaatcccggtcagctcttttaaccacatgcccaaactgaggaccttccggcttcattcaaaccatctgttctgcgattgccacctcgcctggcttagtcagtggttaagacagcgacctaccatcggactcttcacccagtgttctggcccagcatccctgagagggttgaatgtggccgaagtgcaaaaaagtgagtttagttgctcagggcagggggaggctggacgagtccctacctgcactctgagttcaggcagttgcccagcaatgtgtacgtgttctaacggtatagttgattgtcgagggaaagggctgaccgccattcctgccaacctgcctgagactatgaccgagatccgtctcgaactcaacggaattaaatctataccaccgggagccttcagcccatacagaaaattgagacggatttgtcctctgtcgttttgctccccatgcagagatctgagcaacaatcagatcgccgagatcgcacctgacgcatttcaagggctccgatccctgaatagccttgtgctgtacgggaataaaatcacagaccttcccagaggcgtgtttggtggcttatacactttgcagttgttgttgcttaacgcgaataaaatcaattgcattagacccgacgctttccaggatctgcagaatctgtccctactgtcactttatgacaataagattcagtcgctggccaaggggacatttacctccttacgggcaatccagactctacatctggctcaaaatccctttatctgcgattgcaatctaaaatggctagctgacttcttgcgcaccaatccaattgaaacctcaggagcacgctgtgcctcccccaggcgcctggctaacaagcgaattggccaaatcaagtctaagaagtttcggtgctccgccaaggaacagtatttcattcccggaactgaagactatcaattgaactccgaatgtaactctgatgtggtttgcccacataagtgtagatgtgaggctaatgttgtcgagtgcagctcacttaaactaactaaaatcccagagcgaatcccacagtccaccgcggagttgaggttaaataacaacgaaatctcaatcctggaggctacaggaatgtttaaaaaactaactcacctgaagaagatcaacttatctaacaataaagtgagtgaaatcgaggatggggcttttgaaggagccgcatcggtgtctgagctccacctaacggctaatcagctggaaagtataaggagcggcatgttccgaggtttggacggtcttcgaactctaatgctgcgcaacaaccgcatatcatgcatacataacgatagcttcaccgggcttagaaacgtgcggctcctgagcctctacgacaatcagataacaacggtttcccccggtgccttcgacaccctccagtcactctcaactcttaatctccttgcgaatccttttaattgtaactgtcagctggcgtggctggggggttggctgcggaagaggaagattgtcacgggcaacccaagatgccaaaacccagatttcctgcggcagattccactgcaagacgttgcctttcctgactttcgttgtgaagagggacaggaggaagggggttgcctcccaagaccccagtgcccacaagaatgtgcctgcctggacaccgttgtgcggtgttcgaataagcacctgagggcactccccaaagggatccctaaaaacgtgaccgaactgtacctggatgggaaccaatttacactggtccccggtcagctcagcacttttaagtatctgcagctggtatag

SEQ ID NO: 134698 - DNA, 1230 bp, Artificial Sequence
  derived and/or modified sequence
atggctctgactccgggttggggatcttcggcaggcccagttagacccgaactgtggctactgctttgggccgcagcttggaggctgggcgcatctgcgtgtcctgccctttgtacgtgtaccggtactactgtggattgccacggtaccgggttgcaagcaatccccaagaacattccacggaacacagagagactcgaactcaacgggaacaacattacaagaatccacaaaaacgattttgccggactcaaacagctccgggtgctccagctcatggagaaccagattggggctgtggagcgaggagcctttgatgacatgaaggagctggaacggttaagactgaaccgaaaccagttgcacatgcttccagagctcctgtttcagaacaatcaggctttatcacgcctagacttgagtgagaatgccatacaggccattcctagaaaggcttttcgcggagctacggatctgaaaaacctccaacttgacaagaaccagattagctgcatagaggaaggggctttcagagctctacgtggcttggaggtcttaactctaaataataacaacatcacaactataccagtctcttcttttaaccacatgcccaagctacggacttttaggctgcattctaatcacttattttgtgattgtcacctggcttggttaagtcagtggctacgccaacggcctacaatcgggctctttacccagtgtagtggcccagcctccctgcgtggccttaatgtggccgaggtacagaagtcggaatttagctgctcaggacagggtgaagcgggacgggtcccaacgtgtaccctttcttctggaagttgccctgctatgtgtacctgtagcaacggaattgtcgactgcaggggaaagggactgacagccattccagccaatctccctgagaccatgactgagatcagacttgaactcaacgggatcaaatcaatacctccaggggcattttccccctaccgaaaactgcgcagaatcgacctgtcaaacaatcaaatcgccgaaatcgctccagacgccttccaagggttgaggtcactcaatagcttgcatacaggacccgtcacttgcccacatactactgggacacactcatcccactgccgcgcatttgctgtggcggtgccgcatagcagaaacgacctagaggctatgttcgaggaggaggtgccccgaatcttttactccgcatag

SEQ ID NO: 134699 - DNA, 1143 bp, Artificial Sequence
  derived and/or modified sequence
atggctttgacaccaggctggggttcttccgcaggccctgtgcggccagagctttggctgctcctgtgggcagccgcttggagattaggagcatccgcctgcccagccctctgcacatgcactggaaccaccgtggattgtcatggtacggggctccaggcaattccaaaaaatatccccagaaatactgaaagacttgaactgaatgggaacaatatcacccgaatccataagaatgattttgccggacttaagcaattacgcgtgctccagctcatggaaaaccaaatcggagccgtcgaacggggagcgtttgacgacatgaaggagctggaacgactcgatctcagtgaaaacgccatccaagccataccccgtaaggccttcagaggtgccactgatctaaagaacctgcagctggacaagaaccagatttcctgtatcgaggagggcgcttttagagctctgcgaggcttagaagtgctgacactgaacaataataacatcactactatccctgtgtctagttttaaccacatgcccaaactaaggaccttcagactgcacagtaaccacttgttctgtgattgccacctggcttggctttcacagtggctgcggcagcgacctaccattggactgtttacccagtgttccgggccagcatctcttagaggactgaacgtggccgaagtccagaagtccgagttcagctgctccggtcaaggcgaggcaggccgtgtgccaacatgcaccctctcaagcggcagttgtcctgccatgtgtacctgtagtaatggcatcgtggattgcaggggcaaggggctgaccgccataccagcgaacctccctgagactatgacagagatcaggctcgagttaaacgggattaagtcaatcccccctggcgctttttctccctatcgcaagctaaggagaattgatctgtctaacaaccaaattgcagaaatcgcccctgacgcctttcagggcctgaggtccttgaattctttggtcctctacggtaataagatcaccgacctgcccaggggagtctttggtggactatatactttacagctgctcctcctgaacgcaaataaaattaattgtatccgacccgatgcgtttcaggacctgtag

SEQ ID NO: 134700 - DNA, 2448 bp, Artificial Sequence
  derived and/or modified sequence
atggctctcacccccggatgggggtcaagcgccggaccggtccgacccgagctatggctcctcctctgggctgccgcttggaggctaggagcgtctgcctgtccggcattgtgcacctgtacaggcactacagtggactgccacgggacaggcctgcaggcaatccccaagaatatacctagaaacactgagcgcttagagctgaacggtaacaacatcacccgcatccacaagaatgacttcgctgggcttaaacagttgcgagtcttacagctgatggagaatcagatcggcgctgtggagcgaggggcattcgatgatatgaaagaattagagaggctccgcctaaacagaaaccagctgcatatgctgcccgaactgctcttccaaaacaatcaggccctgtctcggttggacctttccgaaaacgcgatccaggccattcccaggaaagcttttaggggagccactgatctaaagaacttgcaattggataaaaatcagatctcttgcattgaagaaggagcctttcgagccctgagagggctcgaagtgttgaccctgaataataataatattacaacaattccagtctcctcttttaaccacatgccgaaactgcgaacctttaggttacactccaaccacctcttttgcgactgccatctagcctggctctcccaatggctgcgacagaggccaactatcggtctctttactcagtgctccgggcctgcctctctacggggactgaatgtcgctgaagtccagaagtccgaattttcttgttcaggccaaggagaggcaggccgagtccccacctgtacattatccagcggaagctgtcccgctatgtgcacttgctcaaacggtatcgtcgactgccggggtaaaggactcacagcaataccagctaacctcccagagaccatgaccgaaatcagattagagttgaatggtattaagtctatcccccctggtgcttttagcccttatcgaaagctccgcagaatctgtccactcagcttctgtagcccatgcagagacctgagcaacaatcagatcgccgagatagcaccggatgccttccaggggttaagatcccttaattcactagtgctttacggaaacaaaattaccgacttgccacgaggagtttttggtgggctatatacactacagctcctcctcttgaatgcgaacaagattaactgcattaggcctgacgcattccaagatctgcagaacctgtcgttactgtcgttatatgataataaaatccaaagccttgcgaagggaacatttaccagtttgcgagccatccagactctgcacttagcacagaatcccttcatctgtgactgtaacctgaagtggctcgccgatttcctgcgaaccaatccaatcgagaccagtggcgctcggtgtgccagcccaaggagacttgccaataagcgaatcgggcagattaagtcaaaaaagttcagatgctctgccaaagagcaatatttcattcctggaactgaagactaccagctgaactccgagtgcaacagtgacgttgtttgcccccacaaatgcaggtgcgaagcaaatgtcgtagaatgctcgagcctcaagttaactaagattccagagagaattccccagtccacagccgagctacgcctaaataacaatgaaatatccattctggaggcaactggtatgtttaagaaattgacccacctgaaaaagattaacctaagtaacaacaaagttagcgaaatcgaagacggcgcttttgaaggggcagcctctgtgtcagagctccacctaaccgcaaaccagctcgagtcaatcagaagcggaatgttccgcggactggatggcctgcgaacactgatgctgcgcaacaaccggatatcatgtattcataacgacagtttcacaggccttcggaatgttcgcctgttaagtctgtatgataatcagatcaccaccgtttctcctggtgcctttgatacactgcagtctctttctactctgaacttactcgcaaacccttttaattgcaactgtcagttggcttggttaggaggctggctcaggaaaagaaaaattgtaacaggcaaccccagatgtcagaaccccgactttctgagacaaattcctctccaagacgtggcattccctgatttccgatgcgaggaagggcaggaggaaggaggctgtctgccaaggccccaatgtccacaggagtgcgcctgcctagataccgttgtgagatgttcaaataagcacctccgggctctacccaaaggcatcccaaaaaatgtgacagaactctacctggacggaaaccagttcacgctcgtgcccggacaactgagtacatttaagtatctacagctggttattctctcatacaacgcgctgcagtgcattccaccactggccttccaatag

SEQ ID NO: 134701 - DNA, 4386 bp, Artificial Sequence
  derived and/or modified sequence
atggccctgacaccgggttggggaagcagtgcaggtcctgtgcgtccagagttgtggctgctgctgtgggctgcggcttggcggctcggagcatccgcgtgtccagctctttgtacgtgtactggcactaccgtggactgtcacggaaccgggctgcaggccataccaaaaaatatccctcgaaatacagagcggctcgaactgaacggaaacaacatcactcgcatccataagaacgatttcgccggactgaaacagctgagagtgctgcagctaatggagaatcagatcggagctgtggagcggggagcctttgacgacatgaaggagctggagcgacttcggctgaatagaaaccaacttcatatgctgcccgagctacttttccaaaataaccaggccctgagcagactcgacctgagtgaaaacgcgatccaggctatccccaggaaggcatttcgaggcgctaccgatctgaaaaacctccagctcgataagaaccaaataagttgtatagaagaaggggcatttcgggctctccgaggtctggaagtgttaacgctgaataacaacaacattacaactatcccagtgtcctccttcaaccatatgccaaaattaaggacatttcgcctacacagcaatcacttgttctgcgactgtcatctcgcctggctcagtcaatggctgcgccagcgcccaactatcggactttttacccagtgttccggccctgcttcactgagggggctgaacgtggctgaagtgcagaagtctgagttctcctgctccgggcaaggggaggccggacgagtgccgacgtgtacactctcatccgggagttgtcctgcgatgtgcacctgctccaatgggatcgtggactgccgcggtaagggcctcaccgccattccagccaacctcccagagactatgaccgaaatccggctcgagctcaatggcattaagtccatcccgcctggggcatttagtccatatcggaaactgaggagaatcgacctgagtaataatcagatcgccgagatcgctcctgatgccttccaagggcttcgcagtctgaactccctggtcttgtacggtaataaaattacagacctccccagaggggtatttggcggactctataccctccagctgcttctcttgaacgctaacaaaattaactgtattaggcctgacgcctttcaggatttacaaaacctatccctgctatctctctatgacaacaagatccagtcacttgcaaaggggacctttacgtccctacgcgcaatccagacccttcacttagctcagaacccgttcatttgtgactgcaacttgaaatggctggcggattttctgcggacaaacccaattgagaccagtggagccaggtgcgcttctccacgtcggctggccaacaaacggataggccaaattaaatctaaaaaatttcgctgtagcgccaaagagcaatatttcattccgggaacagaggactatcagctaaactcggagtgtaatagcgacgtcgtatgtccacataaatgcaggtgtgaagctaatgtcgtggagtgctcttctttaaagctgacaaaaattcccgagcgcatcccccagagcacagctgagctgcgcttgaacaacaacgagattagcatactagaggcgacaggaatgtttaagaaattgactcacctaaaaaaaatcaacctgagtaacaacaaggtctctgagatcgaggatggggcttttgaaggagccgcatccgtaagcgagctgcatctcacagcaaaccagctggagagtattaggtccggaatgttccgtgggctggacggactcaggacactgatgctccgcaacaatcgcatctcatgtatccacaacgatagcttcactggcctaagaaatgttcgcttactcagtctatacgataatcagattactaccgtttcaccaggagccttcgataccctgcagtcgctctctaccttaaacttgctggctaacccttttaactgtaattgtcagctggcttggctcggtggatggctccgaaaacgcaaaatcgtgacaggcaatccccgatgtcagaatccagactttctccgacagattcccctgcaggacgtggcttttcccgacttccgctgtgaagagggccaagaagaagggggttgtctgcctcgtccacagtgcccacaagagtgtgcttgtcttgacaccgtcgtgcggtgcagcaacaagcatctccgggcattgccaaaagggatcccaaaaaatgtcactgaactctatctcgatgggaatcagtttacactggtgccgggtcagttgagcacctttaaatacctgcagttggtcgacctttcaaacaataagattagctcactgtccaattcatcttttactaatatgtctcagctgacgacacttatcctcagctataatgccctgcaatgtattcccccactcgcctttcaagggctccgaagtttgagactgctctcattgcacgggaatgatatttctaccctgcaggaaggcatcttcgctgatgttacttctcttagtcacctggccattggcgcaaacccactgtactgcgattgccatctgcgatggttgagtagctgggtcaagaccggatataaagagcctggcatcgccaggtgcgctggtccccaggatatggaaggaaagctgttgttaactactccggctaaaaagttcgagtgccagggccctccaactctggcagtgcaggccaagtgcgatttatgcctctcatctccgtgccaaaatcagggtacttgccataacgatccactggaggtgtataggtgcgcttgtccttccggatacaaaggtcgagattgcgaggtatctctggacagctgtagttcaggcccatgcgaaaatggagggacctgtcatgctcaagaaggcgaggacgcacccttcacttgctcctgccccacaggtttcgaaggcccaacgtgtggcgtgaatacggacgattgtgtcgaccacgcctgtgctaatgggggagtctgtgtagacggtgtggggaattatacatgccagtgtccactacaatacgagggaaaggcctgtgaacaactggtcgatctctgcagcccagacctgaacccttgtcagcacgaagcccaatgcgttggcactccggatggtcccagatgtgagtgcatgcctgggtacgccggagacaactgcagtgaaaatcaagatgattgtcgcgatcatcgatgccagaatggcgctcagtgtatggatgaggtcaactcttacagttgcctgtgtgccgagggctacagcggccagctttgcgaaattccccctcacctgccggcaccaaaaagcccgtgcgaagggacagagtgccagaatggggctaactgcgtcgatcagggcaatcgacccgtatgtcagtgcttgccaggatttggcggtccagagtgcgagaagctcctgagtgtgaatttcgtcgaccgtgatacttatctgcagttcacggacttgcagaattggcctagggctaatattaccctgcaagtctccaccgccgaggataacggaatcctgctctacaatggcgacaatgaccatatcgccgtcgaactttaccaaggacacgtacgggtgtcttacgaccccggttcctacccttcatctgcgatctacagtgccgagaccattaacgacggacagttccataccgtggaactggtcgcattcgaccagatggtcaacctgtcaatcgacgggggaagccctatgacaatggacaactttggaaaacactataccctgaattctgaagcccctctgtatgttggcggaatgccggttgacgtaaattccgccgcattccggttgtggcagatcttaaacggcaccgggtttcacggatgtatcagaaatctctacatcaataacgagctccaagatttcaccaaaacacaaatgaaacccggtgtagtgccagggtgtgagccctgtcgtaagttgtactgcctgcacggaatctgtcagcccaatgctactccaggacccatgtgtcactgcgaggctggttgggtggggttgcactgcgaccagccggctgatggaccatgccacggccacaagtgtgtgcacgggcagtgtgtgccacttgatgccctcagctattcttgccaatgccaggatggatacagtggcgctctctgcaaccaatcccccagcgccggtggaacacttagcggcacctttacccgctcccggggtgctatgccctccgccagaccacgcgcaccctgtcatggctggtctgcaggcgctcgcgctcaggccagagccgctgccagggccttcggatag

SEQ ID NO: 134702 - DNA, 1143 bp, Artificial Sequence
  derived and/or modified sequence
atggctctgacaccgggatggggatcatctgcaggcccagtaagacccgagctttggctgctgctgtgggccgctgcctggcgcttgggcgcatcagcatgccctgctctgtgcacatgtaccggcacgaccgtagattgccacggcacaggccttcaggccatccccaagaacataccgcgtaacaccgagcggctggaacttaacggcaacaacattaccagaattcacaaaaatgatttcgcagggcttaagcagttacgggtgctccagctcatggaaaatcaaatcggagcagtggagagaggcgcattcgatgacatgaaggaactggagcggctggatctgtccgagaatgccatccaagctataccgaggaaggccttccggggagccaccgatttaaaaaacctccagctagacaagaatcagattagctgtattgaagaaggagccttccgggctctgcgcggattggaggtgctgaccctcaataacaacaatatcaccacaatcccagtcagttcattcaaccatatgcccaagctgcggactttcaggctgcactccaatcacctcttttgtgattgccacctggcttggctgtcccagtggttgcgccagaggccaacgatcggtctgtttactcagtgctcaggacccgcatccctccgcggattgaatgtggccgaagtgcagaagtctgaattcagttgctctggtcagggagaagccggacgcgtccctacctgtaccctgtctagtgggtcatgccctgccatgtgcacctgcagcaatggcattgtggactgcaggggtaagggcctgactgccattcccgcaaacctcccagagaccatgaccgaaataagattagaactcaatgggattaagtccatcccacctggggcttttagtccatacagaaagttgcggaggatcgatctctccaataaccagatcgctgagatagccccagatgccttccaggggctgagatctctcaacagtttagtgctttatgggaacaagattaccgatcttcccaggggggtgtttggaggcctgtacaccctccagctcctactgctcaatgcaaacaaaattaattgcattcgaccggatgcctttcaggacttgtag

SEQ ID NO: 134703 - DNA, 4605 bp, Artificial Sequence
  derived and/or modified sequence
atggcgctcacccctggctggggctctagcgctggtcccgttaggcctgaactgtggctgcttttatgggcggctgcctggaggctgggcgcctcagcttgtcctgccttgtgtacatgtacaggaacaaccgttgactgtcacggcaccgggttgcaggctatccccaaaaatatcccacgcaacacagagaggttggaattgaacggcaataatatcactagaatccataaaaatgacttcgccggactcaagcagcttagagtcttacagcttatggagaatcagatcggggccgtggagagaggcgctttcgacgacatgaaggagctggaacgattacgtctgaatagaaaccagttgcacatgcttcccgaactgttgtttcagaataatcaggccctgtcccgacttgatttgtcagagaatgcgattcaggcaatccctcgaaaagccttcagaggagcgactgacctcaagaacctgcaactggacaagaaccagatcagctgcatcgaagaaggggcatttagggcattacggggactagaggtccttacactcaataataacaacataacaaccatccccgtgtcctccttcaaccatatgccaaaactgcgaacattcaggctccatagcaaccaccttttctgtgattgccacctggcctggctgagccagtggttgcgccagaggcctacaatcgggctgtttacgcagtgcagtggcccggcatcactgcgggggctaaacgtggcagaagtgcaaaagagcgagttctcctgttctggtcagggagaagcaggacgagtacccacctgcactctctcctctggcagctgcccggccatgtgcacatgctccaacggaattgtggattgccgaggcaaagggttgacagcaatacctgccaaccttcccgaaactatgacagagatacggctggaattaaatggcatcaaaagcatccctcctggagccttcagtccttatcgcaaacttcggaggattgatttatctaataatcaaattgccgaaatcgcacctgatgcatttcaggggctccggagcctcaatagcttggtgttgtatgggaataagatcaccgatctgccacgcggtgtcttcggggggctgtataccctgcagctgctccttctgaatgctaacaaaatcaattgtatacgcccagatgcatttcaggatctacaaaaccttagcctacttagcctctatgataacaaaatccagtctctcgctaaggggacttttaccagtctccgcgctattcaaacattgcacctcgcccagaatcctttcatctgtgactgtaacctaaaatggctcgccgattttctacgcacaaatcctattgagacaagtggcgcacgttgtgcaagccctagacgactggctaacaagcgcatcggccagatcaaatctaagaaatttaggtgttcagcaaaggagcaatattttattcccggaaccgaggactaccagctgaacagcgagtgcaactcagacgtggtctgcccacataaatgccggtgcgaagccaacgtcgtagagtgctcatctttgaaattaaccaagatccctgagcggattccccagtctacagcggagctgagactgaacaataacgaaattagtatactggaagccacaggtatgtttaaaaagctgacccacctgaagaagatcaacctgtcaaacaataaggtgtctgaaatcgaagatggagcctttgagggggcggcctccgtatctgagctgcatctcaccgccaaccagctagaaagcatccggtccgggatgttcagaggactggacggactccgcactctcatgctccgaaataatcggattagttgtatccacaatgatagctttactggtctccggaatgtcaggttgctgtccttgtacgataatcagattactacagttagcccaggagctttcgacacactacagtcgttgtctaccttgaatctgctggctaacccctttaactgtaattgccaactcgcctggctcggggggtggcttaggaagaggaaaattgttaccgggaaccctaggtgtcagaaccccgattttctgcggcaaattccactgcaggatgtcgcgtttcccgattttcgatgcgaggagggacaggaggagggcggctgcctgccccgtccacaatgtcctcaggaatgtgcctgcctggataccgttgtaaggtgctcaaacaaacatctgcgagccttgcccaagggtattccaaagaacgttaccgagttgtacctggatggtaatcagttcacattggtccctggacaattgtctacctttaaatatttacagctggtggatctcagtaataacaagatttcctccctctcaaattccagttttactaatatgtcacagcttacaaccctgatcttgagctataatgccctgcagtgcatcccacccttagcatttcaaggactgagatccctgcgcctgctgagcctccatggcaacgatatctctacacttcaggaaggcatctttgccgacgtgacctcactcagccatcttgctataggtgctaatcccttgtattgcgattgtcacttgcggtggctaagcagttgggtcaagacgggctataaagaacctggcatcgcccgatgtgccggccctcaggatatggagggcaaactgttattaactacgcctgctaagaagtttgaatgccaggggcccccaacacttgccgtgcaggccaaatgcgacctctgtctatcctcaccttgccaaaaccagggaacttgtcacaatgacccactggaagtctatagatgtgcctgcccaagtggctataaagggcgagattgcgaagtatctttagatagctgcagtagcggcccctgtgaaaacggcgggacctgtcatgcgcaggagggcgaggatgctccttttacttgttcatgccccactggatttgagggccctacctgcggtgtgaatacagatgactgtgtggaccacgcttgcgcaaatggcggagtttgtgtcgacggggtgggcaattacacttgtcaatgccccctccaatatgaaggcaaggcctgtgagcagctggtggacctgtgcagccctgacctaaatccttgccagcacgaggcacagtgtgttggaactcccgatggtccaagatgcgaatgcatgcccggctacgccggagataactgctcagaaaaccaggatgattgtcgggatcaccgatgtcaaaacggcgcccagtgtatggatgaagttaactcgtactcttgcctttgcgctgaggggtactctggccagctctgtgaaatcccccctcacttacctgcgcctaagtctccttgcgaagggaccgaatgtcaaaatggagccaactgtgtggaccaaggaaaccggcccgtatgccagtgtctccccggctttggcgggcccgagtgcgagaaactcctgtctgttaacttcgttgatagggatacatatcttcagttcactgacttgcagaactggccccgagcaaacatcaccctgcaggtgagtacagctgaggacaatggaatcttgctttataacggcgataacgatcacattgcggtggaactctaccaaggccatgtccgcgtaagttacgatccagggtcttaccctagcagtgcgatctactctgccgagacaattaacgacggtcagttccatacagtagagttggtcgcgttcgatcagatggtgaatcttagtatcgacgggggttctcctatgactatggacaatttcggaaaacactacaccttgaatagcgaagctcccctgtacgtgggcgggatgcccgttgatgttaactctgccgcctttcggctctggcagatccttaacgggaccggctttcacggctgtatccgcaacctgtacatcaacaacgaactgcaagattttacaaaaactcaaatgaagcctggagtggtgcctggctgtgagccttgccggaaactgtactgcctgcatggaatctgtcagccaaatgccacacccggaccaatgtgccactgcgaagctggctgggtgggcctccactgtgaccaacccgccgacggcccatgccacggtcacaaatgtgtacacggtcagtgcgtacctctcgatgccctttcatacagctgccagtgccaggacggttatagtggagccctgtgtaatcaggccggagcccttgctgaaccgtgcaggggccttcagtgcttacatggccattgtcaagcctcaggcaccaaaggggctcattgtgtctgcgacccgggtttttcaggcgagctctgtgaacaggagtccgaatgtcggggcgaccctgtgcgggattttcaccaagtgcaaagggggtatgccatatgccagactactagacctcttagttgggtggaatgtagaggtagctgtccaggtcagggatgctgtcaaggcttgcgtttgaagcggagaaagtttacgttcgagtgttccgatggcacctcattcgccgaagaggtagaaaaaccaaccaagtgtggctgtgccctttgtgcatag

SEQ ID NO: 134704 - DNA, 2349 bp, Artificial Sequence
  derived and/or modified sequence
ttatggctcctgttgtgggctgccgcctggaggctcggcgcctccgcctgtcctgctctttgcacatgtactggaaccactgtcgactgccacggaacaggactccaggctataccaaaaaatatccctcgtaacacggagcgacttgagctaaatggaaacaatatcaccagaatacacaaaaatgacttcgccggattaaaacagctccgggtccttcaactcatggaaaatcaaataggcgccgtggagagaggagctttcgatgatatgaaggagctcgagcggctgcgtctgaaccgcaaccagcttcacatgttgcccgaactgctgttccaaaataaccaagcactttcccgtctcgacctttccgagaatgccatccaggctattccaagaaaggcattcagaggtgctactgaccttaaaaatcttcagctggataaaaaccagatcagttgtattgaggaaggtgcttttcgggcccttcgcggattggaggtgcttacgttaaacaacaataacattaccacaattcctgtctccagcttcaatcacatgcccaaattgcgaaccttccggctgcactctaaccacctgttttgcgattgccatctggcctggctgagccagtggctgcgacaacgccctacgatcgggctgttcactcagtgttcaggacccgcatcattacgggggttaaatgtggccgaagtccagaagagtgagttctcatgtagcggacagggagaagctggaagagtaccgacgtgcaccctgtcttcaggctcatgtcctgcaatgtgcacatgtagtaacggtatcgtggactgtagaggtaaaggtcttacagcaatccccgctaatctacctgagacaatgactgagattagactggaacttaacgggatcaagtcaatcccgccgggggcattttcaccgtaccgtaaattgcggcggatttgtcccctaagcttctgtagcccttgtcgtgatctgtctaacaatcaaatcgccgaaatcgctccggacgcgtttcaaggtctccggtctctgaacagtctcgtgctgtatggaaataaaataaccgatcttccgcgaggtgtcttcggcggactgtacactctgcagctgctactgctcaacgccaataaaatcaactgcatccggcctgacgctttccaggacctgcaaaacctgtctctgctgtctctgtatgacaataaaattcagtccctggcaaagggcaccttcacctccctgagagcgattcagactctgcatttagcccagaatcccttcatctgcgactgcaatctcaaatggcttgccgatttcctccgaactaatcccattgaaacttccggagcacggtgtgcgagccctagacgactggccaataaaaggatcggccagattaagtctaaaaagttccggtgttctgctaaagaacagtactttattcccggtacagaagattatcagttgaatagtgagtgtaacagcgacgtagtgtgcccgcacaagtgtaggtgcgaagcaaacgttgtagagtgcagttccctaaagctgaccaagattcccgagcgcatccctcagtccaccgcagaacttcggctgaacaacaatgagatctcaattttggaggcaaccggcatgtttaaaaaactgacacacctcaagaaaatcaatctctccaataacaaagtgtcagaaatcgaggacggagcctttgaaggcgccgcttcagtgtctgaactgcacttgaccgctaaccaactagagtcaataaggtctggcatgttccgtggactcgatggcctgcgaaccctgatgcttcgcaacaaccgaataagctgcatccacaacgattctttcactggattacgcaatgttcggttgttatctctctatgataatcagatcacgaccgtgtccccaggtgcttttgacacactgcagagtctgtccactttgaacctcttggccaatcccttcaactgcaactgccagctggcctggctcggaggctggttacgaaagcgaaagattgtgactgggaaccctagatgccagaatcccgatttccttcgccaaatccccttgcaggatgtcgcatttccagattttcgttgcgaagaaggccaagaggagggaggctgcttgccccgcccacaatgtcctcaagaatgtgcttgtctagatactgttgtgcgatgtagtaacaaacatctgcgtgccttgcccaagggaattcctaagaacgtgaccgagctttacttagatggtaaccagttcactctcgtgcctgggcagctgagtacctttaaatatctgcagctggtatag

SEQ ID NO: 134705 - DNA, 1230 bp, Artificial Sequence
  derived and/or modified sequence
atggcattgactccaggatggggctctagcgcaggtccagttcggccagagctttggctactgctgtgggccgccgcgtggcgattaggtgccagtgcgtgtcctgccctatgcacctgcaccgggaccactgtggactgtcatggaactgggttgcaggccattccaaagaacatacctagaaacaccgagaggctcgaactgaacggtaacaatataacaaggattcataaaaatgatttcgccggcctgaagcaacttagagtgctgcagctcatggagaatcagattggcgctgtggagcggggcgccttcgacgatatgaaagagctggaacgccttcgtctgaatagaaatcagctgcatatgttgcccgagctgctatttcagaacaaccaagccttgagccgcctcgatctgtccgaaaacgccattcaggctatccctcgtaaagcatttaggggcgctaccgacctcaaaaatctccagctggacaagaaccagatttcgtgcatcgaggaaggggctttcagagccctgagagggctcgaagttttaacgcttaataacaacaatatcaccactattcctgtatcctccttcaaccacatgcctaagcttcgaactttcaggttgcactccaaccacctcttctgcgactgtcatctggcttggctttcccagtggttaaggcagcggccaactatcggcctgtttacccagtgcagtggccccgctagtctccggggtttgaatgttgctgaggtccagaagtccgaatttagttgctctggacaaggggaagctggacgcgtgcctacctgtaccctgtcatccggttcctgccctgccatgtgcacctgcagcaacgggatcgtcgattgtcgaggaaaaggtctcacagctatccccgccaacctccctgagactatgacagagatcaggctggaactgaacggcattaagtctatcccgccaggcgcctttagtccatatagaaagctccgccgcatcgacctgagtaacaatcagattgcggagatcgctcctgatgctttccagggtcttcgcagtctcaactccttgcataccgggcccgtcacatgcccacatacaacaggcacgcactccagtcactgcagagcgtttgctgtggccgtccctcactctcgcaatgatcttgaggctatgtttgaagaggaagtgcctcggattttctattcagcgtag

SEQ ID NO: 134706 - DNA, 1143 bp, Artificial Sequence
  derived and/or modified sequence
atggccttaactccaggatgggggtcaagcgctggacctgtgcggcctgagctctggcttctgctctgggcagcggcttggcggctgggcgcatctgcatgtcccgctctgtgcacatgcaccggcacgaccgtggactgccatggtaccgggctgcaagcgattcctaagaacattccgcggaacaccgagcgactggaattgaacgggaacaacatcacacggatacacaagaacgacttcgcggggctgaaacagttgagagtactgcagctgatggaaaatcagataggcgcagtagagagaggcgcatttgacgatatgaaggagttggagagactggacctgagcgaaaacgccattcaagctatacccagaaaagcctttcgcggcgcgacggacctgaaaaatttgcaactggataagaaccaaatctcttgcattgaagagggggcattccgagccttacgcggacttgaagtgctcacattgaataataacaatatcactaccatacctgtgtcctctttcaatcatatgccaaaactgaggacatttcggctgcacagcaaccacctcttctgcgattgtcacctcgcctggctatcacagtggctcagacagcgccccactataggattgtttacacaatgttctggccctgccagcctgagaggcctaaatgtggcggaggtgcagaaatccgaattctcttgctcaggacagggggaagctggccgggtgccgacctgtaccctctcttcaggaagctgtcccgctatgtgcacatgttctaatggtattgttgattgccgtggtaaaggactaaccgccatccccgctaacctcccggagacaatgaccgaaattaggcttgagctcaacgggatcaaatccatccccccaggcgcattctcaccctaccgtaaacttcgaaggattgacctgagcaacaatcagatcgccgaaattgcccctgacgcatttcagggattgaggtctctcaacagcttggtgctttatggcaacaaaattactgatttacccaggggcgtttttggtgggttatatacgttgcagcttttacttttaaacgcaaacaaaattaattgcatacgacctgatgctttccaggacctctag

SEQ ID NO: 134707 - DNA, 2448 bp, Artificial Sequence
  derived and/or modified sequence
atggcactcacacccgggtggggctcctccgccggacccgttcgcccagaactgtggctgcttttgtgggcagctgcctggcgccttggagcaagcgcctgccccgctctgtgtacttgcacagggaccacagtggactgtcatggcaccgggttgcaggctatccctaagaatatcccacgcaataccgaacgtctggaactgaatggaaataatattactcgcatccacaaaaatgatttcgctggccttaagcaactcagggtactacagctgatggaaaaccagatcggtgcagtggaacgaggcgccttcgatgatatgaaagaattggagcgactgcggctcaaccggaatcagctgcatatgcttcccgaactcctgttccaaaataatcaagccctgtctagactcgatcttagtgagaatgcaattcaggccataccacgcaaagcatttcgcggggcaactgatctcaagaatctgcagctagacaaaaaccagatcagttgcattgaagagggtgcatttagggctttgcgcgggctcgaggttctcacactaaataacaacaatatcaccaccatccctgtatcgtcctttaatcatatgcccaagcttagaacatttaggcttcatagcaaccacttattttgtgactgtcatctcgcatggctctcccagtggttgcggcaacggcccactatcggcttgttcactcaatgctctggcccagcttccctacgcgggctgaatgtagcggaggtgcagaagtcagagttctcatgctcaggccagggggaagcaggacgtgtgcccacctgtaccctctcatcagggtcctgtcctgcaatgtgcacctgcagcaatggaatcgtcgactgccgcgggaaaggactgaccgctattcctgcaaacctgccagaaactatgaccgagatccgactcgagctcaatggaattaagtctattccaccgggcgccttctccccctaccgcaaactgaggcgcatttgccctcttagcttctgcagtccatgcagggatctctcgaacaatcagatcgcagaaatcgcccccgacgcctttcaaggtctgagaagtctcaacagcttagttctgtacggcaacaagataaccgacctgcctagaggtgtattcggagggctgtatacactgcaacttctcctgcttaacgcaaacaaaattaactgtatcagacctgacgcatttcaagatctgcagaacttgtctctgctgtctctgtatgacaacaagatccagtccttagcgaaaggaacctttacttcactgcgggcgatccagactctccacctcgctcagaatcccttcatttgtgattgtaacctgaagtggctcgccgacttcctgaggacaaaccctattgaaacatcaggcgctaggtgtgcatctcccagacgactggccaacaagcgtatagggcagattaaatccaagaaattcaggtgcagtgctaaggagcaatatttcatcccagggaccgaagattatcaactgaacagtgaatgtaattccgatgtcgtgtgtcctcacaagtgcaggtgcgaagcaaacgttgttgagtgctcatctttaaaacttactaagatcccagaaaggatcccccagtccacggctgagctcaggctaaataataatgaaattagtatcctggaggccactggtatgttcaaaaagctcacgcatctgaaaaagataaatctgagcaataacaaagtgtcagaaatcgaagatggggcttttgaaggcgctgcctccgtgagcgagttacaccttactgctaaccaactagagtcaatcaggtccggaatgtttcggggccttgatggcttacgaactctaatgctgcgtaacaatcggatctcttgtatacacaacgatagttttactgggttacgtaacgtccggctcctgtccttgtacgacaatcagatcaccacagtaagccccggggccttcgatactcttcagagtctctccacgctgaacttactggcaaatccttttaactgcaattgccagcttgcatggctgggaggctggcttcgtaagagaaagattgtgacaggaaatccccgctgccagaaccctgacttcttgcgccagattcctctccaagacgtcgctttccctgactttcggtgtgaagaaggtcaggaagaaggaggttgtctcccccgcccccagtgtcctcaagagtgcgcctgtctggacactgtagtcagatgtagtaacaagcaccttagggccctgcccaagggcattccaaaaaatgtgaccgagttatatctggacggcaaccagtttacgctagttcctggtcaactgtcgacttttaagtacctgcagctagtaatcctctcctacaacgcactccagtgtattccgccgctggcttttcaatag

SEQ ID NO: 134708 - DNA, 4386 bp, Artificial Sequence
  derived and/or modified sequence
atggctttgacaccaggctggggatcaagcgcgggccccgttcgacccgagctttggttactgctgtgggctgccgcatggcgacttggagctagtgcttgtcctgcgctgtgcacatgtacagggactactgtggactgccacggcaccggactacaagcaattcctaagaatattcccaggaataccgagcgactcgaactaaacgggaataacataacccggattcacaagaatgattttgccggattaaagcagctccgcgtgcttcagcttatggagaatcagatcggagctgtggagcgcggcgcctttgatgacatgaaggaactcgaaagattgagactgaacaggaaccagctgcatatgctccctgagctcctgttccagaacaatcaagctcttagtcgactcgatttgagtgaaaacgcaatacaggctatccctcgcaaggccttccggggcgctactgatctgaagaacctgcagctcgataagaaccaaatatcatgcatcgaagagggagcattcagggccctgcggggcctcgaggtgctgacgctaaacaataataatattaccacaatccctgtgtcctcctttaaccacatgccgaagttacggacatttaggttgcattcgaatcacctcttctgcgactgtcacctggcctggttatcccagtggctgcgacagcgccccaccatcggactattcacccagtgctccgggcccgcctccctgcgcggcctgaacgtggccgaagttcaaaaatctgagttctcttgttctggacaaggcgaggctggaagagttcccacctgtactctttcctcagggagctgccccgccatgtgtacctgttcaaacggcattgtggattgtagaggaaaaggcctcaccgctatccccgccaacttgcccgaaactatgaccgagatccggctggagctgaacggcatcaagtctattcctccaggcgcgttttccccatatagaaaacttagaagaattgacctcagcaacaatcagattgccgaaatagcccctgacgcttttcaaggcctgagatccctgaactcactggttctttacggaaacaaaattaccgaccttcctagaggggtctttggcggcctgtacacccttcagctgctgttacttaacgcaaacaagatcaactgcatccgccctgatgcattccaggacttacagaatctttcacttttatctttgtacgacaataagatacagtccctggcgaaggggacctttacttcccttcgggcgatccagacactgcatctcgcccagaaccctttcatttgtgactgcaacctcaaatggttagctgattttcttcggacaaatcccattgaaacgagcggggcgcgctgtgcctccccgaggagactcgctaataagagaatcgggcaaataaagtcaaagaagtttagatgcagtgctaaggagcagtatttcattcccggcaccgaggattaccagcttaattccgagtgtaattcagacgtggtgtgtccacacaagtgtcggtgtgaggcaaatgttgttgaatgcagttccctgaaactgactaaaatcccggagcgaatcccgcaatcaaccgccgagctgaggcttaacaataacgagatatcaattctcgaagctaccggtatgttcaaaaaactgactcatctcaagaaaatcaacctgtcaaacaacaaggtctcagagattgaggatggagcatttgagggtgctgcatcagttagcgagcttcatttaacagcaaaccagttggaaagcattcgctccggcatgtttagaggtttggacgggctaaggacccttatgctgcggaataaccgtatctcttgtatacataatgattccttcacgggtcttagaaacgtccgcctcctgtctttatatgacaatcagattactacagtcagccccggcgcgtttgataccttacaatctctcagcaccctaaatttgctggccaaccccttcaattgtaactgccagctcgcatggttaggcgggtggctgcgcaaaagaaaaatagtcaccgggaacccgcgctgccagaaccctgattttttgcgccaaattccacttcaagacgttgcctttcctgacttccgatgcgaggagggacaggaggaaggggggtgcctacctcgccctcaatgccctcaggaatgcgcctgcctggacacagtcgtcagatgttccaacaaacacctaagagcacttcccaaaggcataccaaaaaatgtcactgaactatacctggacggaaatcagttcaccctcgttcccggtcagttgtctacattcaaatacttgcaactcgtcgacctgtccaataataaaatttctagtctgagcaattcaagcttcacaaatatgtctcagttgactacattaattttatcgtacaacgcgcttcagtgtatcccccctctggccttccaaggcttacgatccttgagactgctctccctccacggaaacgatatctctaccctgcaggaaggaatcttcgctgatgtcacgagcctttcacacctcgccataggtgccaatccactgtactgcgattgccatttgcggtggctttcgagctgggtgaagacgggttataaagagccgggtatcgcccgctgcgcaggaccacaagacatggaagggaaactcctgctcacaactcctgcaaaaaaattcgagtgccaaggcccacctacactggccgttcaagcaaaatgtgacctatgtttatcgtccccctgtcagaaccaaggcacttgccacaacgaccccttagaggtataccggtgcgcttgccctagcggctataaagggagagactgtgaggtttcgctcgacagttgtagctctggcccttgcgagaatggaggaacatgccacgcacaagaaggggaggatgccccgtttacgtgtagctgtcctacagggtttgaaggcccgacgtgtggcgtgaacaccgatgattgtgtagatcatgcctgtgccaacggtggggtatgtgttgacggagtcggcaattacacctgccagtgccctttgcagtacgagggcaaggcctgcgagcagcttgtggacctctgctcaccagatcttaacccatgtcagcatgaggcccaatgtgttgggactccagacgggcctaggtgtgagtgcatgccaggttatgccggcgacaattgctctgagaatcaggacgactgccgcgaccatcgttgccagaatggcgcacaatgtatggacgaggttaatagctacagctgcctgtgtgctgagggatactctggccagctctgtgaaattccaccgcatttgcctgccccgaagtccccctgcgaagggaccgaatgccagaatggggcgaattgtgtagaccaagggaataggcccgtgtgccagtgcctgccgggctttgggggtcccgagtgtgagaagttacttagcgtaaattttgtcgacagggacacttatctccaatttacagacctccaaaactggccgagggctaatattacactgcaagtgtccaccgctgaagacaacgggatcctcctttataacggcgataacgatcacatcgcagttgagctttaccagggccacgtgcgagtatcatacgaccctggctcgtacccctcttcagccatatatagcgcagagacgatcaatgacggacagtttcatacagtagagctggttgcctttgaccaaatggtcaatttgagcatagatggcgggagccccatgacaatggataattttggcaaacattatacacttaactcggaggcaccgctatatgtgggggggatgccggtcgatgtgaattccgctgcatttcgcctgtggcaaattttgaatggcacaggattccacggctgcataaggaatctttacatcaacaacgaattacaggacttcacaaagacccagatgaagcccggggtggttcctggctgcgagccatgccgaaagttgtactgcctccacgggatttgccaaccaaacgcaacacctggaccaatgtgccactgtgaagctggttgggtgggccttcattgtgaccagccggcagatgggccttgccatggtcacaagtgtgtgcacggacagtgcgtgccactcgatgccttgtcctacagttgccagtgccaggacggctactctggcgccttgtgcaaccagtctccttcggcgggcggcacactctctgggacgttcacgcgatcccggggggccatgccatccgctcgaccacgtgccccttgccacggctggagcgccggagcccgagctcaggcccgcgcagccgcccgggcttttggatag

SEQ ID NO: 134709 - DNA, 1143 bp, Artificial Sequence
  derived and/or modified sequence
atggctctgacgccaggatggggatcctccgccggtccagtccgccccgagctgtggctgctactttgggccgccgcttggcgtctcggcgcaagtgcctgtccagctctttgcacatgtacagggactaccgtcgattgtcacgggacaggcctccaggcaatacctaaaaacattcctaggaacactgagagactggagctgaatggcaacaacattaccagaatccataaaaacgatttcgcagggcttaaacagctccgcgtcttacaactgatggagaaccaaatcggagcagtagaacgcggagctttcgacgatatgaaagaactcgaacggttagacctctccgagaatgcaatccaagcaatacccaggaaggcttttcgtggggcgaccgatctcaagaacttacagctagacaaaaatcaaatcagctgtattgaggaaggcgcctttcgagccttaagaggccttgaagtcctgacactgaacaataacaacatcacgacaatcccagtatctagcttcaatcacatgccaaagcttcgaaccttcagactccacagcaaccacctgttttgtgactgccatctcgcatggctttcgcagtggcttcgtcagaggcctactatcggactatttacccaatgttccggccccgcaagtctcaggggacttaatgtcgcagaagtacagaaatcagagtttagctgctcaggacagggcgaagcagggcgcgtccccacatgcaccctgtcctccggttcctgccctgctatgtgtacgtgctctaacggcattgtggactgtcgaggcaaaggactcacagctataccagctaacttacctgaaaccatgactgaaatcagactggaactcaatggaatcaagagcattccacctggcgcattctcaccgtataggaagctgaggcgcatagacctgtctaacaaccagatcgcagagattgcccccgatgcctttcagggcttaaggtcattaaactctttggtactttacggtaataagattaccgatctgcccaggggcgtgtttggcggactgtatactctgcagctcctactgcttaatgctaacaagattaactgtataagaccggatgccttccaagatctgtag

SEQ ID NO: 134710 - DNA, 4605 bp, Artificial Sequence
  derived and/or modified sequence
atggccctaactccaggatggggatcaagcgcgggccccgtgcgtcctgaactctggctactgctgtgggccgccgcgtggcggttaggcgcgtccgcttgtccagctctgtgtacctgtaccggcactaccgtggattgtcacgggaccggtctacaggcaattcctaaaaatattcctcggaacaccgagcgtcttgaattgaacggaaacaacatcaccaggatccataagaacgatttcgctggtctgaaacagctccgagtgctgcaactgatggaaaatcaaattggcgctgtcgaacgcggagcttttgacgacatgaaggaacttgagagacttcggctaaaccggaatcaactgcatatgctgcccgagctgctcttccaaaataaccaagctctgtcccgtctggaccttagcgaaaatgcaatccaggcaatacctcggaaggcctttagaggcgcaaccgacctgaagaatctccagctggacaagaaccagatctcttgcattgaagaaggggcatttagagcgctgcggggtctggaagttctgaccttaaataataataacattaccacaattcctgtctctagcttcaatcatatgcctaaactccgtactttcagattacactccaatcatctcttctgcgattgccatttagcctggctgtcacagtggttaagacagcgccccactatcggcctcttcacacagtgttccggtcctgcttcacttaggggactgaatgtcgccgaagtgcaaaagtctgaattcagctgctccgggcagggggaagccggtcgcgttcccacttgcaccctctcttccggatcatgccctgcaatgtgtacctgcagcaacggtattgtggactgccgggggaaaggcctgactgccatcccagccaacttaccagagactatgacggaaatccgacttgagctgaatggaattaaatcaatccctcccggggcctttagcccttacagaaaattacgaagaattgatcttagcaacaaccagatagcagaaatcgcccccgacgctttccagggcctgcggtcactaaatagcctggttctgtacgggaacaagatcacagacttgccaaggggtgtctttggcggcttatacaccttacaactcctcttactaaatgctaacaagatcaactgtataaggccagacgcctttcaggatctacaaaaccttagcctacttagcctctatgataacaaaatccagtctctcgctaaggggacttttaccagtctccgcgctattcaaacattgcacctcgcccagaatcctttcatctgtgactgtaacctaaaatggctcgccgattttctacgcacaaatcctattgagacaagtggcgcacgttgtgcaagccctagacgactggctaacaagcgcatcggccagatcaaatctaagaaatttaggtgttcagcaaaggagcaatattttattcccggaaccgaggactaccaactcaacagcgagtgtaattctgacgtcgtgtgtccccacaaatgcagatgcgaagctaatgtggtggagtgttccagtctgaaactgaccaaaatcccagagagaattccacagtccacagcagaactccggctgaataataatgaaatatcaatcctagaagccaccggtatgtttaaaaagttaacacatttgaaaaagatcaacctgtctaacaacaaagtctctgaaattgaagacggagcgttcgagggggccgcgtccgttagcgaactgcacctgacggcaaatcaactggaaagcattagaagcggtatgttccggggattggatggactgaggaccctgatgctgcggaacaatcggatctcttgtatacataacgattctttcaccggcctaaggaacgttaggttactgagcctgtacgataaccagatcacaacagtaagtccaggagcatttgacacactgcagagcttgtccacccttaacctgttagctaacccatttaactgtaactgccaacttgcatggctgggcggatggctgagaaagagaaagattgtcacgggtaatccaagatgtcaaaaccccgattttctccgccagatccccctgcaagatgtggcctttcccgactttcgttgcgaggaaggacaggaggaagggggttgtctccccagaccacaatgcccacaggagtgtgcctgcctagacaccgtggtgcggtgcagtaacaaacaccttcgtgccttgcccaaaggaatacctaagaacgtaacagagctctacctagatgggaatcagtttaccttagtgcccggacaattgtcaacgttcaagtacttacaattagttgacctgtcgaataacaaaattagctcactatccaattcttcctttacaaatatgtcccagctcacaactctgattttaagttataatgcacttcagtgtattccccctctcgcgtttcagggccttaggtcactccgactcttaagcctgcacgggaatgacataagcacacttcaggaaggcatcttcgcagacgtgacctccctctctcacctggctatcggcgccaatcccctgtactgcgactgtcatctacggtggctatccagctgggtaaaaacaggatataaggaacccggtattgctcggtgcgctggccctcaggatatggagggcaaactgttattaactacgcctgctaagaagtttgaatgccaggggcccccaacacttgccgtgcaggccaaatgcgacctctgtctatcctcaccttgccaaaaccagggaacttgtcacaatgacccactggaagtctatagatgtgcctgcccaagtggctataaagggcgagattgcgaagtatctttagatagctgcagtagcggcccctgtgaaaacggcgggacctgtcatgcgcaggagggcgaggatgctccttttacttgttcatgccccactggatttgagggccctacttgcggagtaaacacagacgactgcgtcgatcacgcctgtgccaacggtggcgtatgtgtcgatggcgtcggcaactacacttgtcaatgccctttacaatacgaaggcaaggcctgtgaacagttggtcgacttatgctcgcctgatctgaacccctgtcagcatgaagcgcagtgtgttggcaccccagacggcccccgatgtgaatgcatgcctggatatgcgggggataattgttcagaaaaccaagatgactgcagagaccacagatgtcaaaatggagcccaatgtatggacgaagtgaattcatactcttgtctgtgcgccgaaggctactccggacagctttgcgaaatcccccctcatctgcccgccccaaaatctccatgcgaaggtacggaatgccaaaacggcgcgaactgcgttgaccagggcaatcgcccagtctgccagtgcttgcctggattcggcggtcctgagtgtgaaaaactgctatcagtcaattttgtggacagagacacctatctgcaattcacggacctgcagaactggccccgggcgaacataacccttcaggtctccactgccgaggataatggaatcctgttatataatggtgataacgatcatatcgcagtggaactttaccaaggtcacgtcagagtgtcatatgatcccggctcctacccttctagtgctatttactctgcagagacaataaacgacgggcaattccataccgttgagctcgtggctttcgatcaaatggttaacctttccattgacggggggtcccctatgaccatggacaattttgggaagcattacactctcaacagcgaggcaccactctacgtcggtggaatgccagtggacgtgaactccgccgcctttagactatggcaaattctgaacggcactggatttcatgggtgcatacgaaatttatacattaataacgaactacaagactttaccaaaacccagatgaagccaggagtggtgcccggttgcgaaccgtgccgtaagctatactgtttgcacggtatttgtcaacctaacgctaccccaggcccaatgtgccactgcgaagccgggtgggttggcctccattgcgatcagccagcagatggcccatgtcacggccataagtgtgtccacggccagtgtgtcccattagacgccctgtcatactcctgccagtgtcaagacggatacagcggggctctctgtaaccaagctggcgctcttgccgaaccttgtagaggccttcagtgcctgcacggacactgccaggccagcggaacgaagggcgcccactgtgtgtgcgatccaggcttctccggagaactctgtgagcaggagagcgagtgtcgcggagacccagtgcgggactttcatcaggtgcaacggggctacgcaatatgccagacaacaagaccattatcatgggtggaatgtagggggtcgtgtccagggcagggctgttgccagggattgcgtttgaagcggagaaagtttacgttcgagtgttccgatggcacctcattcgccgaagaggtagaaaaaccaaccaagtgtggctgtgccctttgtgcatag

SEQ ID NO: 134711 - DNA, 2349 bp, Artificial Sequence
  derived and/or modified sequence
ctttggctactcctgtgggctgccgcctggaggttgggtgctagcgcatgcccagcgttgtgcacatgcactgggaccacggtcgattgccacggtactggtttacaggctatccccaaaaatatcccaaggaacaccgagagacttgaattaaatggaaacaatatcaccaggatccataaaaatgattttgctggcttgaagcagttgagggtgctgcaacttatggaaaatcagattggcgccgtcgagaggggagcttttgatgacatgaaagagctcgagagattgcgattgaaccgaaatcaacttcacatgctcccagaattactattccagaataaccaagccttgagccgcctagatctttctgaaaacgccattcaggcgattcctcgcaaggcctttcgtggcgctacagatttaaagaaccttcagcttgataaaaaccaaatctcctgtattgaagaaggtgcgttcagggccctacgagggttggaggtactcacccttaataacaacaatatcacgactatcccggtttctagcttcaatcacatgcccaagctgcgcacgtttcgccttcatagcaaccacttgttctgcgattgccatctggcttggttgtcacagtggttgaggcaacgccctacaattgggttgttcactcaatgcagcggcccagcttcacttcgaggtctaaatgtggcagaagtgcagaaatcggaattcagttgtagtggacagggcgaagcaggaagagtgccaacatgcacgctgagctctggctcatgccccgctatgtgtacttgttccaacggaatcgttgattgcagaggaaaaggcttgaccgccattcccgcaaatcttcccgagacaatgacagagatcaggcttgaactcaacggcataaaatctatccctcccggagcattcagtccctacaggaaacttcgaaggatttgccccctgagtttctgctcgccttgtcgtgatctctccaacaaccaaatcgcagaaattgcacccgacgccttccagggcttacgctctttgaattccctggttttgtatggcaataagatcaccgatcttccccgcggagtcttcggcggcctatacacactgcaactccttctgctcaacgcaaataagattaactgcattcgaccagatgcttttcaagacctgcagaatctttctttactgtcactgtatgataacaaaattcaatcccttgctaagggcacatttaccagcttacgcgcaattcaaaccctgcacctcgcacagaatccattcatttgtgactgcaatctcaagtggttggctgacttcctgcgtacgaatcctattgaaactagtggtgctcgctgcgcctcccctcggcgactcgccaataaaagaataggccagattaagagtaaaaagttccgctgctcagcaaaagaacagtactttattccgggaaccgaagactaccagctgaatagcgagtgcaatagtgatgtcgtatgcccgcataagtgtcggtgcgaagccaatgtggtggagtgctcttctttaaagctcaccaagattccagaacgcataccccagtccacagccgagctcagactcaataacaacgaaatctccattttggaggccaccggaatgtttaagaaattgacgcacctgaagaaaatcaatttgtctaacaacaaagtatcggagattgaagatggagcattcgaaggagccgcttcagtcagcgaattacacctcaccgccaaccaactggagtcgattagaagcggaatgtttcgcggtctggatggcctcagaactttaatgcttagaaataaccgaatctcatgtattcacaacgatagctttaccggtctgagaaacgtgaggttattatcactctatgacaatcagataacaactgttagccccggcgcattcgatacgctgcaatccctctctaccctcaacttgctggccaatccattcaattgcaattgccaattagcatggctcggcggatggttaagaaaacggaagattgtaacagggaacccgaggtgtcagaatccggactttctcaggcaaatccccctgcaggacgtcgcttttccagactttagatgtgaggagggccaggaagagggtggttgcttacctaggccacaatgtccacaggaatgtgcatgtctggacaccgttgtgcgctgctctaacaagcatcttagggcccttccaaaaggcataccaaagaacgtaactgagttgtatttagacggcaatcagttcactctggtccccggccagctttcaactttcaaatacctacaactggtgtag

SEQ ID NO: 134712 - DNA, 1230 bp, Artificial Sequence
  derived and/or modified sequence
atggcactgacccccggctggggatcctctgcgggtcccgtccggcctgaactttggttgctgttgtgggccgccgcttggagattaggtgcatctgcttgccccgccctgtgtacttgtaccggcaccactgtagactgccacggcactggccttcaggcgatccctaaaaacatcccgcgcaatacggaaagattggaactcaacggtaataacatcacaaggatccataagaatgacttcgctggactcaagcagctcagggttctgcagttaatggaaaaccaaatcggggccgtggaacggggcgcattcgacgacatgaaggaacttgaacgattaagattaaaccgcaaccagctgcatatgctaccagaactgctctttcagaacaaccaagcccttagccggttagatctgtccgagaacgcaatccaggctataccgcgaaaggctttcaggggcgccaccgaccttaaaaatctgcagctggacaagaatcagatttcctgtattgaggaaggcgcatttagagcactcagggggctggaggtgctaactctcaacaacaacaatatcacaactattcctgtgtctagttttaatcacatgcctaagctcaggacttttagacttcacagcaatcatctattctgcgactgtcacctggcttggctctcccagtggcttcggcagaggcccactattggtcttttcacacagtgctcaggccccgccagtcttagaggcttaaatgttgccgaggtgcagaagtcagaattcagttgttccggtcagggcgaagcaggacgggtgcccacctgtaccctaagctccggatcctgtcccgccatgtgtacatgttccaacggtattgtggattgtcgaggaaagggactgacagctattcccgccaaccttcccgagaccatgacagagataagattggagttaaatggaatcaaaagcattcctccaggtgcattctcaccctaccggaaactgcggagaatcgacctgagcaataaccagatcgctgaaatcgctcccgacgcattccagggacttaggagcttaaattctctgcacactggccctgtgacatgtccacatacaaccggcacacattcttctcactgtagagcatttgccgtcgcagtaccacacagtaggaacgacctcgaggctatgtttgaagaggaggtcccacgcatcttttattcagcttag

SEQ ID NO: 134713 - DNA, 1143 bp, Artificial Sequence
  derived and/or modified sequence
atggcattaacacctggatgggggtcaagtgcaggccctgttcgccctgagctgtggttattgctgtgggccgctgcttggcgcctgggtgcatcagcatgtcccgcactttgcacgtgtaccggcaccacggtagattgccacggtaccggtctgcaggccatccctaaaaacatccccaggaacaccgaacggctggagctcaacggaaataacattacacggatacataaaaacgactttgccggattaaaacaactaagggtgcttcagcttatggagaatcaaatcggggctgtggagagaggcgcgttcgacgatatgaaagagctcgagcgcctggacctaagtgagaatgccattcaagccatcccccggaaagcatttagaggcgcaaccgacctgaagaatttacagttagacaaaaatcaaatctcatgcatcgaggagggcgcatttcgagccctgcggggacttgaggtgctgaccctgaataataataatatcactacaatccccgttagttccttcaaccacatgccgaaactgaggacatttcgcctgcactccaatcacctattctgcgactgtcacttggcttggctatcacagtggctcagacagcgccccactataggattgtttacacaatgttctggccctgccagcctgagaggcctaaatgtggcggaggtgcagaaatccgaattctcttgctcaggacagggggaagctggccgggtgccgacctgtaccctctcttcaggaagctgtcccgctatgtgcacatgttctaatggtattgttgattgccgtggtaaaggactaaccgccatccccgctaacctcccggagacaatgaccgaaattaggcttgagctcaacgggatcaaatccatccccccaggcgctttcagcccctaccgaaaattgaggcgtattgatctgagtaacaaccaaatcgccgaaattgcccccgatgccttccaaggacttcgatctctgaattctcttgtgttgtacggtaataaaattaccgatctgccaagaggggtttttggcggcctctacaccttgcagctccttctcctgaatgccaacaaaatcaactgcatacgaccagatgcctttcaagacctctag

SEQ ID NO: 134714 - DNA, 2448 bp, Artificial Sequence
  derived and/or modified sequence
atggccctgacacctggctggggaagctcagcagggcccgtgaggccagaactgtggctattgctttgggccgctgcgtggcgattgggcgcaagcgcatgccccgcactttgtacttgcacagggactactgttgattgtcacgggaccggactccaagcaatccccaaaaatatcccacgtaataccgaaaggcttgagctcaatggaaacaatatcactcgcatacacaaaaacgacttcgccggcctgaaacaattaagggtcctgcagttgatggagaaccaaattggcgctgtagaacgtggtgccttcgacgatatgaaagaacttgaacgactgcgactcaaccgaaatcagctccacatgttacccgaactgctgttccagaataaccaggcactcagccgtctagacctatctgagaacgctatccaggccataccacgcaaagcattccggggggcgacagacctgaaaaatctccaattggacaagaatcagattagctgtatcgaggagggcgctttcagggccctcaggggcttggaggttttaaccctaaataataacaacatcactacaatccctgtgagctcattcaaccacatgccgaagctgcgcacttttagattacactccaaccacctgttctgcgactgtcacctcgcctggctttcacaatggttacgacagcggcctacaatcggtctatttactcagtgtagtggccctgcttcactaaggggcctgaatgtcgccgaggtacagaagtctgaattctcctgttctggacagggcgaagcgggccgtgttccaacttgcactctatcatccggaagctgccccgccatgtgcacatgcagcaatggaatagtcgactgcagggggaagggtctgactgcaattcctgccaatttgccagaaactatgaccgaaattcgccttgagctgaatgggattaaatcgatccctcctggtgcattttctccttaccgcaaactccgaagaatctgccccctttcgttttgcagcccttgtcgtgacttgtcgaataaccaaatagctgagattgctcccgatgcctttcaaggcctgcgcagcctcaattccctcgtgctctacggaaacaaaataaccgatctcccgcgcggagtgttcgggggcctgtacacgcttcagttgctgttgttgaatgcaaacaagataaattgcatacgccccgacgctttccaggatttgcaaaacctctctctcttatctctgtacgataataagattcagtccctggcaaagggaaccttcacttctctaagagccattcagaccctccatcttgcccagaacccatttatctgcgactgtaacctgaagtggttggctgactttctcaggacaaatcctatcgagacttccggagctagatgtgcatccccacgacgcctcgccaataaaagaatagggcagattaagtccaaaaagtttcgctgttctgcaaaagaacaatatttcatcccgggcaccgaggattaccaactgaattctgaatgtaactctgacgtcgtgtgcccccataaatgccgttgtgaagccaatgtggtagaatgcagcagcctcaaactgacaaaaatacccgagagaatcccccagagtactgctgaattgagactaaataacaacgagatttcaattctcgaagctaccggcatgtttaaaaaactaacgcatctgaagaagatcaacctatcaaataacaaagtcagtgaaatcgaggacggagccttcgaaggggccgccagcgtgagcgaactacacctgactgcaaatcagctagagagtataagaagcggcatgttccgcggactcgacggccttcgtacgctcatgctgcggaataacaggatatcatgtatccataatgattcatttacggggctcaggaatgtgcgcctgctgagcctttacgacaatcagattactaccgtgtctcccggagcttttgatacactgcaatccctttcaacattgaatctgcttgcgaatccctttaattgtaactgccaacttgcttggttaggaggctggttgagaaagcgcaaaatcgttacgggaaatccaaggtgccagaaccctgactttctgcgacagattccgttacaggacgtggcattccccgatttcaggtgcgaagaaggtcaagaggaggggggttgcttaccgcggccacagtgtccacaggagtgtgcatgcctagacaccgttgttcgttgctctaataaacacctgagggccttgcctaaggggatccctaaaaacgttaccgagctctatttagatggcaatcagtttacattggtccccggacagttgtctacttttaaatatctccaactggttattctcagttacaacgctttgcaatgtatcccacctctagctttccagtag

SEQ ID NO: 134715 - DNA, 4386 bp, Artificial Sequence
  derived and/or modified sequence
atggccttgacacctgggtggggaagtagtgccggccccgtgcgacctgaattgtggctactactgtgggctgctgcctggagattgggcgcatctgcatgtccagccctctgcacatgcaccgggacaaccgttgactgccacgggacgggcttgcaggccatcccaaagaatattccaagaaacacagaaaggctcgagctgaacggcaacaatattactcggatccataagaatgatttcgccggacttaagcaactgagagtgctccagctcatggaaaaccaaattggagcggtggaaaggggcgcttttgacgatatgaaggaattagagagactcagactgaacagaaatcaactgcatatgctcccagagctgttgtttcaaaacaatcaggccttgtctcgattagacttatctgagaacgctatccaggccattccacgcaaggcgtttcgtggtgccaccgaccttaagaacctgcagttagacaagaaccaaatatcgtgcattgaggagggcgctttccgcgcgttgagggggctagaggtgttaaccctcaataacaacaatattacaactattcccgtttcctcctttaatcacatgccaaagctgcgtaccttcagactacattccaaccacctgttttgtgactgccatcttgcatggctgtcccagtggcttagacaacggcctacaatcggcttattcacacagtgttccggcccggcatctcttcggggtcttaacgtcgcagaagtacagaaaagcgaattttcctgcagcgggcagggcgaggctggcagagttcctacctgcacactcagctctgggtcttgtcccgctatgtgcacgtgtagcaacgggatcgttgattgcagaggaaagggcttaacagcaatcccagctaatcttccagaaactatgaccgagatccgtcttgaactgaacgggattaagtccatccccccaggcgccttcagcccataccgcaaacttagaagaattgatctgtccaacaaccagattgccgagatcgcccctgatgcctttcaaggtctgcgctctttgaacagcctcgtcttgtacggcaacaaaataacagatcttccacgcggcgtattcggcggcttgtataccctacaactgttactgctgaacgctaataaaatcaactgtatccgcccggatgcttttcaggacctgcaaaacctctccctactcagcttgtacgacaataaaatccagagccttgctaaagggaccttcactagtctcagagctattcaaacactgcatctggcccaaaacccattcatctgtgactgtaacttgaagtggctcgccgactttctgagaaccaacccaatagaaacatcaggcgcacgctgtgcatcccccaggagacttgccaacaaaaggattggccagattaagtctaaaaaatttcgttgctctgcaaaagagcaatactttataccaggtacagaggactatcagttaaatagcgagtgcaactcagacgtggtgtgcccccataagtgtagatgtgaggccaacgttgtagaatgctcctctctaaagctcacaaagataccggagcggatacctcaaagtactgctgagctgcggctgaataataacgagataagtatacttgaagccaccgggatgtttaaaaagctgacccacctgaagaaaataaatttatccaataacaaagtctccgaaatagaagatggcgcttttgaaggcgcagcctccgtaagtgaactgcatctcaccgccaatcagctagaaagcataagatcaggtatgtttagaggcctggatggactacgaaccctcatgttaaggaacaatagaatatcttgtattcataacgattcgtttacgggccttagaaatgtcaggctcctctccctgtacgacaatcagatcaccaccgtgtcacctggcgcttttgacaccttgcagtcccttagtaccttgaacctgctcgcaaacccatttaattgcaattgtcagctcgcatggctgggaggatggcttcgcaaacgcaagatagtgaccgggaatccacgctgccagaatcctgattttttgcgccaaattccacttcaagacgttgcctttcctgacttccgatgcgaggagggacaggaggaaggggggtgcctacctcgccctcaatgccctcaggaatgcgcctgcctggacacagtcgtcagatgttccaacaaacacctaagagcacttcccaaaggcataccaaaaaatgtcactgaactatacctggacggaaatcagttcaccctcgttcccggtcagttgtctacattcaaatacttgcaactcgtcgacctgtccaataataaaatttctagtctgagcaattcttcctttacaaatatgagccagctgacaacccttatccttagttacaacgcactgcagtgtatcccaccattagcgttccagggcctgaggtctctccgcctgctctccctgcacgggaacgatatctccaccttgcaagaaggaatttttgctgatgttacaagcctatcccatttggccattggcgccaaccctttatattgtgactgtcatcttaggtggctgtcctcctgggttaagaccggctataaagagccaggcatcgccaggtgtgcgggtcctcaagacatggaagggaaactcctgctcacaactcctgcaaaaaaattcgagtgccaaggcccacctacactggccgttcaagcaaaatgtgacctatgtttatcgtccccctgtcagaaccaaggcacttgccacaacgaccccttagaggtataccggtgcgcttgccctagcggctataaagggagagactgtgaggtttcgctcgacagttgtagctctggcccttgcgagaatggaggaacatgccacgcacaagaaggggaggatgccccgtttacgtgtagctgtcctacagggtttgaaggcccgacatgcggtgtgaacaccgatgactgcgtggatcatgcatgtgcaaacggcggcgtctgcgtggatggggtgggaaattacacatgtcagtgtcccttgcaatatgaaggcaaagcatgcgaacaactggtagatctgtgttctcccgatctaaacccttgccagcatgaggctcagtgtgtgggaacccctgatggaccaagatgcgaatgtatgccaggatacgcaggagacaattgcagcgagaaccaggacgactgcagggaccaccgttgccagaatggagctcagtgcatggatgaagtaaattcgtactcctgtctctgcgcagagggatatagcggccagttatgcgagatcccaccacacctccccgcaccaaaaagcccatgcgagggcaccgaatgtcaaaacggcgctaattgcgttgatcagggtaaccgcccagtctgtcaatgcctgcccgggtttggaggaccagaatgcgagaaactcctctctgttaatttcgttgatcgagacacctatctacagtttaccgaccttcaaaattggccccgcgctaacattactcttcaggtgtctaccgccgaagacaatggcatattactatacaatggagataatgatcacattgccgtcgaactataccaaggacacgttagagttagctatgatcccggttcctatccctccagtgcaatatattcagccgagactattaatgacggtcagtttcacacagttgagctggtggcctttgatcaaatggtgaatttgagtatagacggcggcagtccgatgaccatggacaacttcggcaaacattatacactgaactctgaagcacccctgtacgttggaggaatgcctgtagatgttaacagcgcagcctttcgtttgtggcaaatactgaacggtacaggatttcacgggtgtatcagaaacttatatataaacaacgagctgcaggatttcaccaaaacgcagatgaaaccaggagtcgtgccgggatgtgaaccgtgcagaaagctgtactgcctgcatggcatctgtcaaccaaacgccacaccgggccccatgtgccactgcgaagccgggtgggtgggactacattgcgatcaacctgctgatggcccttgccacggtcacaaatgcgtacacggccagtgcgtccctctggacgctttgagttatagctgtcaatgtcaagacgggtattctggtgcactgtgcaatcagtccccatctgcaggcggcactctgagcggtactttcacaagatcaaggggagctatgccaagcgcacgtcctagggcaccctgtcatggatggtccgccggcgcccgagcgcaggctcgtgccgccgctagagctttcgggtag

SEQ ID NO: 134716 - DNA, 1220 bp, Artificial Sequence
  derived and/or modified sequence
cacctggaggcggccccggacggggatggtcagcggctgctgccgtctggctcgcgagcgggacgctgtgagggcaccatggcgctgactcccgggtgggggtcctcggcggggccggtccggccggagctctggctgctgctgtgggcagccgcgtggcgcctgggtgcctcggcgtgccccgccctctgcacctgcaccggaaccacggtggactgccacggcacggggctgcaggccattcccaagaatatacctcggaacaccgagcgcctggaactcaatggcaacaacatcactcggatccataagaatgactttgcggggctcaagcagctgcgggtgctgcagctgatggagaaccagattggagcagtggaacgtggtgcttttgatgacatgaaggagctggagcggctggacttgagtgagaacgccatccaggccatccccaggaaagcttttcggggagctacggaccttaaaaatttacagctggacaagaaccagatcagctgcattgaggaaggggccttccgtgctctgcgggggctggaggtgctgaccctgaacaacaacaatatcaccaccatccccgtgtccagcttcaaccatatgcccaagctacggaccttccgcctgcactccaaccacctgttttgcgactgccacctggcctggctctcgcagtggctgaggcagcggccaaccatcgggctcttcacccagtgctcgggcccagccagcctgcgtggcctcaatgtggcagaggtccagaagagtgagttcagctgctcaggccagggagaagcggggcgcgtgcccacctgcaccctgtcctccggctcctgcccggccatgtgcacctgcagcaatggcatcgtggactgtcgtggaaaaggcctcactgccatcccggccaacctgcccgagaccatgacggagatacgcctggagctgaacggcatcaagtccatccctcctggagccttctcaccctacagaaagctacggaggatagacctgagcaacaatcagatcgctgagattgcacccgacgccttccagggcctccgctccctgaactcgctggtcctctatggaaacaagatcacagacctcccccgtggtgtgtttggaggcctatacaccctacagctcctgctcctgaatgccaacaagatcaactgcatccggcccgatgccttccaggacctgca

SEQ ID NO: 134717 - DNA, 1143 bp, Artificial Sequence
  derived and/or modified sequence
atggccctcactcccggctggggaagtagcgccggccccgttcgccctgagctgtggttgctcctgtgggctgctgcctggaggctgggagccagtgcatgcccagcactgtgcacttgcaccggcactaccgtcgattgccatggaacgggcttacaagctatccctaaaaacataccaagaaacaccgagcgactagaactgaatggtaataatatcaccaggatccataagaatgatttcgccgggctaaagcaactccgagtattgcagctgatggaaaatcagattggcgcggttgaaagaggcgcatttgatgatatgaaagaactcgagcgtttagacctgagcgagaatgcaatccaggccatccccaggaaggcttttagaggggcaaccgacctgaaaaatcttcaacttgacaagaaccaaatcagttgtatcgaagaaggggcgttccgggctctgcgaggactggaggtactgactcttaacaacaataatatcacaactataccagtttcttcgtttaaccacatgcccaaactgcgtaccttccgacttcactccaatcatctcttctgtgattgtcacctcgcctggttatcacagtggctccgtcaacgaccaaccattggcctttttacacagtgctctggacccgccagtctgcgagggctcaatgttgccgaggtgcagaaatccgaattctcttgtagcgggcaaggggaggccggtcgcgtccccacttgtactttgtctagtggatcatgtccagccatgtgcacatgtagcaacgggatcgtcgattgtcggggaaaaggactgactgctattccagctaatctgcccgagaccatgacggaaatccggcttgaactgaacggcatcaagagtatccctcctggggctttttcaccataccggaagctgcgaagaatagatctctcaaataaccagatcgctgagatcgcccctgacgcattccaaggactgagatctttgaattctttggtcctgtacggaaataaaattaccgacttgcctagaggggtttttggtggcctttatacactgcaactgctgttacttaacgccaataagatcaattgtatacgcccagacgctttccaagacctgtag

SEQ ID NO: 134718 - DNA, 7925 bp, Artificial Sequence
  derived and/or modified sequence
gggagacgcaggcggcgaaacggcagaggagccgagccccctccgcccaaggcgccctccctccgtccgcgcacaggcgccgtcgcttggaggagcaaggtgcctcccagcccgcaggggcgccgcgcgcaagcccgcgggctcttcggtggctctgccccgggactgcacctggaggcggccccggacggggatggtcagcggctgctgccgtctggctcgcgagcgggacgctgtgagggcaccatggcgctgactcccgggtgggggtcctcggcggggccggtccggccggagctctggctgctgctgtgggcagccgcgtggcgcctgggtgcctcggcgtgccccgccctctgcacctgcaccggaaccacggtggactgccacggcacggggctgcaggccattcccaagaatatacctcggaacaccgagcgcctggaactcaatggcaacaacatcactcggatccataagaatgactttgcggggctcaagcagctgcgggtgctgcagctgatggagaaccagattggagcagtggaacgtggtgcttttgatgacatgaaggagctggagcggctgcgactgaaccgaaaccagctgcacatgttaccggaactgctgttccagaacaaccaggctttgtcaagactggacttgagtgagaacgccatccaggccatccccaggaaagcttttcggggagctacggaccttaaaaatttacagctggacaagaaccagatcagctgcattgaggaaggggccttccgtgctctgcgggggctggaggtgctgaccctgaacaacaacaatatcaccaccatccccgtgtccagcttcaaccatatgcccaagctacggaccttccgcctgcactccaaccacctgttttgcgactgccacctggcctggctctcgcagtggctgaggcagcggccaaccatcgggctcttcacccagtgctcgggcccagccagcctgcgtggcctcaatgtggcagaggtccagaagagtgagttcagctgctcaggccagggagaagcggggcgcgtgcccacctgcaccctgtcctccggctcctgcccggccatgtgcacctgcagcaatggcatcgtggactgtcgtggaaaaggcctcactgccatcccggccaacctgcccgagaccatgacggagatacgcctggagctgaacggcatcaagtccatccctcctggagccttctcaccctacagaaagctacggaggatagacctgagcaacaatcagatcgctgagattgcacccgacgccttccagggcctccgctccctgaactcgctggtcctctatggaaacaagatcacagacctcccccgtggtgtgtttggaggcctatacaccctacagctcctgctcctgaatgccaacaagatcaactgcatccggcccgatgccttccaggacctgcagaacctctcactgctctccctgtatgacaacaagatccagagcctcgccaagggcactttcacctccctgcgggccatccagactctgcacctggcgcagaaccctttcatttgcgactgtaacctcaagtggctggcagacttcctgcgcaccaatcccatcgagacgagtggtgcccgctgtgccagtccccggcgcctcgccaacaagcgcatcgggcagatcaagagcaagaagttccggtgctcagccaaagagcagtacttcattccaggcacggaggattaccagctgaacagcgagtgcaacagcgacgtggtctgtccccacaagtgccgctgtgaggccaacgtggtggagtgctccagcctgaagctcaccaagatccctgagcgcatcccccagtccacggcagaactgcgattgaataacaatgagatttccatcctggaggccactgggatgtttaaaaaacttacacatctgaagaaaatcaatctgagcaacaacaaggtgtcagaaattgaagatggggccttcgagggcgcagcctctgtgagcgagctgcacctaactgccaaccagctggagtccatccggagcggcatgttccggggtctggatggcttgaggaccctaatgctgcggaacaaccgcatcagctgcatccacaacgacagcttcacgggcctgcgcaacgtccggctcctctcgctctacgacaaccagatcaccaccgtatccccaggagccttcgacaccctccagtccctctccacactgaatctcctggccaaccctttcaactgcaactgccagctggcctggctaggaggctggctacggaagcgcaagatcgtgacggggaacccgcgatgccagaaccctgactttttgcggcagattcccctgcaggacgtggccttccctgacttcaggtgtgaggaaggccaggaggaggggggctgcctgccccgcccacagtgcccacaggagtgcgcctgcctggacaccgtggtccgatgcagcaacaagcacctgcgggccctgcccaagggcattcccaagaatgtcacagaactctatttggacgggaaccagttcacgctggttccgggacagctgtctaccttcaagtacctgcagctcgtggacctgagcaacaacaagatcagttccttaagcaattcctccttcaccaacatgagccagctgaccactctgatcctcagctacaatgccctgcagtgcatcccgcctttggccttccagggactccgctccctgcgcctgctgtctctccacggcaatgacatctccaccctccaagagggcatctttgcagacgtgacctccctgtctcacctggccattggtgccaaccccctatactgtgactgccacctccgctggctgtccagctgggtgaagactggctacaaggaaccgggcattgctcgttgtgctgggccccaggacatggagggcaagctgctcctcaccacgcctgccaagaagtttgaatgccaaggtcctccaacgctggctgtccaggccaagtgtgatctctgcttgtccagtccgtgccagaaccagggcacctgccacaacgacccccttgaggtgtacaggtgcgcctgccccagcggctataagggtcgagactgtgaggtgtccctggacagctgttccagtggcccctgtgaaaatgggggcacctgccatgcacaggagggcgaggatgccccgttcacgtgctcctgtcccaccggctttgaaggaccaacctgtggggtgaacacagatgactgtgtggatcatgcctgtgccaatgggggcgtctgtgtggatggtgtgggcaactacacctgccagtgccccctgcagtatgagggaaaggcctgtgagcagctggtggacttgtgctctccggatctgaacccatgtcaacacgaggcccagtgtgtgggcaccccggatgggcccaggtgtgagtgcatgccaggttatgcaggtgacaactgcagtgagaaccaggatgactgcagggaccaccgctgccagaatggggcccagtgtatggatgaagtcaacagctactcctgcctctgtgctgagggctacagtggacagctctgtgagatccctccccatctgcctgcccccaagagcccctgtgaggggactgagtgccagaatggggccaactgtgtggaccagggcaacaggcctgtgtgccagtgcctcccaggcttcggtggccctgagtgtgagaagttgctcagtgtcaactttgtggatcgggacacttacctgcagttcactgacctgcaaaactggccacgggccaacatcacgttgcaggtctccacggcagaggacaatgggatccttctgtacaacggggacaacgaccacattgcagttgagctgtaccagggccatgtgcgtgtcagctacgacccaggcagctaccccagctctgccatctacagtgctgagacgatcaacgatgggcaattccacaccgttgagctggttgcctttgaccagatggtgaatctctccattgatggcgggagccccatgaccatggacaactttggcaaacattacacgctcaacagcgaggcgccactctatgtgggagggatgcccgtggatgtcaactcagctgccttccgcctgtggcagatcctcaacggcaccggcttccacggttgcatccgaaacctgtacatcaacaacgagctgcaggacttcaccaagacgcagatgaagccaggcgtggtgccaggctgcgaaccctgccgcaagctctactgcctgcatggcatctgccagcccaatgccaccccagggcccatgtgccactgcgaggctggctgggtgggcctgcactgtgaccagcccgctgacggcccctgccatggccacaagtgtgtccatgggcaatgcgtgcccctcgacgctctttcctacagctgccagtgccaggatgggtactcgggggcactgtgcaaccaggccggggccctggcagagccctgcagaggcctgcagtgcctgcatggccactgccaggcctcaggcaccaagggggcacactgtgtgtgtgaccccggcttttcgggcgagctgtgtgagcaagagtccgagtgccggggggaccctgtccgggactttcaccaggtccagaggggctatgccatctgccagaccacgcgccccctgtcatgggtggagtgccggggctcgtgcccaggccagggctgctgccagggccttcggctgaagcggaggaagttcacctttgagtgcagcgatgggacctcttttgccgaggaggtggaaaagcccaccaagtgtggctgtgccctctgcgcatagcgctgggcgtggacaggccggtgagggcgggcaaggggccccagccgctgcagcagcggagacagtcgccagcagctgggctggggtgcaggtcatcacaggacggctcctgggcagctgggccctcctgggtggggtggtgccagagcagccttttaaaagcaaattgcgccatagctgggggcagcgggggtgggcgaggcctgagctgcgggctgccctctccggaagtgccttgcacaaataggcgcttaataaatatttgttgagtgaatgtgtgcgtgaggtcaggccaagaagtgcagaacgatgacacccctccttacctgctatctgaatctggagaagaaaaatgacagccttccaaaccaacccttccctttggcctgtggcccaggctggcttggaactgggtctgtggccccagaagcctcttacccctctgcgggcaaccatgaagtactgtcagcctccccgggaagccagcctggttcattctgctgctacagaatctgctggtggtaggccaggctctggagcgggggtgccgcctcctgctggccagggagggtcggacccttgccccctgggctgactggcagctctgcagccacggcttgggaacgaggctgtgggtggaggtggttcttaggaccaggcctctgaatcctaaagttctagcatgactactgtagctgcgagggcttatgtggaggaaacagtcacaggggctgctcagggtggcagaccccactaaagagggcagagggttctttgctctagataaacaaacatcatctgcctccagacactggccacagtaggagtattggtcctgggcttccccagccaccagtcagccacaagctgtcggtgacctattggtagagggactgggtgtgagggtctgggccagggtgcttgacctgggagcagctggttcagagtccttcacaccgcaggccagtagggagcagtggaagggacagtgctccaggcattgggaagtccctgctggctctatcactcggggcaaacttctccccacctgggccttgggttcttcagctataaaatggccagaggtggggggcgggatgactaaaggaacagtgcagactcccccactgtggtcttgggaggccagaggagttagaagacctatctatctatctatctatctacattgatcacatcaaaagtatttatgtgcctaacccggggctggggattgtggacgttctggcctaatggacagatgtgaactcatcccagagcatcgcaggaatgaccaggatgcccgggaagagttgagctgagtgggggctccagccacagacagcggcccaggccagggagttgctggcaacgaaggagccagtggtggaagaagaagaggccctgaatatacgattgcctgcccacgttgtcttctcttccatacacagtgaaaatgtagaaagatggtttgtgaggccaaactgtgaatgggctaaagggaggcaaagttgcactctccttccccagagggctcaccaagagggcacacccccgggggttctggtgggcaacgggggtgagcatgtccctgccctggctccctccatctgtgaccaggaggcatggctgggtgtatgttcaggtgaggctcagagtggcattgtgtccctgtcccctgcccagggcagtgaggggagcccttgatgctgattagaaggctagaactggggtagaggtgcctggcatgtctcatgccatggggactcaatctagcaactgtgagtcctggggtccctgtgatgggaagagggcagtgccctgcccaatgtggcaggtgtcctcatggcaggatctgcccctcaccagggggctgggatctacttgcttggagctctgagcaaggccacaatgcccgcccccacccccaagtagactgcagcctgggcctcatggggcttctcccaggcccacatggcatccctctctgagtttccaggccaccgtgggaccctgcagagcatctgcaccgggctggatagggcagaaaagctcaagggcagctagcttgcctcttccctggaagaaaggtgctctgggactcaccaaccctgagaaagatagctttcctggccaccaccattccccaccaccctggagaagccaattcccaggcttgaagggcactggctggcaggaggcctcttcattctgcaggaggtggaaaggacacctgtagacaggtgatgctcacccctcacctggcgccatggggctgggaggtgagcggctggcatgtttgttcctagggagcaccatgtgagcttaaggctcccctgaccggccccaccacatggcccagcctcctagcacagcagcgctgacctcagtgcagtctgaggattggaatccaccatgagatgatgtgagagctgtgtgccccaggatcaactttttctccaacttggccatcagccagcgagttgctaaggacctgagtcagcactcacgttgcctattcacactccgcttgaaagtccggaaggtggctactgcaaaatcacccctctgagaagtcctctctccacatcttgtccccctttgtgaagacccctagttcgctctgcattttaggcatgaagagatacagcagggtgcgtccggagggagctgtggccttgcaacaccactggcaacagggccggggctcccggtgaaggtgtcaggaagtggaaaaggctggactttgtctcctctttgcctgctggtagcctaaccgcaaaagtatctctttatacagaatacttacagattctaatatatatttgtatttcattttgttacagtatttttatatgttaaagtcaacatccagcgtcttgttttgcctttcagatgctatgtggtcgtggcacgttttgttgggggtttctgtagtcgtcttgtttggatcaactcctagaggctggtttagaacaggcccatgagggagctgcacctgccctggaagtattgttttagactatgtcgatattgtctgttgtcttccatgtgaacatgacattgagtcactctgc

SEQ ID NO: 134719 - DNA, 4605 bp, Artificial Sequence
  derived and/or modified sequence
atggccctgacccccggctggggcagcagcgccggccccgtgagacccgagctgtggctgctgctgtgggccgccgcctggagactgggcgccagcgcctgccccgccctgtgcacctgcaccggcaccaccgtggactgccacggcaccggcctgcaggccatccccaagaacatccccagaaacaccgagagactggagctgaacggcaacaacatcaccagaatccacaagaacgacttcgccggcctgaagcagctgagagtgctgcagctgatggagaaccagatcggcgccgtggagagaggcgccttcgacgacatgaaggagctggagagactgagactgaacagaaaccagctgcacatgctgcccgagctgctgttccagaacaaccaggccctgagcagactggacctgagcgagaacgccatccaggccatccccagaaaggccttcagaggcgccaccgacctgaagaacctgcagctggacaagaaccagatcagctgcatcgaggagggcgccttcagagccctgagaggcctggaggtgctgaccctgaacaacaacaacatcaccaccatccccgtgagcagcttcaaccacatgcccaagctgagaaccttcagactgcacagcaaccacctgttctgcgactgccacctggcctggctgagccagtggctgagacagagacccaccatcggcctgttcacccagtgcagcggccccgccagcctgagaggcctgaacgtggccgaggtgcagaagagcgagttcagctgcagcggccagggcgaggccggcagagtgcccacctgcaccctgagcagcggcagctgccccgccatgtgcacctgcagcaacggcatcgtggactgcagaggcaagggcctgaccgccatccccgccaacctgcccgagaccatgaccgagatcagactggagctgaacggcatcaagagcatcccccccggcgccttcagcccctacagaaagctgagaagaatcgacctgagcaacaaccagatcgccgagatcgcccccgacgccttccagggcctgagaagcctgaacagcctggtgctgtacggcaacaagatcaccgacctgcccagaggcgtgttcggcggcctgtacaccctgcagctgctgctgctgaacgccaacaagatcaactgcatcagacccgacgccttccaggacctgcagaacctgagcctgctgagcctgtacgacaacaagatccagagcctggccaagggcaccttcaccagcctgagagccatccagaccctgcacctggcccagaaccccttcatctgcgactgcaacctgaagtggctggccgacttcctgagaaccaaccccatcgagaccagcggcgccagatgcgccagccccagaagactggccaacaagagaatcggccagatcaagagcaagaagttcagatgcagcgccaaggagcagtacttcatccccggcaccgaggactaccagctgaacagcgagtgcaacagcgacgtggtgtgcccccacaagtgcagatgcgaggccaacgtggtggagtgcagcagcctgaagctgaccaagatccccgagagaatcccccagagcaccgccgagctgagactgaacaacaacgagatcagcatcctggaggccaccggcatgttcaagaagctgacccacctgaagaagatcaacctgagcaacaacaaggtgagcgagatcgaggacggcgccttcgagggcgccgccagcgtgagcgagctgcacctgaccgccaaccagctggagagcatcagaagcggcatgttcagaggcctggacggcctgagaaccctgatgctgagaaacaacagaatcagctgcatccacaacgacagcttcaccggcctgagaaacgtgagactgctgagcctgtacgacaaccagatcaccaccgtgagccccggcgccttcgacaccctgcagagcctgagcaccctgaacctgctggccaaccccttcaactgcaactgccagctggcctggctgggcggctggctgagaaagagaaagatcgtgaccggcaaccccagatgccagaaccccgacttcctgagacagatccccctgcaggacgtggccttccccgacttcagatgcgaggagggccaggaggagggcggctgcctgcccagaccccagtgcccccaggagtgcgcctgcctggacaccgtggtgagatgcagcaacaagcacctgagagccctgcccaagggcatccccaagaacgtgaccgagctgtacctggacggcaaccagttcaccctggtgcccggccagctgagcaccttcaagtacctgcagctggtggacctgagcaacaacaagatcagcagcctgagcaacagcagcttcaccaacatgagccagctgaccaccctgatcctgagctacaacgccctgcagtgcatcccccccctggccttccagggcctgagaagcctgagactgctgagcctgcacggcaacgacatcagcaccctgcaggagggcatcttcgccgacgtgaccagcctgagccacctggccatcggcgccaaccccctgtactgcgactgccacctgagatggctgagcagctgggtgaagaccggctacaaggagcccggcatcgccagatgcgccggcccccaggacatggagggcaagctgctgctgaccacccccgccaagaagttcgagtgccagggcccccccaccctggccgtgcaggccaagtgcgacctgtgcctgagcagcccctgccagaaccagggcacctgccacaacgaccccctggaggtgtacagatgcgcctgccccagcggctacaagggcagagactgcgaggtgagcctggacagctgcagcagcggcccctgcgagaacggcggcacctgccacgcccaggagggcgaggacgcccccttcacctgcagctgccccaccggcttcgagggccccacctgcggcgtgaacaccgacgactgcgtggaccacgcctgcgccaacggcggcgtgtgcgtggacggcgtgggcaactacacctgccagtgccccctgcagtacgagggcaaggcctgcgagcagctggtggacctgtgcagccccgacctgaacccctgccagcacgaggcccagtgcgtgggcacccccgacggccccagatgcgagtgcatgcccggctacgccggcgacaactgcagcgagaaccaggacgactgcagagaccacagatgccagaacggcgcccagtgcatggacgaggtgaacagctacagctgcctgtgcgccgagggctacagcggccagctgtgcgagatccccccccacctgcccgcccccaagagcccctgcgagggcaccgagtgccagaacggcgccaactgcgtggaccagggcaacagacccgtgtgccagtgcctgcccggcttcggcggccccgagtgcgagaagctgctgagcgtgaacttcgtggacagagacacctacctgcagttcaccgacctgcagaactggcccagagccaacatcaccctgcaggtgagcaccgccgaggacaacggcatcctgctgtacaacggcgacaacgaccacatcgccgtggagctgtaccagggccacgtgagagtgagctacgaccccggcagctaccccagcagcgccatctacagcgccgagaccatcaacgacggccagttccacaccgtggagctggtggccttcgaccagatggtgaacctgagcatcgacggcggcagccccatgaccatggacaacttcggcaagcactacaccctgaacagcgaggcccccctgtacgtgggcggcatgcccgtggacgtgaacagcgccgccttcagactgtggcagatcctgaacggcaccggcttccacggctgcatcagaaacctgtacatcaacaacgagctgcaggacttcaccaagacccagatgaagcccggcgtggtgcccggctgcgagccctgcagaaagctgtactgcctgcacggcatctgccagcccaacgccacccccggccccatgtgccactgcgaggccggctgggtgggcctgcactgcgaccagcccgccgacggcccctgccacggccacaagtgcgtgcacggccagtgcgtgcccctggacgccctgagctacagctgccagtgccaggacggctacagcggcgccctgtgcaaccaggccggcgccctggccgagccctgcagaggcctgcagtgcctgcacggccactgccaggccagcggcaccaagggcgcccactgcgtgtgcgaccccggcttcagcggcgagctgtgcgagcaggagagcgagtgcagaggcgaccccgtgagagacttccaccaggtgcagagaggctacgccatctgccagaccaccagacccctgagctgggtggagtgcagaggcagctgccccggccagggctgctgccagggcctgagactgaagagaagaaagttcaccttcgagtgcagcgacggcaccagcttcgccgaggaggtggagaagcccaccaagtgcggctgcgccctgtgcgcctag

SEQ ID NO: 134720 - DNA, 2349 bp, Artificial Sequence
  derived and/or modified sequence
ctgtggctgctgctgtgggccgccgcctggagactgggcgccagcgcctgccccgccctgtgcacctgcaccggcaccaccgtggactgccacggcaccggcctgcaggccatccccaagaacatccccagaaacaccgagagactggagctgaacggcaacaacatcaccagaatccacaagaacgacttcgccggcctgaagcagctgagagtgctgcagctgatggagaaccagatcggcgccgtggagagaggcgccttcgacgacatgaaggagctggagagactgagactgaacagaaaccagctgcacatgctgcccgagctgctgttccagaacaaccaggccctgagcagactggacctgagcgagaacgccatccaggccatccccagaaaggccttcagaggcgccaccgacctgaagaacctgcagctggacaagaaccagatcagctgcatcgaggagggcgccttcagagccctgagaggcctggaggtgctgaccctgaacaacaacaacatcaccaccatccccgtgagcagcttcaaccacatgcccaagctgagaaccttcagactgcacagcaaccacctgttctgcgactgccacctggcctggctgagccagtggctgagacagagacccaccatcggcctgttcacccagtgcagcggccccgccagcctgagaggcctgaacgtggccgaggtgcagaagagcgagttcagctgcagcggccagggcgaggccggcagagtgcccacctgcaccctgagcagcggcagctgccccgccatgtgcacctgcagcaacggcatcgtggactgcagaggcaagggcctgaccgccatccccgccaacctgcccgagaccatgaccgagatcagactggagctgaacggcatcaagagcatcccccccggcgccttcagcccctacagaaagctgagaagaatctgccccctgagcttctgcagcccctgcagagacctgagcaacaaccagatcgccgagatcgcccccgacgccttccagggcctgagaagcctgaacagcctggtgctgtacggcaacaagatcaccgacctgcccagaggcgtgttcggcggcctgtacaccctgcagctgctgctgctgaacgccaacaagatcaactgcatcagacccgacgccttccaggacctgcagaacctgagcctgctgagcctgtacgacaacaagatccagagcctggccaagggcaccttcaccagcctgagagccatccagaccctgcacctggcccagaaccccttcatctgcgactgcaacctgaagtggctggccgacttcctgagaaccaaccccatcgagaccagcggcgccagatgcgccagccccagaagactggccaacaagagaatcggccagatcaagagcaagaagttcagatgcagcgccaaggagcagtacttcatccccggcaccgaggactaccagctgaacagcgagtgcaacagcgacgtggtgtgcccccacaagtgcagatgcgaggccaacgtggtggagtgcagcagcctgaagctgaccaagatccccgagagaatcccccagagcaccgccgagctgagactgaacaacaacgagatcagcatcctggaggccaccggcatgttcaagaagctgacccacctgaagaagatcaacctgagcaacaacaaggtgagcgagatcgaggacggcgccttcgagggcgccgccagcgtgagcgagctgcacctgaccgccaaccagctggagagcatcagaagcggcatgttcagaggcctggacggcctgagaaccctgatgctgagaaacaacagaatcagctgcatccacaacgacagcttcaccggcctgagaaacgtgagactgctgagcctgtacgacaaccagatcaccaccgtgagccccggcgccttcgacaccctgcagagcctgagcaccctgaacctgctggccaaccccttcaactgcaactgccagctggcctggctgggcggctggctgagaaagagaaagatcgtgaccggcaaccccagatgccagaaccccgacttcctgagacagatccccctgcaggacgtggccttccccgacttcagatgcgaggagggccaggaggagggcggctgcctgcccagaccccagtgcccccaggagtgcgcctgcctggacaccgtggtgagatgcagcaacaagcacctgagagccctgcccaagggcatccccaagaacgtgaccgagctgtacctggacggcaaccagttcaccctggtgcccggccagctgagcaccttcaagtacctgcagctggtgtag

SEQ ID NO: 134721 - DNA, 1230 bp, Artificial Sequence
  derived and/or modified sequence
atggccctgacccccggctggggcagcagcgccggccccgtgagacccgagctgtggctgctgctgtgggccgccgcctggagactgggcgccagcgcctgccccgccctgtgcacctgcaccggcaccaccgtggactgccacggcaccggcctgcaggccatccccaagaacatccccagaaacaccgagagactggagctgaacggcaacaacatcaccagaatccacaagaacgacttcgccggcctgaagcagctgagagtgctgcagctgatggagaaccagatcggcgccgtggagagaggcgccttcgacgacatgaaggagctggagagactgagactgaacagaaaccagctgcacatgctgcccgagctgctgttccagaacaaccaggccctgagcagactggacctgagcgagaacgccatccaggccatccccagaaaggccttcagaggcgccaccgacctgaagaacctgcagctggacaagaaccagatcagctgcatcgaggagggcgccttcagagccctgagaggcctggaggtgctgaccctgaacaacaacaacatcaccaccatccccgtgagcagcttcaaccacatgcccaagctgagaaccttcagactgcacagcaaccacctgttctgcgactgccacctggcctggctgagccagtggctgagacagagacccaccatcggcctgttcacccagtgcagcggccccgccagcctgagaggcctgaacgtggccgaggtgcagaagagcgagttcagctgcagcggccagggcgaggccggcagagtgcccacctgcaccctgagcagcggcagctgccccgccatgtgcacctgcagcaacggcatcgtggactgcagaggcaagggcctgaccgccatccccgccaacctgcccgagaccatgaccgagatcagactggagctgaacggcatcaagagcatcccccccggcgccttcagcccctacagaaagctgagaagaatcgacctgagcaacaaccagatcgccgagatcgcccccgacgccttccagggcctgagaagcctgaacagcctgcacaccggccccgtgacctgcccccacaccaccggcacccacagcagccactgcagagccttcgccgtggccgtgccccacagcagaaacgacctggaggccatgttcgaggaggaggtgcccagaatcttctacagcgcctag

SEQ ID NO: 134722 - DNA, 1143 bp, Artificial Sequence
  derived and/or modified sequence
atggccctgacccccggctggggcagcagcgccggccccgtgagacccgagctgtggctgctgctgtgggccgccgcctggagactgggcgccagcgcctgccccgccctgtgcacctgcaccggcaccaccgtggactgccacggcaccggcctgcaggccatccccaagaacatccccagaaacaccgagagactggagctgaacggcaacaacatcaccagaatccacaagaacgacttcgccggcctgaagcagctgagagtgctgcagctgatggagaaccagatcggcgccgtggagagaggcgccttcgacgacatgaaggagctggagagactggacctgagcgagaacgccatccaggccatccccagaaaggccttcagaggcgccaccgacctgaagaacctgcagctggacaagaaccagatcagctgcatcgaggagggcgccttcagagccctgagaggcctggaggtgctgaccctgaacaacaacaacatcaccaccatccccgtgagcagcttcaaccacatgcccaagctgagaaccttcagactgcacagcaaccacctgttctgcgactgccacctggcctggctgagccagtggctgagacagagacccaccatcggcctgttcacccagtgcagcggccccgccagcctgagaggcctgaacgtggccgaggtgcagaagagcgagttcagctgcagcggccagggcgaggccggcagagtgcccacctgcaccctgagcagcggcagctgccccgccatgtgcacctgcagcaacggcatcgtggactgcagaggcaagggcctgaccgccatccccgccaacctgcccgagaccatgaccgagatcagactggagctgaacggcatcaagagcatcccccccggcgccttcagcccctacagaaagctgagaagaatcgacctgagcaacaaccagatcgccgagatcgcccccgacgccttccagggcctgagaagcctgaacagcctggtgctgtacggcaacaagatcaccgacctgcccagaggcgtgttcggcggcctgtacaccctgcagctgctgctgctgaacgccaacaagatcaactgcatcagacccgacgccttccaggacctgtag

SEQ ID NO: 134723 - DNA, 2448 bp, Artificial Sequence
  derived and/or modified sequence
atggccctgacccccggctggggcagcagcgccggccccgtgagacccgagctgtggctgctgctgtgggccgccgcctggagactgggcgccagcgcctgccccgccctgtgcacctgcaccggcaccaccgtggactgccacggcaccggcctgcaggccatccccaagaacatccccagaaacaccgagagactggagctgaacggcaacaacatcaccagaatccacaagaacgacttcgccggcctgaagcagctgagagtgctgcagctgatggagaaccagatcggcgccgtggagagaggcgccttcgacgacatgaaggagctggagagactgagactgaacagaaaccagctgcacatgctgcccgagctgctgttccagaacaaccaggccctgagcagactggacctgagcgagaacgccatccaggccatccccagaaaggccttcagaggcgccaccgacctgaagaacctgcagctggacaagaaccagatcagctgcatcgaggagggcgccttcagagccctgagaggcctggaggtgctgaccctgaacaacaacaacatcaccaccatccccgtgagcagcttcaaccacatgcccaagctgagaaccttcagactgcacagcaaccacctgttctgcgactgccacctggcctggctgagccagtggctgagacagagacccaccatcggcctgttcacccagtgcagcggccccgccagcctgagaggcctgaacgtggccgaggtgcagaagagcgagttcagctgcagcggccagggcgaggccggcagagtgcccacctgcaccctgagcagcggcagctgccccgccatgtgcacctgcagcaacggcatcgtggactgcagaggcaagggcctgaccgccatccccgccaacctgcccgagaccatgaccgagatcagactggagctgaacggcatcaagagcatcccccccggcgccttcagcccctacagaaagctgagaagaatctgccccctgagcttctgcagcccctgcagagacctgagcaacaaccagatcgccgagatcgcccccgacgccttccagggcctgagaagcctgaacagcctggtgctgtacggcaacaagatcaccgacctgcccagaggcgtgttcggcggcctgtacaccctgcagctgctgctgctgaacgccaacaagatcaactgcatcagacccgacgccttccaggacctgcagaacctgagcctgctgagcctgtacgacaacaagatccagagcctggccaagggcaccttcaccagcctgagagccatccagaccctgcacctggcccagaaccccttcatctgcgactgcaacctgaagtggctggccgacttcctgagaaccaaccccatcgagaccagcggcgccagatgcgccagccccagaagactggccaacaagagaatcggccagatcaagagcaagaagttcagatgcagcgccaaggagcagtacttcatccccggcaccgaggactaccagctgaacagcgagtgcaacagcgacgtggtgtgcccccacaagtgcagatgcgaggccaacgtggtggagtgcagcagcctgaagctgaccaagatccccgagagaatcccccagagcaccgccgagctgagactgaacaacaacgagatcagcatcctggaggccaccggcatgttcaagaagctgacccacctgaagaagatcaacctgagcaacaacaaggtgagcgagatcgaggacggcgccttcgagggcgccgccagcgtgagcgagctgcacctgaccgccaaccagctggagagcatcagaagcggcatgttcagaggcctggacggcctgagaaccctgatgctgagaaacaacagaatcagctgcatccacaacgacagcttcaccggcctgagaaacgtgagactgctgagcctgtacgacaaccagatcaccaccgtgagccccggcgccttcgacaccctgcagagcctgagcaccctgaacctgctggccaaccccttcaactgcaactgccagctggcctggctgggcggctggctgagaaagagaaagatcgtgaccggcaaccccagatgccagaaccccgacttcctgagacagatccccctgcaggacgtggccttccccgacttcagatgcgaggagggccaggaggagggcggctgcctgcccagaccccagtgcccccaggagtgcgcctgcctggacaccgtggtgagatgcagcaacaagcacctgagagccctgcccaagggcatccccaagaacgtgaccgagctgtacctggacggcaaccagttcaccctggtgcccggccagctgagcaccttcaagtacctgcagctggtgatcctgagctacaacgccctgcagtgcatcccccccctggccttccagtag

SEQ ID NO: 134724 - DNA, 4386 bp, Artificial Sequence
  derived and/or modified sequence
atggccctgacccccggctggggcagcagcgccggccccgtgagacccgagctgtggctgctgctgtgggccgccgcctggagactgggcgccagcgcctgccccgccctgtgcacctgcaccggcaccaccgtggactgccacggcaccggcctgcaggccatccccaagaacatccccagaaacaccgagagactggagctgaacggcaacaacatcaccagaatccacaagaacgacttcgccggcctgaagcagctgagagtgctgcagctgatggagaaccagatcggcgccgtggagagaggcgccttcgacgacatgaaggagctggagagactgagactgaacagaaaccagctgcacatgctgcccgagctgctgttccagaacaaccaggccctgagcagactggacctgagcgagaacgccatccaggccatccccagaaaggccttcagaggcgccaccgacctgaagaacctgcagctggacaagaaccagatcagctgcatcgaggagggcgccttcagagccctgagaggcctggaggtgctgaccctgaacaacaacaacatcaccaccatccccgtgagcagcttcaaccacatgcccaagctgagaaccttcagactgcacagcaaccacctgttctgcgactgccacctggcctggctgagccagtggctgagacagagacccaccatcggcctgttcacccagtgcagcggccccgccagcctgagaggcctgaacgtggccgaggtgcagaagagcgagttcagctgcagcggccagggcgaggccggcagagtgcccacctgcaccctgagcagcggcagctgccccgccatgtgcacctgcagcaacggcatcgtggactgcagaggcaagggcctgaccgccatccccgccaacctgcccgagaccatgaccgagatcagactggagctgaacggcatcaagagcatcccccccggcgccttcagcccctacagaaagctgagaagaatcgacctgagcaacaaccagatcgccgagatcgcccccgacgccttccagggcctgagaagcctgaacagcctggtgctgtacggcaacaagatcaccgacctgcccagaggcgtgttcggcggcctgtacaccctgcagctgctgctgctgaacgccaacaagatcaactgcatcagacccgacgccttccaggacctgcagaacctgagcctgctgagcctgtacgacaacaagatccagagcctggccaagggcaccttcaccagcctgagagccatccagaccctgcacctggcccagaaccccttcatctgcgactgcaacctgaagtggctggccgacttcctgagaaccaaccccatcgagaccagcggcgccagatgcgccagccccagaagactggccaacaagagaatcggccagatcaagagcaagaagttcagatgcagcgccaaggagcagtacttcatccccggcaccgaggactaccagctgaacagcgagtgcaacagcgacgtggtgtgcccccacaagtgcagatgcgaggccaacgtggtggagtgcagcagcctgaagctgaccaagatccccgagagaatcccccagagcaccgccgagctgagactgaacaacaacgagatcagcatcctggaggccaccggcatgttcaagaagctgacccacctgaagaagatcaacctgagcaacaacaaggtgagcgagatcgaggacggcgccttcgagggcgccgccagcgtgagcgagctgcacctgaccgccaaccagctggagagcatcagaagcggcatgttcagaggcctggacggcctgagaaccctgatgctgagaaacaacagaatcagctgcatccacaacgacagcttcaccggcctgagaaacgtgagactgctgagcctgtacgacaaccagatcaccaccgtgagccccggcgccttcgacaccctgcagagcctgagcaccctgaacctgctggccaaccccttcaactgcaactgccagctggcctggctgggcggctggctgagaaagagaaagatcgtgaccggcaaccccagatgccagaaccccgacttcctgagacagatccccctgcaggacgtggccttccccgacttcagatgcgaggagggccaggaggagggcggctgcctgcccagaccccagtgcccccaggagtgcgcctgcctggacaccgtggtgagatgcagcaacaagcacctgagagccctgcccaagggcatccccaagaacgtgaccgagctgtacctggacggcaaccagttcaccctggtgcccggccagctgagcaccttcaagtacctgcagctggtggacctgagcaacaacaagatcagcagcctgagcaacagcagcttcaccaacatgagccagctgaccaccctgatcctgagctacaacgccctgcagtgcatcccccccctggccttccagggcctgagaagcctgagactgctgagcctgcacggcaacgacatcagcaccctgcaggagggcatcttcgccgacgtgaccagcctgagccacctggccatcggcgccaaccccctgtactgcgactgccacctgagatggctgagcagctgggtgaagaccggctacaaggagcccggcatcgccagatgcgccggcccccaggacatggagggcaagctgctgctgaccacccccgccaagaagttcgagtgccagggcccccccaccctggccgtgcaggccaagtgcgacctgtgcctgagcagcccctgccagaaccagggcacctgccacaacgaccccctggaggtgtacagatgcgcctgccccagcggctacaagggcagagactgcgaggtgagcctggacagctgcagcagcggcccctgcgagaacggcggcacctgccacgcccaggagggcgaggacgcccccttcacctgcagctgccccaccggcttcgagggccccacctgcggcgtgaacaccgacgactgcgtggaccacgcctgcgccaacggcggcgtgtgcgtggacggcgtgggcaactacacctgccagtgccccctgcagtacgagggcaaggcctgcgagcagctggtggacctgtgcagccccgacctgaacccctgccagcacgaggcccagtgcgtgggcacccccgacggccccagatgcgagtgcatgcccggctacgccggcgacaactgcagcgagaaccaggacgactgcagagaccacagatgccagaacggcgcccagtgcatggacgaggtgaacagctacagctgcctgtgcgccgagggctacagcggccagctgtgcgagatccccccccacctgcccgcccccaagagcccctgcgagggcaccgagtgccagaacggcgccaactgcgtggaccagggcaacagacccgtgtgccagtgcctgcccggcttcggcggccccgagtgcgagaagctgctgagcgtgaacttcgtggacagagacacctacctgcagttcaccgacctgcagaactggcccagagccaacatcaccctgcaggtgagcaccgccgaggacaacggcatcctgctgtacaacggcgacaacgaccacatcgccgtggagctgtaccagggccacgtgagagtgagctacgaccccggcagctaccccagcagcgccatctacagcgccgagaccatcaacgacggccagttccacaccgtggagctggtggccttcgaccagatggtgaacctgagcatcgacggcggcagccccatgaccatggacaacttcggcaagcactacaccctgaacagcgaggcccccctgtacgtgggcggcatgcccgtggacgtgaacagcgccgccttcagactgtggcagatcctgaacggcaccggcttccacggctgcatcagaaacctgtacatcaacaacgagctgcaggacttcaccaagacccagatgaagcccggcgtggtgcccggctgcgagccctgcagaaagctgtactgcctgcacggcatctgccagcccaacgccacccccggccccatgtgccactgcgaggccggctgggtgggcctgcactgcgaccagcccgccgacggcccctgccacggccacaagtgcgtgcacggccagtgcgtgcccctggacgccctgagctacagctgccagtgccaggacggctacagcggcgccctgtgcaaccagagccccagcgccggcggcaccctgagcggcaccttcaccagaagcagaggcgccatgcccagcgccagacccagagccccctgccacggctggagcgccggcgccagagcccaggccagagccgccgccagagccttcggctag

SEQ ID NO: 134725 - DNA, 2345 bp, Artificial Sequence
  derived and/or modified sequence
ctctggctgctgctgtgggcagccgcgtggcgcctgggtgcctcggcgtgccccgccctctgcacctgcaccggaaccacggtggactgccacggcacggggctgcaggccattcccaagaatatacctcggaacaccgagcgcctggaactcaatggcaacaacatcactcggatccataagaatgactttgcggggctcaagcagctgcgggtgctgcagctgatggagaaccagattggagcagtggaacgtggtgcttttgatgacatgaaggagctggagcggctgcgactgaaccgaaaccagctgcacatgttaccggaactgctgttccagaacaaccaggctttgtcaagactggacttgagtgagaacgccatccaggccatccccaggaaagcttttcggggagctacggaccttaaaaatttacagctggacaagaaccagatcagctgcattgaggaaggggccttccgtgctctgcgggggctggaggtgctgaccctgaacaacaacaatatcaccaccatccccgtgtccagcttcaaccatatgcccaagctacggaccttccgcctgcactccaaccacctgttttgcgactgccacctggcctggctctcgcagtggctgaggcagcggccaaccatcgggctcttcacccagtgctcgggcccagccagcctgcgtggcctcaatgtggcagaggtccagaagagtgagttcagctgctcaggccagggagaagcggggcgcgtgcccacctgcaccctgtcctccggctcctgcccggccatgtgcacctgcagcaatggcatcgtggactgtcgtggaaaaggcctcactgccatcccggccaacctgcccgagaccatgacggagatacgcctggagctgaacggcatcaagtccatccctcctggagccttctcaccctacagaaagctacggaggatatgccccctctccttctgctcaccttgcagagacctgagcaacaatcagatcgctgagattgcacccgacgccttccagggcctccgctccctgaactcgctggtcctctatggaaacaagatcacagacctcccccgtggtgtgtttggaggcctatacaccctacagctcctgctcctgaatgccaacaagatcaactgcatccggcccgatgccttccaggacctgcagaacctctcactgctctccctgtatgacaacaagatccagagcctcgccaagggcactttcacctccctgcgggccatccagactctgcacctggcgcagaaccctttcatttgcgactgtaacctcaagtggctggcagacttcctgcgcaccaatcccatcgagacgagtggtgcccgctgtgccagtccccggcgcctcgccaacaagcgcatcgggcagatcaagagcaagaagttccggtgctcagccaaagagcagtacttcattccaggcacggaggattaccagctgaacagcgagtgcaacagcgacgtggtctgtccccacaagtgccgctgtgaggccaacgtggtggagtgctccagcctgaagctcaccaagatccctgagcgcatcccccagtccacggcagaactgcgattgaataacaatgagatttccatcctggaggccactgggatgtttaaaaaacttacacatctgaagaaaatcaatctgagcaacaacaaggtgtcagaaattgaagatggggccttcgagggcgcagcctctgtgagcgagctgcacctaactgccaaccagctggagtccatccggagcggcatgttccggggtctggatggcttgaggaccctaatgctgcggaacaaccgcatcagctgcatccacaacgacagcttcacgggcctgcgcaacgtccggctcctctcgctctacgacaaccagatcaccaccgtatccccaggagccttcgacaccctccagtccctctccacactgaatctcctggccaaccctttcaactgcaactgccagctggcctggctaggaggctggctacggaagcgcaagatcgtgacggggaacccgcgatgccagaaccctgactttttgcggcagattcccctgcaggacgtggccttccctgacttcaggtgtgaggaaggccaggaggaggggggctgcctgccccgcccacagtgcccacaggagtgcgcctgcctggacaccgtggtccgatgcagcaacaagcacctgcgggccctgcccaagggcattcccaagaatgtcacagaactctatttggacgggaaccagttcacgctggttccgggacagctgtctaccttcaagtacctgcagctcgt

SEQ ID NO: 134726 - DNA, 4605 bp, Artificial Sequence
  derived and/or modified sequence
atggctctaacacccgggtgggggtcttcagcgggtcccgttcggcccgagctgtggctgcttttatgggctgcagcttggcggctgggggcctccgcctgtcctgccttgtgtacctgcaccggaacgacagtcgactgtcatgggacaggacttcaggccattcccaagaacatcccgcggaatacggagagactagagctaaacggtaataacataaccagaattcacaaaaatgactttgctggtctaaagcagttgagggtgctgcagctgatggaaaatcaaatcggcgcagtcgagaggggggcttttgatgacatgaaggagctcgagcggctgcgcctgaaccgcaatcagctccacatgctccccgagctcctgttccaaaacaaccaagccttatcgcgattagatctcagtgagaacgcaatccaggctatccctcgaaaagccttccgtggggctaccgatcttaagaatcttcagctagacaaaaatcagatttcctgtatcgaggagggtgcctttcgagctctcagggggttggaagtgttaactctcaacaataataacatcacgaccatcccagtgtctagctttaaccatatgcccaaactgcgaaccttcaggctgcattccaatcacttattttgtgactgtcacctggcctggctgtctcagtggttacggcagagacctaccataggattgttcacccagtgttctggtccggcgagtctgcgcggcctgaatgtcgcagaggtccagaaatcagagttttcttgtagcggtcagggagaggccggacgagtgcctacatgtacactgagctctggatcctgtccggcaatgtgtacctgtagtaacggaattgttgactgtcgtggtaaagggcttaccgcaattccagcaaacctcccagagacaatgactgaaatcaggcttgagctgaatggtataaagagcatcccccccggagcgtttagcccttaccgtaagcttcgtcggatcgacctgagtaataaccagatcgccgagatcgcgcctgatgccttccagggacttcgcagtctgaacagtttggtcctgtatgggaacaaaatcaccgatctccccaggggtgtgttcggaggactgtataccttgcagctgttgctcctcaacgctaataagattaattgcatacgacctgacgcttttcaagatcttcaaaatctgtccctcctctctctgtatgacaacaaaatccagtccctcgctaaagggacctttacctcgttacgggctattcagactctgcacctcgcgcagaacccattcatttgtgactgtaacctgaagtggctggcagattttttgcgtacaaacccaatagagacaagcggcgcccgctgcgcatccccaaggcgcctggctaataagagaattggccaaattaaaagtaagaaatttcgttgcagtgccaaggagcagtatttcataccgggaacagaggactaccaactaaatagcgagtgtaatagcgatgtggtctgtccccataaatgccggtgcgaagccaacgtggtagaatgctctagtctgaagctgactaaaatcccggagcggattccacagtctaccgctgagctgaggctgaacaataatgagatcagcatcctagaagcgaccgggatgttcaagaagctgacgcacctgaagaaaataaatctctctaataataaagtgtcagagattgaggacggggcttttgagggcgccgcatctgtttcggagctccacctgacagcaaatcagctagagagcatacgcagcggcatgttcaggggcctcgatggtcttagaacgctgatgcttcgtaataacaggataagttgtatccacaatgatagtttcaccgggttgagaaatgtaaggctcctctccctctacgacaatcagatcaccactgtttcaccaggtgcgtttgataccctgcagtctttgtctacactgaacttgttggcaaaccccttcaattgtaactgccagttggcctggcttgggggatggctgcgtaagcgcaaaatcgtcacgggtaaccctagatgccaaaatcccgactttctgcgtcagatccccttgcaagatgttgcatttccagactttcgttgcgaagagggacaagaagaaggcggttgccttccccggccacagtgccctcaggaatgcgcatgcctggatactgtggtgcgttgcagcaataaacacctgagggccttgcccaaaggaatccctaagaatgtgaccgagctgtacctcgatggaaatcagttcactcttgtgcccggacagctgtcaacgttcaaataccttcaactggtagatctatccaacaacaaaatctcgtccttgtcgaatagttcattcacaaacatgtcccagttaactaccctaattctgtcttataacgccttacagtgcatccccccactggccttccaaggcctgcggagtctcaggctcctctcactgcacgggaatgacatttcaacactgcaagaaggaattttcgctgatgtgacaagcctttctcacttggcaatcggggccaaccctctgtattgtgactgccatctgcgctggctgagttcttgggtgaaaactggctacaaggagcctggtatagctaggtgtgccggtcctcaagatatggagggcaagcttctcctcacgacccccgccaagaagttcgagtgccagggacctcctacactcgccgtgcaggccaagtgcgatctatgtctttcatccccatgtcaaaatcagggcacatgtcacaacgacccactggaagtctatagatgcgcttgtccttcaggttataagggacgcgactgcgaggtaagtcttgacagttgctcttccgggccctgcgagaatggcgggacttgtcatgcacaagagggggaggatgcccccttcacctgttcttgccctacaggcttcgagggcccaacctgtggtgtcaataccgatgactgtgtagaccacgcctgtgccaatggtggtgtgtgtgttgatggagtgggtaattacacttgccagtgcccccttcagtacgaaggaaaggcttgtgaacagttggtggatctttgcagcccagatctcaatccctgtcagcacgaggcgcaatgtgtgggtactcccgacgggcctcggtgcgaatgtatgcctggttacgccggcgacaattgctcagagaatcaggatgactgtagagatcatcggtgccaaaatggtgctcagtgcatggacgaagtcaacagctactcatgtctctgcgctgagggttactccgggcaactgtgtgaaattcccccgcacctgcccgcacccaagagcccctgcgaggggacagaatgccagaatggcgctaattgcgttgaccaaggaaacagacccgtgtgccagtgtctgccgggattcggcggccctgagtgtgaaaaactgctttctgtcaactttgtagatcgagacacatatctacagttcaccgatctgcagaactggccacgcgccaacattaccctgcaggtgtccacggctgaagataatgggatactgctttacaacggtgataatgatcatattgcagttgaactgtatcaaggccatgtgcgcgtctcctacgaccccggctcatacccctccagcgccatttatagcgccgagactatcaatgatggtcagtttcatacagtggaactggttgcttttgaccagatggtgaatttatccatcgatggaggatcaccaatgacaatggacaatttcggaaaacactacacccttaatagcgaagcaccgctctatgtggggggaatgcctgtagacgtgaattcagccgcttttcgtctctggcagattctgaacgggacggggttccatggctgcataaggaacttgtatataaacaacgaactccaagacttcaccaagacacagatgaagcctggggtggtccctggttgtgaaccatgtcggaagctttattgcctgcatggaatctgtcagcccaacgctaccccaggacccatgtgccattgcgaggccggctgggtaggactgcattgcgaccagcccgctgacgggccttgtcacggtcataagtgcgtgcacggacagtgtgtgccgctcgacgccctgagctactcatgccagtgtcaggacggatattctggcgctctctgtaaccaggcaggcgccctggcagagccttgtcgggggctgcagtgcttacatggacattgtcaggcctcaggcactaagggggcgcactgtgtgtgtgacccaggtttctcaggagaactctgtgagcaggaatctgagtgccgcggtgaccctgtgagggacttccatcaagttcagagggggtacgctatttgtcagacgacacgccctctcagttgggttgaatgcaggggtagctgccccgggcagggctgctgccagggccttcggcttaagcggagaaagttcacattcgagtgctccgacggcacctcatttgctgaggaagtggagaaacccaccaaatgcggttgcgcattgtgcgcttag

SEQ ID NO: 134727 - DNA, 2349 bp, Artificial Sequence
  derived and/or modified sequence
ctttggttgttactgtgggccgccgcatggcggctgggcgcgagcgcctgtcctgcactttgcacctgcactggaacgactgtggattgccatgggacagggctccaggccatccctaagaatatcccaagaaatacagagcggctggagcttaacggaaacaacataacccggatccacaaaaacgatttcgccggactcaaacagctccgggtgttgcagctgatggaaaatcagatcggcgcagttgagcggggggcattcgacgacatgaaagaacttgagcgcctacgactcaataggaatcaactccacatgctgccggaacttttgttccagaataaccaagccctttcacgccttgacctgagcgagaacgcaatccaggcgatcccacgcaaggcatttagaggcgccaccgatttgaagaacctacaactagacaagaatcagattagttgcattgaggaaggggctttcagagccctcaggggactggaggtactcaccctgaataataataacatcacgacaatacctgtaagttctttcaaccacatgcccaaattgagaacttttaggctccactctaaccaccttttctgtgactgtcacctggcatggctgagtcaatggctccgacagaggccaaccatcgggcttttcacacagtgcagcggccctgcgagcctcagaggcctgaacgtagctgaggtacaaaaatcagaattcagctgtagtggccagggagaggcaggaagagtgccgacttgtaccctgagctctggaagttgtccagctatgtgcacctgctcaaacggcatagtcgactgccgcgggaagggcctaacagcaatccctgccaatttgcccgagacaatgactgaaatacgcctggaactgaatggtatcaagtccattcctcctggagccttttccccttaccgcaagttacggcgtatctgtccactttcattctgttcgccctgcagagatctctccaataaccagatcgcagaaattgccccggatgcattccagggactgcgcagccttaactcactcgtgctgtacggcaataaaataaccgacctgccgcgcggagtgtttggtggtctgtacaccctgcaactgctcttgcttaacgccaacaaaatcaactgtatccgcccagatgctttccaggacctccaaaatctctcgctgctgagcctgtacgataacaagatccagtcgctggccaagggtacctttacaagcctcagagctattcagacccttcatctggctcaaaacccttttatctgcgactgtaacctaaagtggctggcagacttcttgaggacaaacccgatagaaacctcaggagcaaggtgcgcgagcccaaggagactggcaaacaaacgtatcggccagattaagtcgaaaaaattcagatgctccgccaaagaacaatacttcattcctggaacagaggactaccaactgaactccgagtgtaactctgatgtggtgtgcccacacaagtgccggtgtgaagcaaacgttgtcgaatgttcgtccctgaagctgacaaagatccctgaacggataccgcaatcgaccgctgagttgcggctgaacaacaatgagattagcatattggaagctaccggaatgtttaagaagctgacccacctgaagaaaataaacctatcaaacaacaaggtcagtgagattgaagacggtgccttcgagggcgccgctagcgtttccgagcttcacctaactgccaatcaactggaatctatcaggtccggaatgtttagaggcctggacgggctccgcactttgatgctgagaaataatcgtatcagctgtatccacaatgactcgtttactgggctaaggaatgtgagactgctgtctctctatgacaaccagattacaacagtttcccctggcgcttttgacacactgcagtcactctccaccctaaatcttctggccaacccgtttaattgcaactgtcaactggcttggcttggaggctggctccgcaagcgaaaaatcgttaccggcaaccccagatgtcaaaacccagattttctacgtcagatcccacttcaggacgtggcctttccagattttcgttgtgaggaaggacaggaagaaggaggctgcttgcctcgccctcagtgtcctcaggagtgtgcctgtctcgacactgtagtgcggtgctctaacaaacaccttcgtgcactgccaaaggggattcctaagaacgtcacagagttatatctggacggcaatcagtttacactcgtgccgggacaactatctaccttcaaatacctccagctggtctag

SEQ ID NO: 134728 - DNA, 1230 bp, Artificial Sequence
  derived and/or modified sequence
atggctttgaccccgggatggggcagctcagctggccccgttagaccggagctttggcttttgctttgggccgccgcctggagattgggggcttcagcatgtcctgcactgtgcacatgtacaggcacaaccgttgactgtcacggtacggggttgcaggccatccccaaaaatatccctcgtaacactgagaggctggaattgaatggcaacaacattactaggatccacaagaacgatttcgccggcttgaaacagttacgggttctacagctcatggagaaccagatcggcgcagtagagcggggggctttcgacgacatgaaggagcttgagcgtcttcgcttgaatagaaaccagctgcatatgcttcccgagctgctttttcagaacaaccaggcactgtcgaggttagatttgtctgaaaacgccatacaagcaatcccccggaaggctttccggggcgctactgacttgaagaatctccaactggacaagaatcaaattagttgcatcgaggaaggcgcattccgggcacttaggggtctagaggttctgacactcaataataataacattaccaccatccctgttagcagcttcaatcatatgcctaaacttcgcacttttaggcttcattcaaatcatctgttttgcgactgtcatctggcttggctgtctcagtggcttaggcagagaccaactattggactattcacccagtgctccgggcccgcgtctctgcggggtctgaacgtagcagaagtccagaaatctgagtttagctgttccggccaaggagaggccgggcgagtgccaacatgcaccctgagtagtgggtcttgccccgctatgtgcacgtgtagtaatgggatcgtggactgtcgaggcaaaggcctcaccgcaatcccagccaacctccctgagacaatgaccgaaattagattggaactgaatggcattaaaagcattccacccggggcattctccccctacagaaagctcaggagaatcgatctgtcgaataaccaaatcgcggagattgccccagatgcattccagggcctgagaagtctaaatagcttacacactgggcccgtaacgtgcccacataccaccggcacccacagctcacactgtagggcattcgctgttgcggttccacatagtaggaatgatctggaggctatgttcgaagaagaggttccacgcatcttctatagtgcatag

SEQ ID NO: 134729 - DNA, 1143 bp, Artificial Sequence
  derived and/or modified sequence
atggccctgacccctggttgggggagttctgctggtccagtgagacccgagctttggctcttgctgtgggccgctgcatggcgattgggggcaagcgcctgcccagcgctttgcacctgtaccggtaccaccgtcgattgccacggaaccggtctacaggcaatcccaaaaaacatcccccgtaacacagaaagactggaactgaacggaaacaacatcacacggatccataaaaacgatttcgctgggcttaaacagctacgggtattacagctgatggaaaaccaaattggggccgtagaaagaggcgcattcgacgacatgaaggagttagagcgacttgacctctccgagaacgctatccaggctattcctcgtaaggcatttcgcggcgcgactgacctgaagaacctgcaactcgacaaaaatcagatcagctgtatagaagaaggggccttccgggccctgcgggggctggaagtgctgaccctgaacaataacaacattactaccatcccagtttcttcatttaatcacatgccgaaactccgcacttttcgactgcacagcaaccatctattctgcgattgccacctagcctggctttctcagtggctgagacagagaccaactataggtctgtttacgcaatgttcggggcctgccagtctgcgcggactgaacgtcgccgaggtacagaaaagcgagttctcctgcagcggacagggagaagccggtagagtgcccacatgcaccctgagtagtggctcttgccccgcaatgtgtacatgttccaacgggattgtggactgcagaggcaaagggcttactgccatcccagccaacttgccagagaccatgactgaaattagactggagctgaacggcatcaagtccattcctccgggagctttttctccctatagaaagttgagaaggatcgacttaagtaacaatcagatcgccgaaattgcacccgatgctttccagggtttgaggtcccttaattccctggtgttgtatggcaacaagatcacagatttgcccaggggcgtttttgggggtctgtacaccctgcagctgctgctactgaacgccaataaaatcaactgtattaggcccgatgcttttcaggatctatag

SEQ ID NO: 134730 - DNA, 2448 bp, Artificial Sequence
  derived and/or modified sequence
atggctctgaccccaggatggggctccagcgctggaccggtccgtcccgagctgtggttgctgctttgggccgctgcctggagactgggggcttccgcctgcccggcactttgcacgtgtaccggcacaaccgtagactgtcatgggactgggctgcaggcgatccccaagaacatacccaggaacactgagcgattggagcttaacgggaataacataactcgaatccataaaaacgacttcgctgggctgaagcaattacgtgttctgcagctgatggaaaaccagattggcgcagtagaacgcggggcgtttgatgatatgaaagaactcgaacggctgcgcttaaacagaaatcagctgcacatgttgccagagcttctgttccagaacaaccaggctcttagcaggctggatctatccgagaatgcaattcaggctatcccccgcaaagccttccgcggcgccactgacctaaaaaaccttcagttggacaaaaatcaaatctcctgcattgaagagggagccttcagggccttacgggggctggaagttcttaccttaaataacaacaacattaccaccataccggtgtcatcttttaatcacatgcccaaactgcgaacttttaggctgcattcaaatcatcttttctgcgattgtcatttggcctggctgtctcagtggctccggcaaaggccaacaatcggtctgtttacccaatgctccggccccgcaagtttacggggactaaacgtcgcagaagttcagaagagcgagttttcatgttctggacaaggcgaggccggccgcgtgcccacctgcacccttagcagcgggtcatgtcccgccatgtgtacatgttctaacggaatcgtagattgccgcggcaaggggctcaccgccatccctgccaatctgccggagactatgactgaaatccgattggaactgaacgggattaaatctattcccccgggtgccttctccccctaccggaagctaagaaggatatgtccactttcattctgttccccatgccgggatctgagtaataaccagatcgccgagatcgctcctgacgctttccagggtctaagatctttgaattcgcttgtactctacggcaacaaaataacagatctgccaaggggggtctttgggggcctgtacaccctgcagctactattgttgaatgcgaataaaatcaattgcatccgccctgacgcctttcaggatttgcagaacctttccctgctgagtctatacgacaataagattcagtcactggctaaggggactttcaccagcctccgtgcgatccagactttgcacttagcacaaaatccatttatttgtgactgcaatctcaagtggttagccgacttcctcaggacaaaccccatagagacatccggggcccggtgtgcaagcccaaggaggctggcaaataaacgtatcggacagatcaaaagtaagaagtttagatgttctgccaaagagcaatattttataccaggcactgaggactatcagctgaactccgagtgtaactcagatgttgtctgtccacacaagtgtcgctgcgaggccaacgtggtcgagtgtagcagtttgaagctgacgaagatccccgaacgtatcccccagagcaccgcagagctaagacttaacaacaacgaaattagcattttggaagccactggtatgtttaaaaaactcactcatctgaaaaagataaacctgtctaataacaaggtcagcgagatcgaagatggtgcttttgagggagccgccagcgtgagtgaactgcatctgacggcaaatcagctcgaatccatccggagtgggatgtttcgcggtctcgatggcctccgcacactgatgttgcgcaacaacagaatatcctgtatccacaacgatagttttactggactccgaaatgtgaggctgctgtccctgtacgataatcagataactaccgtttctcccggagcgttcgataccttacaatcgctcagcacactgaatttgctagcaaatccttttaactgcaactgtcagttggcttggctgggtggttggttaaggaaacggaagatcgtcacaggcaatcctagatgccagaacccagattttctgcggcagatcccccttcaggatgtggcatttcccgacttcagatgcgaggaaggtcaggaggagggtggctgcctcccccgcccccagtgcccccaggagtgtgcatgcctagatacagttgtgcggtgctccaataaacacctacgggcccttcctaaaggcatcccgaagaacgttaccgaactgtacctggacggcaaccagttcaccttggtgcctgggcagctctcaacttttaagtatctgcagctcgtaatcctcagctacaacgcactgcagtgtatccctcccctcgccttccagtag

SEQ ID NO: 134731 - DNA, 4386 bp, Artificial Sequence
  derived and/or modified sequence
atggcccttactccggggtgggggtcctcagccggccctgtcagacccgaactctggctactcctttgggcagccgcctggaggttaggtgcaagtgcatgcccagcactgtgcacctgcactggtacaaccgttgattgccatggcaccggcctgcaggcaattcccaagaacattccgcgaaacactgagcgtcttgaactcaacgggaataatatcaccaggattcacaaaaacgacttcgccggactaaaacagctcagagtcctgcaacttatggaaaaccaaattggggccgtggaacgcggagcttttgacgatatgaaggaactggaaagactccggctcaatcgcaaccagctccatatgctacctgagcttctcttccagaacaaccaagcgttgagtcggctggacttgagcgagaatgctatacaggccatccctcgtaaggccttccgtggcgctactgacctgaagaatctgcagctggataagaatcagatctcttgcatcgaagaaggcgctttccgggcgctgaggggccttgaggtgcttaccttgaacaacaacaatatcaccacgatcccagtgtcgtcatttaaccacatgcccaagttaagaaccttccggctacatagtaaccatctattttgtgattgtcacttagcgtggctgagtcagtggctgaggcaaaggcctactataggtttattcacccagtgttctggcccagcctctctgagggggctaaatgtggctgaggtgcaaaagagtgaatttagttgcagtgggcagggggaggcgggtcgggtccccacctgtacactatctagcggtagctgtccggccatgtgcacgtgttcaaatggcatcgtcgattgtaggggcaaaggactgaccgctatcccggcgaatctgccggaaactatgacagagatccgcctggaactgaacggcataaagtcgattccaccaggcgcttttagcccttacaggaagctgcgacgcatcgacctgagcaacaatcagattgctgagatcgctcctgatgcattccagggattgcgctcactgaacagcctggtgttgtatggcaacaagattacggatcttccaaggggagttttcggtgggctttatactctccagctgttactgctgaacgctaataagataaactgcattcgtcccgacgcctttcaagatctgcaaaacttaagtcttctctccctgtatgataataaaattcagagcctggcaaagggcacgtttacaagcctgcgtgctatccaaaccctccacctggcccagaaccctttcatctgtgattgtaatctcaagtggctggctgacttcttaagaactaatcctatcgagacatctggcgcccgatgcgctagcccgagacgcctggccaacaagagaattggacagatcaagtccaagaagttccgatgctcggccaaggagcagtatttcatccctggtacagaggattaccagttaaactctgagtgtaattcagatgttgtgtgtccccataagtgtaggtgcgaggccaacgtggtggagtgctcttctctcaagctgacaaaaatccccgaaagaattccacagtctactgctgaattaagactcaacaataatgagatcagtattctcgaggccacaggcatgttcaagaagcttacccacctgaaaaaaatcaacctatccaacaacaaggtcagcgaaatcgaagacggggcattcgagggcgctgccagtgtcagcgagctccacctaaccgcaaaccagctggaatcaatccgtagcggaatgttccgggggcttgacggtctgcggaccctaatgttgcgcaataacagaatctcctgcatacataacgactcctttactggacttcggaatgtgagattgctgagcctctatgataatcagatcacaacagtttcgcccggtgcattcgataccctgcagagcctgtctactctcaacttgttagctaatcccttcaactgcaactgccagctcgcctggctggggggctggcttagaaaaaggaaaatcgtgaccgggaacccgcgatgccaaaaccccgatttcttaagacagattccattacaggatgtggccttccccgactttagatgtgaagaagggcaggaagaggggggttgtctgccacgtccgcagtgcccacaggagtgcgcctgtctggacactgtcgtaagatgtagcaacaaacatttgcgggcattgcctaaggggataccaaaaaacgtgactgagttgtacctcgacggcaatcagtttaccctggtgccaggacagctttccacttttaaatatctccaattggtggacctctcgaataacaaaataagctcactcagcaactcgagttttacaaatatgtctcagttaaccacccttatactctcttacaatgctctccaatgcattccaccacttgccttccagggattgagaagcctcaggttactttccttgcatgggaatgacatcagcacactgcaggaaggtatattcgcggacgtgacaagtctttctcatctggccatcggagcgaatccactgtactgcgattgccacttgcgctggctatcctcctgggttaaaacaggttacaaggagccaggcatcgcacggtgcgcgggcccccaggatatggagggcaaactgctgctgactactccagcaaagaagttcgagtgccagggcccccctacactggcagtccaggctaaatgtgacctgtgcctctcatccccatgtcagaatcagggaacttgccacaacgatcccctcgaggtttaccgatgcgcttgcccgagtggctacaaggggagagactgcgaggtgagtctggatagctgttcatcaggtccttgcgagaacggggggacatgccacgcccaggagggggaagacgcacctttcacctgtagttgtccaactggctttgaggggcccacttgcggagtgaataccgacgactgtgtggatcacgcctgcgcgaacgggggagtatgcgtggatggagttgggaactatacatgccagtgcccactgcagtatgaggggaaggcctgtgaacagcttgtggacttgtgtagccccgacttgaatccatgtcagcatgaggcccagtgcgtgggaacacctgacggcccacggtgcgagtgtatgccaggttatgcgggagacaattgtagcgagaaccaggatgactgccgggatcacaggtgccagaatggtgctcagtgtatggacgaggtcaacagttattcgtgtctttgcgccgaaggctactctggacagttatgcgaaatccctccccatctccccgccccaaaatcaccctgtgaggggacagagtgccagaatggggccaattgtgtggatcaggggaaccgaccagtctgccaatgcctgcctggattcggaggacccgagtgtgaaaaactgctgtctgtcaactttgtcgatcgggatacttacctccaattcaccgatctgcagaactggccccgcgccaacatcacgcttcaggtgagtaccgcagaagacaacggcatacttctgtacaacggagacaatgatcatattgctgtcgaactgtaccagggccacgttagagtcagctacgatcctggtagctacccttcctccgctatctattccgcagaaactatcaacgacggacagtttcataccgtggagctggtggctttcgaccaaatggttaatctcagtattgacggcggcagtcccatgacaatggacaacttcggcaagcattacacactgaattctgaggcaccattgtatgtggggggcatgccggtggacgttaactccgcagctttcagattgtggcagattcttaacgggaccgggtttcacggctgcatccgcaacctgtatattaacaatgagctgcaagacttcaccaagacccagatgaaacctggcgtggtgcctggatgtgagccgtgcagaaagctgtattgtctgcacggcatctgtcaacccaatgccacaccgggcccaatgtgccactgcgaagcgggctgggttgggctgcattgtgaccaacccgccgatggcccttgccatgggcataagtgcgtacacggccagtgtgtgcctcttgacgctttaagttacagttgccagtgtcaggatggttacagcggggccctctgtaatcagtccccctctgcgggtggaaccttaagcgggactttcacaaggagtcgcggagcaatgcctagcgcgcgtccccgagccccatgccacgggtggtccgccggagccagggctcaagctcgtgccgctgccagggccttcggctag

SEQ ID NO: 134732 - DNA, 1143 bp, Artificial Sequence
  derived and/or modified sequence
atggccttaacaccgggctgggggtccagcgcaggcccggtgaggcccgagctctggctcctactgtgggctgcggcctggcgcctcggcgcatctgcctgtcccgccctgtgcacttgcactggtactactgtagattgccacgggacagggctccaggcaattcctaagaacatcccccgcaacactgagagattagagttaaacggaaataacattacccgcatccataaaaacgattttgctgggctgaagcagctgagggtgttgcagctgatggaaaaccagatcggcgctgtcgaaagaggagcctttgatgacatgaaagagttagagcgcctcgatctgagtgagaacgccatccaagccattcctagaaaagcctttcgcggagcaacagatctgaaaaaccttcagcttgacaagaaccagataagttgtattgaggagggcgctttcagagccttgagaggtctggaggtgctaaccctcaataacaataatatcactactatcccagtgtcgtcatttaatcacatgccaaaactgagaacgtttagattacatagcaatcaccttttttgcgactgccatctggcctggctttctcagtggttaaggcaacgacccacaatcggcctgttcacacagtgttcaggacctgcctcactgagaggcttaaatgtcgcagaagtgcagaagtccgaattctcctgttccggccagggagaagccgggcgcgtaccaacttgcaccctgtctagtggatcctgtcctgctatgtgtacttgctccaacggaattgtcgactgtcgcggtaagggccttacagccattccagccaatctgcccgaaaccatgactgaaatccgcctggagctgaacggaatcaagagtatcccccctggcgcattttcaccctatcgcaagctcaggcgtattgacctgagcaataaccagattgccgagattgcgccagatgcctttcaagggttacgctcgcttaactccctggtgctctatggcaacaaaatcaccgatttgccgaggggcgtgttcggtggtctgtataccctgcaactgctcctgcttaatgccaataagattaactgcattcgcccagatgcctttcaggacttatag

SEQ ID NO: 134733 - DNA, 4605 bp, Artificial Sequence
  derived and/or modified sequence
atggccctgaccccaggctggggcagcagcgctggccctgtgcggcctgagctgtggctgctgctgtgggccgccgcctggaggctgggcgccagcgcctgcccagccctgtgcacctgcaccggcaccaccgtggactgccacggcaccggcctgcaggccatccccaagaacatccccaggaacacagagcggctggagctgaatggaaacaacatcacccgcatccacaagaatgactttgctggcctgaagcagctgcgggtgctgcagctgatggagaaccagattggagctgtggagcggggggcctttgatgacatgaaggagctggagcggctgcggctgaacagaaaccagctgcacatgctgcctgagctgctcttccagaacaaccaggccctgagccggctggacctgtctgaaaatgccatccaggccatccccaggaaggccttccggggggccacagacctgaagaacctgcagctggacaagaaccagatcagctgcatcgaggagggcgccttccgggccctgcggggcctggaggtgctgaccctgaacaacaacaacatcaccaccatccctgtgagcagcttcaaccacatgcccaagctgcggaccttccggctgcacagcaaccacctgttctgtgactgccacctggcctggctgagccagtggctgcggcagaggcccaccatcggcctcttcacccagtgcagcggccctgccagcctgcggggcctgaatgtggccgaggtgcagaagtctgagttcagctgcagcggccagggcgaggccggccgggtgcccacctgcaccctgagcagcggcagctgcccagccatgtgcacctgcagcaatggcatcgtggactgccggggcaagggcctgacagccatcccagccaacctgcctgagaccatgacagagatccggctggagctgaatggcatcaagagcatccccccaggggccttcagcccctacaggaagctgcggagaattgacctgagcaacaaccagattgctgagatcgccccagatgccttccagggcctgcggagcctgaacagcctggtgctgtatggcaacaagatcacagacctgccccggggcgtgtttggaggcctgtacaccctgcagctgctgctgctgaatgccaacaagatcaactgcatccggccagatgccttccaggacctgcagaacctgagcctgctgagcctgtatgacaacaagatccagagcctggccaagggcaccttcaccagcctgcgggccatccagaccctgcacctggcccagaaccccttcatctgtgactgcaacctgaagtggctggccgacttcctgcggaccaaccccatcgagaccagcggggcccgctgtgccagcccccggcggctggccaacaagagaattggccagatcaagagcaagaagttccgctgcagcgccaaggagcagtacttcatccctggaacagaggactaccagctgaacagcgagtgcaacagtgatgtggtgtgcccccacaagtgccgctgtgaggccaacgtggtggagtgcagcagcctgaagctgaccaagatccctgagcgcatcccccagagcacagctgagctgcggctgaacaacaatgagatcagcatcctggaggccaccggcatgttcaagaagctgacccacctgaagaagatcaacctgagcaacaacaaggtgtctgaaattgaagatggagcctttgaaggagctgcctctgtgtctgagctgcacctgacagccaaccagctggagagcatccgcagcggcatgttccggggcctggatggcctgcggaccctgatgctgaggaacaaccgcatcagctgcatccacaatgacagcttcaccggcctgagaaatgtgcggctgctgagcctgtatgacaaccagatcaccaccgtgtcccctggggcctttgacaccctgcagagcctgagcaccctgaacctgctggccaaccccttcaactgcaactgccagctggcctggctgggcggctggctgaggaagaggaagatcgtgactggaaacccccgctgccagaacccagacttcctgcggcagatccccctgcaggatgtggccttcccagacttccgctgtgaggagggccaggaggagggcggctgcctgccccggccccagtgcccccaggagtgtgcctgcctggacacagtggtgcgctgcagcaacaagcacctgcgggccctgcccaagggcatccccaagaatgtgacagagctgtacctggatggcaaccagttcaccctggtgcccggccagctgagcaccttcaagtacctgcagctggtggacctgagcaacaacaagatcagcagcctgagcaacagcagcttcaccaacatgagccagctgaccaccctcatcctgagctacaatgccctgcagtgcatcccccccctggccttccagggcctgcggagcctgcggctgctgagcctgcacggcaatgacatcagcaccctgcaggagggcatctttgctgatgtgaccagcctgagccacctggccatcggggccaaccccctgtactgtgactgccacctgcgctggctgagctcctgggtgaagacaggctacaaggagcccggcatcgcccgctgtgccggcccccaggacatggagggcaagctgctgctgaccaccccagccaagaagtttgagtgccagggcccccccaccctggccgtgcaggccaagtgtgacctgtgcctgagcagcccctgccagaaccagggcacctgccacaatgaccccctggaggtgtaccgctgtgcctgccccagcggctacaagggccgggactgtgaggtgtccctggacagctgcagcagcggcccctgtgaaaatggaggcacctgccacgcccaggagggagaagatgcccccttcacctgcagctgccccactggatttgagggccccacctgtggggtgaacacagatgactgtgtggaccacgcctgtgccaacggcggcgtgtgtgtggatggagtgggcaactacacctgccagtgccccctgcagtatgagggcaaggcctgtgagcagctggtggacctgtgcagcccagacctgaacccctgccagcacgaggcccagtgtgtgggcaccccagatggcccccgctgtgagtgcatgcctggctacgccggggacaactgcagcgagaaccaggatgactgccgggaccaccgctgccagaatggagcccagtgcatggatgaggtgaacagctacagctgcctgtgtgccgagggctacagcggccagctgtgtgagatccccccccacctgcctgcccccaagagcccctgtgagggcacagagtgccagaatggagccaactgtgtggaccagggcaacagacctgtgtgccagtgcctgcccggctttggaggcccagaatgtgagaagctgctgtctgtgaactttgtggaccgggacacctacctgcagttcacagacctgcagaactggccccgggccaacatcaccctgcaggtgtccacagctgaggacaatggcatcctgctgtacaacggggacaatgaccacatcgctgtggagctgtaccagggccacgtgcgggtgtcctatgaccccggcagctaccccagcagcgccatctacagcgctgagaccatcaatgatggccagttccacacagtggagctggtggcctttgaccagatggtgaacctgagcattgatggcggcagccccatgaccatggacaactttgggaagcactacaccctgaacagcgaggcccccctgtatgtgggcggcatgcctgtggatgtgaacagcgctgccttccggctgtggcagatcctgaatggcaccggcttccacggctgcatccggaacctgtacatcaacaatgagctgcaggacttcaccaagacccagatgaagccaggagtggtgcccggctgtgagccctgcaggaagctgtactgcctgcacggcatctgccagcccaatgccaccccaggccccatgtgccactgtgaggccggctgggtgggcctgcactgtgaccagcctgcagatggcccctgccacggccacaagtgtgtgcacggccagtgtgtgcccctggatgccctgagctacagctgccagtgccaggacggctacagcggggccctgtgcaaccaggccggggccctggccgagccctgccggggcctgcagtgcctgcacggccactgccaggccagcggcaccaagggggcccactgtgtgtgtgaccccggcttctctggagagctgtgtgagcaggagagcgagtgccgcggggaccctgtgcgggacttccaccaggtgcagaggggctacgccatctgccagaccacccggcccctgtcctgggtggagtgccggggcagctgccccggccagggctgctgccagggcctgcggctgaagaggaggaagttcacctttgaatgttctgatggcaccagctttgctgaggaggtggagaagcccaccaagtgtggctgtgccctgtgtgcctag

SEQ ID NO: 134734 - DNA, 2349 bp, Artificial Sequence
  derived and/or modified sequence
ctgtggctgctgctgtgggccgccgcctggaggctgggcgccagcgcctgcccagccctgtgcacctgcaccggcaccaccgtggactgccacggcaccggcctgcaggccatccccaagaacatccccaggaacacagagcggctggagctgaatggaaacaacatcacccgcatccacaagaatgactttgctggcctgaagcagctgcgggtgctgcagctgatggagaaccagatcggggctgtggagcggggggcctttgatgacatgaaggagctggagcggctgcggctgaacagaaaccagctgcacatgctgcctgagctgctcttccagaacaaccaggccctgagccggctggacctgtctgaaaatgccatccaggccatccccaggaaggccttccggggggccacagacctgaagaacctgcagctggacaagaaccagatcagctgcatcgaggagggcgccttccgggccctgcggggcctggaggtgctgaccctgaacaacaacaacatcaccaccatccctgtgtcctccttcaaccacatgcccaagctgcggaccttccggctgcacagcaaccacctgttctgtgactgccacctggcctggctgagccagtggctgcggcagaggcccaccatcggcctcttcacccagtgcagcggccctgccagcctgcggggcctgaatgtggccgaggtgcagaagtctgagttcagctgcagcggccagggcgaggccggccgggtgcccacctgcaccctgagcagcggcagctgcccagccatgtgcacctgcagcaatggaattgtggactgccggggcaagggcctgacagccatcccagccaacctgcctgagaccatgacagagatccggctggagctgaatggcatcaagagcatccccccaggggccttcagcccctacaggaagctgcggcgcatctgccccctgtccttctgcagcccctgccgggacctgagcaacaaccagattgctgagatcgccccagatgccttccagggcctgcggagcctgaacagcctggtgctgtatggcaacaagatcacagacctgccccggggcgtgtttggaggcctgtacaccctgcagctgctgctgctgaatgccaacaagatcaactgcatccggccagatgccttccaggacctgcagaacctgagcctgctgagcctgtatgacaacaagatccagagcctggccaagggcaccttcaccagcctgcgggccatccagaccctgcacctggcccagaaccccttcatctgtgactgcaacctgaagtggctggccgacttcctgcggaccaaccccatcgagaccagcggggcccgctgtgccagcccccggcggctggccaacaagagaattggccagatcaagagcaagaagttccgctgcagcgccaaggagcagtacttcatccctggaacagaggactaccagctgaacagcgagtgcaacagtgatgtggtgtgcccccacaagtgccgctgtgaggccaacgtggtggagtgcagcagcctgaagctgaccaagatccctgagcgcatcccccagagcacagctgagctgcggctgaacaacaatgagatcagcatcctggaggccaccggcatgttcaagaagctgacccacctgaagaagatcaacctgagcaacaacaaggtgtctgaaattgaagatggagcctttgagggcgccgcctctgtgtctgagctgcacctgacagccaaccagctggagagcatccgcagcggcatgttccggggcctggatggcctgcggaccctgatgctgaggaacaaccgcatcagctgcatccacaatgacagcttcaccggcctgagaaatgtgcggctgctgagcctgtatgacaaccagatcaccaccgtgtcccctggggcctttgacaccctgcagagcctgagcaccctgaacctgctggccaaccccttcaactgcaactgccagctggcctggctgggcggctggctgaggaagaggaagatcgtgacaggcaacccccgctgccagaacccagacttcctgcggcagatccccctgcaggatgtggccttcccagacttccgctgtgaggagggccaggaggagggcggctgcctgccccggccccagtgcccccaggagtgtgcctgcctggacacagtggtgcgctgcagcaacaagcacctgcgggccctgcccaagggcatccccaagaatgtgacagagctgtacctggatggcaaccagttcaccctggtgcccggccagctgagcaccttcaagtacctgcagctggtgtag

SEQ ID NO: 134735 - DNA, 1695 bp, Artificial Sequence
  derived and/or modified sequence
gggagacgcaggcggcgaaacggcagaggagccgagccccctccgcccaaggcgccctccctccgtccgcgcacaggcgccgtcgcttggaggagcaaggtgcctcccagcccgcaggggcgccgcgcgcaagcccgcgggctcttcggtggctctgccccgggactgcacctggaggcggccccggacggggatggtcagcggctgctgccgtctggctcgcgagcgggacgctgtgagggcaccatggcgctgactcccgggtgggggtcctcggcggggccggtccggccggagctctggctgctgctgtgggcagccgcgtggcgcctgggtgcctcggcgtgccccgccctctgcacctgcaccggaaccacggtggactgccacggcacggggctgcaggccattcccaagaatatacctcggaacaccgagcgcctggaactcaatggcaacaacatcactcggatccataagaatgactttgcggggctcaagcagctgcgggtgctgcagctgatggagaaccagattggagcagtggaacgtggtgcttttgatgacatgaaggagctggagcggctgcgactgaaccgaaaccagctgcacatgttaccggaactgctgttccagaacaaccaggctttgtcaagactggacttgagtgagaacgccatccaggccatccccaggaaagcttttcggggagctacggaccttaaaaatttacagctggacaagaaccagatcagctgcattgaggaaggggccttccgtgctctgcgggggctggaggtgctgaccctgaacaacaacaatatcaccaccatccccgtgtccagcttcaaccatatgcccaagctacggaccttccgcctgcactccaaccacctgttttgcgactgccacctggcctggctctcgcagtggctgaggcagcggccaaccatcgggctcttcacccagtgctcgggcccagccagcctgcgtggcctcaatgtggcagaggtccagaagagtgagttcagctgctcaggccagggagaagcggggcgcgtgcccacctgcaccctgtcctccggctcctgcccggccatgtgcacctgcagcaatggcatcgtggactgtcgtggaaaaggcctcactgccatcccggccaacctgcccgagaccatgacggagatacgcctggagctgaacggcatcaagtccatccctcctggagccttctcaccctacagaaagctacggaggatagacctgagcaacaatcagatcgctgagattgcacccgacgccttccagggcctccgctccctgaactcgctccacactggccccgtcacctgtccacacacgacaggcacacacagctcccactgcagggcctttgctgttgctgtgcctcactccaggaatgaccttgaagccatgtttgaagaggaagtacccaggattttttactcagcttgaacgtttacgagggtagcttgtggggtccgattatgatattgggaatggcatacaacccccctccccaaacctcctggatgttttcactgtcctcctgaacccacccatgtctacatgtgtttttttgaacttttgtttttttaaaaaacctatacatggaattcatgctcaatgcagaaaactttgaaaatgctaaagtataaaaaaaaaatgcttgaa

SEQ ID NO: 134736 - DNA, 1230 bp, Artificial Sequence
  derived and/or modified sequence
atggccctgaccccaggctggggcagcagcgctggccctgtgcggcctgagctgtggctgctgctgtgggccgccgcctggaggctgggcgccagcgcctgcccagccctgtgcacctgcaccggcaccaccgtggactgccacggcaccggcctgcaggccatccccaagaacatccccaggaacacagagcggctggagctgaatggaaacaacatcacccgcatccacaagaatgactttgctggcctgaagcagctgcgggtgctgcagctgatggagaaccagattggagctgtggagcggggggcctttgatgacatgaaggagctggagcggctgcggctgaacagaaaccagctgcacatgctgcctgagctgctcttccagaacaaccaggccctgagccggctggacctgtctgaaaatgccatccaggccatccccaggaaggccttccggggggccacagacctgaagaacctgcagctggacaagaaccagatcagctgcatcgaggagggcgccttccgggccctgcggggcctggaggtgctgaccctgaacaacaacaacatcaccaccatccctgtgagcagcttcaaccacatgcccaagctgcggaccttccggctgcacagcaaccacctgttctgtgactgccacctggcctggctgagccagtggctgcggcagaggcccaccatcggcctcttcacccagtgcagcggccctgccagcctgcggggcctgaatgtggccgaggtgcagaagtctgagttcagctgcagcggccagggcgaggccggccgggtgcccacctgcaccctgagcagcggcagctgcccagccatgtgcacctgcagcaatggcatcgtggactgccggggcaagggcctgacagccatcccagccaacctgcctgagaccatgacagagatccggctggagctgaatggcatcaagagcatccccccaggggccttcagcccctacaggaagctgcggagaattgacctgagcaacaaccagattgctgagatcgccccagatgccttccagggcctgcggagcctgaacagcctgcacacaggccctgtgacctgcccccacaccaccggcacccacagcagccactgccgggcctttgctgtggccgtgccccacagcagaaatgacctggaggccatgtttgaggaggaggtgccccgcatcttctacagcgcctag

SEQ ID NO: 134737 - DNA, 1143 bp, Artificial Sequence
  derived and/or modified sequence
atggccctgaccccaggctggggcagcagcgctggccctgtgcggcctgagctgtggctgctgctgtgggccgccgcctggaggctgggcgccagcgcctgcccagccctgtgcacctgcaccggcaccaccgtggactgccacggcaccggcctgcaggccatccccaagaacatccccaggaacacagagcggctggagctgaatggaaacaacatcacccgcatccacaagaatgactttgctggcctgaagcagctgcgggtgctgcagctgatggagaaccagattggagctgtggagcggggggcctttgatgacatgaaggagctggagcggctggacctgtctgaaaatgccatccaggccatccccaggaaggccttccggggggccacagacctgaagaacctgcagctggacaagaaccagatcagctgcatcgaggagggcgccttccgggccctgcggggcctggaggtgctgaccctgaacaacaacaacatcaccaccatccctgtgagcagcttcaaccacatgcccaagctgcggaccttccggctgcacagcaaccacctgttctgtgactgccacctggcctggctgagccagtggctgcggcagaggcccaccatcggcctcttcacccagtgcagcggccctgccagcctgcggggcctgaatgtggccgaggtgcagaagtctgagttcagctgcagcggccagggcgaggccggccgggtgcccacctgcaccctgagcagcggcagctgcccagccatgtgcacctgcagcaatggcatcgtggactgccggggcaagggcctgacagccatcccagccaacctgcctgagaccatgacagagatccggctggagctgaatggcatcaagagcatccccccaggggccttcagcccctacaggaagctgcggagaattgacctgagcaacaaccagattgctgagatcgccccagatgccttccagggcctgcggagcctgaacagcctggtgctgtatggcaacaagatcacagacctgccccggggcgtgtttggaggcctgtacaccctgcagctgctgctgctgaatgccaacaagatcaactgcatccggccagatgccttccaggacctgtag

SEQ ID NO: 134738 - DNA, 2448 bp, Artificial Sequence
  derived and/or modified sequence
atggccctgaccccaggctggggcagcagcgctggccctgtgcggcctgagctgtggctgctgctgtgggccgccgcctggaggctgggcgccagcgcctgcccagccctgtgcacctgcaccggcaccaccgtggactgccacggcaccggcctgcaggccatccccaagaacatccccaggaacacagagcggctggagctgaatggaaacaacatcacccgcatccacaagaatgactttgctggcctgaagcagctgcgggtgctgcagctgatggagaaccagattggagctgtggagcggggggcctttgatgacatgaaggagctggagcggctgcggctgaacagaaaccagctgcacatgctgcctgagctgctcttccagaacaaccaggccctgagccggctggacctgtctgaaaatgccatccaggccatccccaggaaggccttccggggggccacagacctgaagaacctgcagctggacaagaaccagatcagctgcatcgaggagggcgccttccgggccctgcggggcctggaggtgctgaccctgaacaacaacaacatcaccaccatccctgtgagcagcttcaaccacatgcccaagctgcggaccttccggctgcacagcaaccacctgttctgtgactgccacctggcctggctgagccagtggctgcggcagaggcccaccatcggcctcttcacccagtgcagcggccctgccagcctgcggggcctgaatgtggccgaggtgcagaagtctgagttcagctgcagcggccagggcgaggccggccgggtgcccacctgcaccctgagcagcggcagctgcccagccatgtgcacctgcagcaatggcatcgtggactgccggggcaagggcctgacagccatcccagccaacctgcctgagaccatgacagagatccggctggagctgaatggcatcaagagcatccccccaggggccttcagcccctacaggaagctgcggcgcatctgccccctgtccttctgcagcccctgccgggacctgagcaacaaccagattgctgagatcgccccagatgccttccagggcctgcggagcctgaacagcctggtgctgtatggcaacaagatcacagacctgccccggggcgtgtttggaggcctgtacaccctgcagctgctgctgctgaatgccaacaagatcaactgcatccggccagatgccttccaggacctgcagaacctgagcctgctgagcctgtatgacaacaagatccagagcctggccaagggcaccttcaccagcctgcgggccatccagaccctgcacctggcccagaaccccttcatctgtgactgcaacctgaagtggctggccgacttcctgcggaccaaccccatcgagaccagcggggcccgctgtgccagcccccggcggctggccaacaagagaattggccagatcaagagcaagaagttccgctgcagcgccaaggagcagtacttcatccctggaacagaggactaccagctgaacagcgagtgcaacagtgatgtggtgtgcccccacaagtgccgctgtgaggccaacgtggtggagtgcagcagcctgaagctgaccaagatccctgagcgcatcccccagagcacagctgagctgcggctgaacaacaatgagatcagcatcctggaggccaccggcatgttcaagaagctgacccacctgaagaagatcaacctgagcaacaacaaggtgtctgaaattgaagatggagcctttgaaggagctgcctctgtgtctgagctgcacctgacagccaaccagctggagagcatccgcagcggcatgttccggggcctggatggcctgcggaccctgatgctgaggaacaaccgcatcagctgcatccacaatgacagcttcaccggcctgagaaatgtgcggctgctgagcctgtatgacaaccagatcaccaccgtgtcccctggggcctttgacaccctgcagagcctgagcaccctgaacctgctggccaaccccttcaactgcaactgccagctggcctggctgggcggctggctgaggaagaggaagatcgtgactggaaacccccgctgccagaacccagacttcctgcggcagatccccctgcaggatgtggccttcccagacttccgctgtgaggagggccaggaggagggcggctgcctgccccggccccagtgcccccaggagtgtgcctgcctggacacagtggtgcgctgcagcaacaagcacctgcgggccctgcccaagggcatccccaagaatgtgacagagctgtacctggatggcaaccagttcaccctggtgcccggccagctgagcaccttcaagtacctgcagctggtgatcctgagctacaatgccctgcagtgcatcccccccctggccttccagtag

SEQ ID NO: 134739 - DNA, 4386 bp, Artificial Sequence
  derived and/or modified sequence
atggccctgaccccaggctggggcagcagcgctggccctgtgcggcctgagctgtggctgctgctgtgggccgccgcctggaggctgggcgccagcgcctgcccagccctgtgcacctgcaccggcaccaccgtggactgccacggcaccggcctgcaggccatccccaagaacatccccaggaacacagagcggctggagctgaatggaaacaacatcacccgcatccacaagaatgactttgctggcctgaagcagctgcgggtgctgcagctgatggagaaccagattggagctgtggagcggggggcctttgatgacatgaaggagctggagcggctgcggctgaacagaaaccagctgcacatgctgcctgagctgctcttccagaacaaccaggccctgagccggctggacctgtctgaaaatgccatccaggccatccccaggaaggccttccggggggccacagacctgaagaacctgcagctggacaagaaccagatcagctgcatcgaggagggcgccttccgggccctgcggggcctggaggtgctgaccctgaacaacaacaacatcaccaccatccctgtgagcagcttcaaccacatgcccaagctgcggaccttccggctgcacagcaaccacctgttctgtgactgccacctggcctggctgagccagtggctgcggcagaggcccaccatcggcctcttcacccagtgcagcggccctgccagcctgcggggcctgaatgtggccgaggtgcagaagtctgagttcagctgcagcggccagggcgaggccggccgggtgcccacctgcaccctgagcagcggcagctgcccagccatgtgcacctgcagcaatggcatcgtggactgccggggcaagggcctgacagccatcccagccaacctgcctgagaccatgacagagatccggctggagctgaatggcatcaagagcatccccccaggggccttcagcccctacaggaagctgcggagaattgacctgagcaacaaccagattgctgagatcgccccagatgccttccagggcctgcggagcctgaacagcctggtgctgtatggcaacaagatcacagacctgccccggggcgtgtttggaggcctgtacaccctgcagctgctgctgctgaatgccaacaagatcaactgcatccggccagatgccttccaggacctgcagaacctgagcctgctgagcctgtatgacaacaagatccagagcctggccaagggcaccttcaccagcctgcgggccatccagaccctgcacctggcccagaaccccttcatctgtgactgcaacctgaagtggctggccgacttcctgcggaccaaccccatcgagaccagcggggcccgctgtgccagcccccggcggctggccaacaagagaattggccagatcaagagcaagaagttccgctgcagcgccaaggagcagtacttcatccctggaacagaggactaccagctgaacagcgagtgcaacagtgatgtggtgtgcccccacaagtgccgctgtgaggccaacgtggtggagtgcagcagcctgaagctgaccaagatccctgagcgcatcccccagagcacagctgagctgcggctgaacaacaatgagatcagcatcctggaggccaccggcatgttcaagaagctgacccacctgaagaagatcaacctgagcaacaacaaggtgtctgaaattgaagatggagcctttgaaggagctgcctctgtgtctgagctgcacctgacagccaaccagctggagagcatccgcagcggcatgttccggggcctggatggcctgcggaccctgatgctgaggaacaaccgcatcagctgcatccacaatgacagcttcaccggcctgagaaatgtgcggctgctgagcctgtatgacaaccagatcaccaccgtgtcccctggggcctttgacaccctgcagagcctgagcaccctgaacctgctggccaaccccttcaactgcaactgccagctggcctggctgggcggctggctgaggaagaggaagatcgtgactggaaacccccgctgccagaacccagacttcctgcggcagatccccctgcaggatgtggccttcccagacttccgctgtgaggagggccaggaggagggcggctgcctgccccggccccagtgcccccaggagtgtgcctgcctggacacagtggtgcgctgcagcaacaagcacctgcgggccctgcccaagggcatccccaagaatgtgacagagctgtacctggatggcaaccagttcaccctggtgcccggccagctgagcaccttcaagtacctgcagctggtggacctgagcaacaacaagatcagcagcctgagcaacagcagcttcaccaacatgagccagctgaccaccctcatcctgagctacaatgccctgcagtgcatcccccccctggccttccagggcctgcggagcctgcggctgctgagcctgcacggcaatgacatcagcaccctgcaggagggcatctttgctgatgtgaccagcctgagccacctggccatcggggccaaccccctgtactgtgactgccacctgcgctggctgagctcctgggtgaagacaggctacaaggagcccggcatcgcccgctgtgccggcccccaggacatggagggcaagctgctgctgaccaccccagccaagaagtttgagtgccagggcccccccaccctggccgtgcaggccaagtgtgacctgtgcctgagcagcccctgccagaaccagggcacctgccacaatgaccccctggaggtgtaccgctgtgcctgccccagcggctacaagggccgggactgtgaggtgtccctggacagctgcagcagcggcccctgtgaaaatggaggcacctgccacgcccaggagggagaagatgcccccttcacctgcagctgccccactggatttgagggccccacctgtggggtgaacacagatgactgtgtggaccacgcctgtgccaacggcggcgtgtgtgtggatggagtgggcaactacacctgccagtgccccctgcagtatgagggcaaggcctgtgagcagctggtggacctgtgcagcccagacctgaacccctgccagcacgaggcccagtgtgtgggcaccccagatggcccccgctgtgagtgcatgcctggctacgccggggacaactgcagcgagaaccaggatgactgccgggaccaccgctgccagaatggagcccagtgcatggatgaggtgaacagctacagctgcctgtgtgccgagggctacagcggccagctgtgtgagatccccccccacctgcctgcccccaagagcccctgtgagggcacagagtgccagaatggagccaactgtgtggaccagggcaacagacctgtgtgccagtgcctgcccggctttggaggcccagaatgtgagaagctgctgtctgtgaactttgtggaccgggacacctacctgcagttcacagacctgcagaactggccccgggccaacatcaccctgcaggtgtccacagctgaggacaatggcatcctgctgtacaacggggacaatgaccacatcgctgtggagctgtaccagggccacgtgcgggtgtcctatgaccccggcagctaccccagcagcgccatctacagcgctgagaccatcaatgatggccagttccacacagtggagctggtggcctttgaccagatggtgaacctgagcattgatggcggcagccccatgaccatggacaactttgggaagcactacaccctgaacagcgaggcccccctgtatgtgggcggcatgcctgtggatgtgaacagcgctgccttccggctgtggcagatcctgaatggcaccggcttccacggctgcatccggaacctgtacatcaacaatgagctgcaggacttcaccaagacccagatgaagccaggagtggtgcccggctgtgagccctgcaggaagctgtactgcctgcacggcatctgccagcccaatgccaccccaggccccatgtgccactgtgaggccggctgggtgggcctgcactgtgaccagcctgcagatggcccctgccacggccacaagtgtgtgcacggccagtgtgtgcccctggatgccctgagctacagctgccagtgccaggacggctacagcggggccctgtgcaaccagagccccagcgctgggggcaccctgagcggcaccttcaccaggagcagaggagccatgcccagcgcccggccccgggccccctgccacggctggagcgctggggcccgggcccaggcccgggccgccgcccgggccttcggctag

SEQ ID NO: 134740 - DNA, 7859 bp, Artificial Sequence
  derived and/or modified sequence
gggagagggagacgcaggcggcgaaacggcagaggagccgagccccctccgcccaaggcgccctccctccgtccgcgcacaggcgccgtcgcttggaggagcaaggtgcctcccagcccgcaggggcgccgcgcgcaagcccgcgggctcttcggtggctctgccccgggactgcacctggaggcggccccggacggggatggtcagcggctgctgccgtctggctcgcgagcgggacgctgtgagggcaccatggcgctgactcccgggtgggggtcctcggcggggccggtccggccggagctctggctgctgctgtgggcagccgcgtggcgcctgggtgcctcggcgtgccccgccctctgcacctgcaccggaaccacggtggactgccacggcacggggctgcaggccattcccaagaatatacctcggaacaccgagcgcctggaactcaatggcaacaacatcactcggatccataagaatgactttgcggggctcaagcagctgcgggtgctgcagctgatggagaaccagattggagcagtggaacgtggtgcttttgatgacatgaaggagctggagcggctggacttgagtgagaacgccatccaggccatccccaggaaagcttttcggggagctacggaccttaaaaatttacagctggacaagaaccagatcagctgcattgaggaaggggccttccgtgctctgcgggggctggaggtgctgaccctgaacaacaacaatatcaccaccatccccgtgtccagcttcaaccatatgcccaagctacggaccttccgcctgcactccaaccacctgttttgcgactgccacctggcctggctctcgcagtggctgaggcagcggccaaccatcgggctcttcacccagtgctcgggcccagccagcctgcgtggcctcaatgtggcagaggtccagaagagtgagttcagctgctcaggccagggagaagcggggcgcgtgcccacctgcaccctgtcctccggctcctgcccggccatgtgcacctgcagcaatggcatcgtggactgtcgtggaaaaggcctcactgccatcccggccaacctgcccgagaccatgacggagatacgcctggagctgaacggcatcaagtccatccctcctggagccttctcaccctacagaaagctacggaggatagacctgagcaacaatcagatcgctgagattgcacccgacgccttccagggcctccgctccctgaactcgctggtcctctatggaaacaagatcacagacctcccccgtggtgtgtttggaggcctatacaccctacagctcctgctcctgaatgccaacaagatcaactgcatccggcccgatgccttccaggacctgcagaacctctcactgctctccctgtatgacaacaagatccagagcctcgccaagggcactttcacctccctgcgggccatccagactctgcacctggcgcagaaccctttcatttgcgactgtaacctcaagtggctggcagacttcctgcgcaccaatcccatcgagacgagtggtgcccgctgtgccagtccccggcgcctcgccaacaagcgcatcgggcagatcaagagcaagaagttccggtgctcagccaaagagcagtacttcattccaggcacggaggattaccagctgaacagcgagtgcaacagcgacgtggtctgtccccacaagtgccgctgtgaggccaacgtggtggagtgctccagcctgaagctcaccaagatccctgagcgcatcccccagtccacggcagaactgcgattgaataacaatgagatttccatcctggaggccactgggatgtttaaaaaacttacacatctgaagaaaatcaatctgagcaacaacaaggtgtcagaaattgaagatggggccttcgagggcgcagcctctgtgagcgagctgcacctaactgccaaccagctggagtccatccggagcggcatgttccggggtctggatggcttgaggaccctaatgctgcggaacaaccgcatcagctgcatccacaacgacagcttcacgggcctgcgcaacgtccggctcctctcgctctacgacaaccagatcaccaccgtatccccaggagccttcgacaccctccagtccctctccacactgaatctcctggccaaccctttcaactgcaactgccagctggcctggctaggaggctggctacggaagcgcaagatcgtgacggggaacccgcgatgccagaaccctgactttttgcggcagattcccctgcaggacgtggccttccctgacttcaggtgtgaggaaggccaggaggaggggggctgcctgccccgcccacagtgcccacaggagtgcgcctgcctggacaccgtggtccgatgcagcaacaagcacctgcgggccctgcccaagggcattcccaagaatgtcacagaactctatttggacgggaaccagttcacgctggttccgggacagctgtctaccttcaagtacctgcagctcgtggacctgagcaacaacaagatcagttccttaagcaattcctccttcaccaacatgagccagctgaccactctgatcctcagctacaatgccctgcagtgcatcccgcctttggccttccagggactccgctccctgcgcctgctgtctctccacggcaatgacatctccaccctccaagagggcatctttgcagacgtgacctccctgtctcacctggccattggtgccaaccccctatactgtgactgccacctccgctggctgtccagctgggtgaagactggctacaaggaaccgggcattgctcgttgtgctgggccccaggacatggagggcaagctgctcctcaccacgcctgccaagaagtttgaatgccaaggtcctccaacgctggctgtccaggccaagtgtgatctctgcttgtccagtccgtgccagaaccagggcacctgccacaacgacccccttgaggtgtacaggtgcgcctgccccagcggctataagggtcgagactgtgaggtgtccctggacagctgttccagtggcccctgtgaaaatgggggcacctgccatgcacaggagggcgaggatgccccgttcacgtgctcctgtcccaccggctttgaaggaccaacctgtggggtgaacacagatgactgtgtggatcatgcctgtgccaatgggggcgtctgtgtggatggtgtgggcaactacacctgccagtgccccctgcagtatgagggaaaggcctgtgagcagctggtggacttgtgctctccggatctgaacccatgtcaacacgaggcccagtgtgtgggcaccccggatgggcccaggtgtgagtgcatgccaggttatgcaggtgacaactgcagtgagaaccaggatgactgcagggaccaccgctgccagaatggggcccagtgtatggatgaagtcaacagctactcctgcctctgtgctgagggctacagtggacagctctgtgagatccctccccatctgcctgcccccaagagcccctgtgaggggactgagtgccagaatggggccaactgtgtggaccagggcaacaggcctgtgtgccagtgcctcccaggcttcggtggccctgagtgtgagaagttgctcagtgtcaactttgtggatcgggacacttacctgcagttcactgacctgcaaaactggccacgggccaacatcacgttgcaggtctccacggcagaggacaatgggatccttctgtacaacggggacaacgaccacattgcagttgagctgtaccagggccatgtgcgtgtcagctacgacccaggcagctaccccagctctgccatctacagtgctgagacgatcaacgatgggcaattccacaccgttgagctggttgcctttgaccagatggtgaatctctccattgatggcgggagccccatgaccatggacaactttggcaaacattacacgctcaacagcgaggcgccactctatgtgggagggatgcccgtggatgtcaactcagctgccttccgcctgtggcagatcctcaacggcaccggcttccacggttgcatccgaaacctgtacatcaacaacgagctgcaggacttcaccaagacgcagatgaagccaggcgtggtgccaggctgcgaaccctgccgcaagctctactgcctgcatggcatctgccagcccaatgccaccccagggcccatgtgccactgcgaggctggctgggtgggcctgcactgtgaccagcccgctgacggcccctgccatggccacaagtgtgtccatgggcaatgcgtgcccctcgacgctctttcctacagctgccagtgccaggatgggtactcgggggcactgtgcaaccaggccggggccctggcagagccctgcagaggcctgcagtgcctgcatggccactgccaggcctcaggcaccaagggggcacactgtgtgtgtgaccccggcttttcgggcgagctgtgtgagcaagagtccgagtgccggggggaccctgtccgggactttcaccaggtccagaggggctatgccatctgccagaccacgcgccccctgtcatgggtggagtgccggggctcgtgcccaggccagggctgctgccagggccttcggctgaagcggaggaagttcacctttgagtgcagcgatgggacctcttttgccgaggaggtggaaaagcccaccaagtgtggctgtgccctctgcgcatagcgctgggcgtggacaggccggtgagggcgggcaaggggccccagccgctgcagcagcggagacagtcgccagcagctgggctggggtgcaggtcatcacaggacggctcctgggcagctgggccctcctgggtggggtggtgccagagcagccttttaaaagcaaattgcgccatagctgggggcagcgggggtgggcgaggcctgagctgcgggctgccctctccggaagtgccttgcacaaataggcgcttaataaatatttgttgagtgaatgtgtgcgtgaggtcaggccaagaagtgcagaacgatgacacccctccttacctgctatctgaatctggagaagaaaaatgacagccttccaaaccaacccttccctttggcctgtggcccaggctggcttggaactgggtctgtggccccagaagcctcttacccctctgcgggcaaccatgaagtactgtcagcctccccgggaagccagcctggttcattctgctgctacagaatctgctggtggtaggccaggctctggagcgggggtgccgcctcctgctggccagggagggtcggacccttgccccctgggctgactggcagctctgcagccacggcttgggaacgaggctgtgggtggaggtggttcttaggaccaggcctctgaatcctaaagttctagcatgactactgtagctgcgagggcttatgtggaggaaacagtcacaggggctgctcagggtggcagaccccactaaagagggcagagggttctttgctctagataaacaaacatcatctgcctccagacactggccacagtaggagtattggtcctgggcttccccagccaccagtcagccacaagctgtcggtgacctattggtagagggactgggtgtgagggtctgggccagggtgcttgacctgggagcagctggttcagagtccttcacaccgcaggccagtagggagcagtggaagggacagtgctccaggcattgggaagtccctgctggctctatcactcggggcaaacttctccccacctgggccttgggttcttcagctataaaatggccagaggtggggggcgggatgactaaaggaacagtgcagactcccccactgtggtcttgggaggccagaggagttagaagacctatctatctatctatctatctacattgatcacatcaaaagtatttatgtgcctaacccggggctggggattgtggacgttctggcctaatggacagatgtgaactcatcccagagcatcgcaggaatgaccaggatgcccgggaagagttgagctgagtgggggctccagccacagacagcggcccaggccagggagttgctggcaacgaaggagccagtggtggaagaagaagaggccctgaatatacgattgcctgcccacgttgtcttctcttccatacacagtgaaaatgtagaaagatggtttgtgaggccaaactgtgaatgggctaaagggaggcaaagttgcactctccttccccagagggctcaccaagagggcacacccccgggggttctggtgggcaacgggggtgagcatgtccctgccctggctccctccatctgtgaccaggaggcatggctgggtgtatgttcaggtgaggctcagagtggcattgtgtccctgtcccctgcccagggcagtgaggggagcccttgatgctgattagaaggctagaactggggtagaggtgcctggcatgtctcatgccatggggactcaatctagcaactgtgagtcctggggtccctgtgatgggaagagggcagtgccctgcccaatgtggcaggtgtcctcatggcaggatctgcccctcaccagggggctgggatctacttgcttggagctctgagcaaggccacaatgcccgcccccacccccaagtagactgcagcctgggcctcatggggcttctcccaggcccacatggcatccctctctgagtttccaggccaccgtgggaccctgcagagcatctgcaccgggctggatagggcagaaaagctcaagggcagctagcttgcctcttccctggaagaaaggtgctctgggactcaccaaccctgagaaagatagctttcctggccaccaccattccccaccaccctggagaagccaattcccaggcttgaagggcactggctggcaggaggcctcttcattctgcaggaggtggaaaggacacctgtagacaggtgatgctcacccctcacctggcgccatggggctgggaggtgagcggctggcatgtttgttcctagggagcaccatgtgagcttaaggctcccctgaccggccccaccacatggcccagcctcctagcacagcagcgctgacctcagtgcagtctgaggattggaatccaccatgagatgatgtgagagctgtgtgccccaggatcaactttttctccaacttggccatcagccagcgagttgctaaggacctgagtcagcactcacgttgcctattcacactccgcttgaaagtccggaaggtggctactgcaaaatcacccctctgagaagtcctctctccacatcttgtccccctttgtgaagacccctagttcgctctgcattttaggcatgaagagatacagcagggtgcgtccggagggagctgtggccttgcaacaccactggcaacagggccggggctcccggtgaaggtgtcaggaagtggaaaaggctggactttgtctcctctttgcctgctggtagcctaaccgcaaaagtatctctttatacagaatacttacagattctaatatatatttgtatttcattttgttacagtatttttatatgttaaagtcaacatccagcgtcttgttttgcctttcagatgctatgtggtcgtggcacgttttgttgggggtttctgtagtcgtcttgtttggatcaactcctagaggctggtttagaacaggcccatgagggagctgcacctgccctggaagtattgttttagactatgtcgatattgtctgttgtcttccatgtgaacatgacattgagtcactctgc

SEQ ID NO: 134741 - DNA, 7889 bp, Artificial Sequence
  derived and/or modified sequence
gggagagggagacgcaggcggcgaaacggcagaggagccgagccccctccgcccaaggcgccctccctccgtccgcgcacaggcgccgtcgcttggaggagcaaggtgcctcccagcccgcaggggcgccgcgcgcaagcccgcgggctcttcggtggctctgccccgggactgcacctggaggcggccccggacggggatggtcagcggctgctgccgtctggctcgcgagcgggacgctgtgagggcaccatggcgctgactcccgggtgggggtcctcggcggggccggtccggccggagctctggctgctgctgtgggcagccgcgtggcgcctgggtgcctcggcgtgccccgccctctgcacctgcaccggaaccacggtggactgccacggcacggggctgcaggccattcccaagaatatacctcggaacaccgagcgcctggaactcaatggcaacaacatcactcggatccataagaatgactttgcggggctcaagcagctgcgggtgctgcagctgatggagaaccagattggagcagtggaacgtggtgcttttgatgacatgaaggagctggagcggctgcgactgaaccgaaaccagctgcacatgttaccggaactgctgttccagaacaaccaggctttgtcaagactggacttgagtgagaacgccatccaggccatccccaggaaagcttttcggggagctacggaccttaaaaatttacagctggacaagaaccagatcagctgcattgaggaaggggccttccgtgctctgcgggggctggaggtgctgaccctgaacaacaacaatatcaccaccatccccgtgtccagcttcaaccatatgcccaagctacggaccttccgcctgcactccaaccacctgttttgcgactgccacctggcctggctctcgcagtggctgaggcagcggccaaccatcgggctcttcacccagtgctcgggcccagccagcctgcgtggcctcaatgtggcagaggtccagaagagtgagttcagctgctcaggccagggagaagcggggcgcgtgcccacctgcaccctgtcctccggctcctgcccggccatgtgcacctgcagcaatggcatcgtggactgtcgtggaaaaggcctcactgccatcccggccaacctgcccgagaccatgacggagatacgcctggagctgaacggcatcaagtccatccctcctggagccttctcaccctacagaaagctacggaggatatgccccctctccttctgctcaccttgcagagacctgagcaacaatcagatcgctgagattgcacccgacgccttccagggcctccgctccctgaactcgctggtcctctatggaaacaagatcacagacctcccccgtggtgtgtttggaggcctatacaccctacagctcctgctcctgaatgccaacaagatcaactgcatccggcccgatgccttccaggacctgcagaacctctcactgctctccctgtatgacaacaagatccagagcctcgccaagggcactttcacctccctgcgggccatccagactctgcacctggcgcagaaccctttcatttgcgactgtaacctcaagtggctggcagacttcctgcgcaccaatcccatcgagacgagtggtgcccgctgtgccagtccccggcgcctcgccaacaagcgcatcgggcagatcaagagcaagaagttccggtgctcagccaaagagcagtacttcattccaggcacggaggattaccagctgaacagcgagtgcaacagcgacgtggtctgtccccacaagtgccgctgtgaggccaacgtggtggagtgctccagcctgaagctcaccaagatccctgagcgcatcccccagtccacggcagaactgcgattgaataacaatgagatttccatcctggaggccactgggatgtttaaaaaacttacacatctgaagaaaatcaatctgagcaacaacaaggtgtcagaaattgaagatggggccttcgagggcgcagcctctgtgagcgagctgcacctaactgccaaccagctggagtccatccggagcggcatgttccggggtctggatggcttgaggaccctaatgctgcggaacaaccgcatcagctgcatccacaacgacagcttcacgggcctgcgcaacgtccggctcctctcgctctacgacaaccagatcaccaccgtatccccaggagccttcgacaccctccagtccctctccacactgaatctcctggccaaccctttcaactgcaactgccagctggcctggctaggaggctggctacggaagcgcaagatcgtgacggggaacccgcgatgccagaaccctgactttttgcggcagattcccctgcaggacgtggccttccctgacttcaggtgtgaggaaggccaggaggaggggggctgcctgccccgcccacagtgcccacaggagtgcgcctgcctggacaccgtggtccgatgcagcaacaagcacctgcgggccctgcccaagggcattcccaagaatgtcacagaactctatttggacgggaaccagttcacgctggttccgggacagctgtctaccttcaagtacctgcagctcgtgatcctcagctacaatgccctgcagtgcatcccgcctttggccttccagggactccgctccctgcgcctgctgtctctccacggcaatgacatctccaccctccaagagggcatctttgcagacgtgacctccctgtctcacctggccattggtgccaaccccctatactgtgactgccacctccgctggctgtccagctgggtgaagactggctacaaggaaccgggcattgctcgttgtgctgggccccaggacatggagggcaagctgctcctcaccacgcctgccaagaagtttgaatgccaaggtcctccaacgctggctgtccaggccaagtgtgatctctgcttgtccagtccgtgccagaaccagggcacctgccacaacgacccccttgaggtgtacaggtgcgcctgccccagcggctataagggtcgagactgtgaggtgtccctggacagctgttccagtggcccctgtgaaaatgggggcacctgccatgcacaggagggcgaggatgccccgttcacgtgctcctgtcccaccggctttgaaggaccaacctgtggggtgaacacagatgactgtgtggatcatgcctgtgccaatgggggcgtctgtgtggatggtgtgggcaactacacctgccagtgccccctgcagtatgagggaaaggcctgtgagcagctggtggacttgtgctctccggatctgaacccatgtcaacacgaggcccagtgtgtgggcaccccggatgggcccaggtgtgagtgcatgccaggttatgcaggtgacaactgcagtgagaaccaggatgactgcagggaccaccgctgccagaatggggcccagtgtatggatgaagtcaacagctactcctgcctctgtgctgagggctacagtggacagctctgtgagatccctccccatctgcctgcccccaagagcccctgtgaggggactgagtgccagaatggggccaactgtgtggaccagggcaacaggcctgtgtgccagtgcctcccaggcttcggtggccctgagtgtgagaagttgctcagtgtcaactttgtggatcgggacacttacctgcagttcactgacctgcaaaactggccacgggccaacatcacgttgcaggtctccacggcagaggacaatgggatccttctgtacaacggggacaacgaccacattgcagttgagctgtaccagggccatgtgcgtgtcagctacgacccaggcagctaccccagctctgccatctacagtgctgagacgatcaacgatgggcaattccacaccgttgagctggttgcctttgaccagatggtgaatctctccattgatggcgggagccccatgaccatggacaactttggcaaacattacacgctcaacagcgaggcgccactctatgtgggagggatgcccgtggatgtcaactcagctgccttccgcctgtggcagatcctcaacggcaccggcttccacggttgcatccgaaacctgtacatcaacaacgagctgcaggacttcaccaagacgcagatgaagccaggcgtggtgccaggctgcgaaccctgccgcaagctctactgcctgcatggcatctgccagcccaatgccaccccagggcccatgtgccactgcgaggctggctgggtgggcctgcactgtgaccagcccgctgacggcccctgccatggccacaagtgtgtccatgggcaatgcgtgcccctcgacgctctttcctacagctgccagtgccaggatgggtactcgggggcactgtgcaaccaggccggggccctggcagagccctgcagaggcctgcagtgcctgcatggccactgccaggcctcaggcaccaagggggcacactgtgtgtgtgaccccggcttttcgggcgagctgtgtgagcaagagtccgagtgccggggggaccctgtccgggactttcaccaggtccagaggggctatgccatctgccagaccacgcgccccctgtcatgggtggagtgccggggctcgtgcccaggccagggctgctgccagggccttcggctgaagcggaggaagttcacctttgagtgcagcgatgggacctcttttgccgaggaggtggaaaagcccaccaagtgtggctgtgccctctgcgcatagcgctgggcgtggacaggccggtgagggcgggcaaggggccccagccgctgcagcagcggagacagtcgccagcagctgggctggggtgcaggtcatcacaggacggctcctgggcagctgggccctcctgggtggggtggtgccagagcagccttttaaaagcaaattgcgccatagctgggggcagcgggggtgggcgaggcctgagctgcgggctgccctctccggaagtgccttgcacaaataggcgcttaataaatatttgttgagtgaatgtgtgcgtgaggtcaggccaagaagtgcagaacgatgacacccctccttacctgctatctgaatctggagaagaaaaatgacagccttccaaaccaacccttccctttggcctgtggcccaggctggcttggaactgggtctgtggccccagaagcctcttacccctctgcgggcaaccatgaagtactgtcagcctccccgggaagccagcctggttcattctgctgctacagaatctgctggtggtaggccaggctctggagcgggggtgccgcctcctgctggccagggagggtcggacccttgccccctgggctgactggcagctctgcagccacggcttgggaacgaggctgtgggtggaggtggttcttaggaccaggcctctgaatcctaaagttctagcatgactactgtagctgcgagggcttatgtggaggaaacagtcacaggggctgctcagggtggcagaccccactaaagagggcagagggttctttgctctagataaacaaacatcatctgcctccagacactggccacagtaggagtattggtcctgggcttccccagccaccagtcagccacaagctgtcggtgacctattggtagagggactgggtgtgagggtctgggccagggtgcttgacctgggagcagctggttcagagtccttcacaccgcaggccagtagggagcagtggaagggacagtgctccaggcattgggaagtccctgctggctctatcactcggggcaaacttctccccacctgggccttgggttcttcagctataaaatggccagaggtggggggcgggatgactaaaggaacagtgcagactcccccactgtggtcttgggaggccagaggagttagaagacctatctatctatctatctatctacattgatcacatcaaaagtatttatgtgcctaacccggggctggggattgtggacgttctggcctaatggacagatgtgaactcatcccagagcatcgcaggaatgaccaggatgcccgggaagagttgagctgagtgggggctccagccacagacagcggcccaggccagggagttgctggcaacgaaggagccagtggtggaagaagaagaggccctgaatatacgattgcctgcccacgttgtcttctcttccatacacagtgaaaatgtagaaagatggtttgtgaggccaaactgtgaatgggctaaagggaggcaaagttgcactctccttccccagagggctcaccaagagggcacacccccgggggttctggtgggcaacgggggtgagcatgtccctgccctggctccctccatctgtgaccaggaggcatggctgggtgtatgttcaggtgaggctcagagtggcattgtgtccctgtcccctgcccagggcagtgaggggagcccttgatgctgattagaaggctagaactggggtagaggtgcctggcatgtctcatgccatggggactcaatctagcaactgtgagtcctggggtccctgtgatgggaagagggcagtgccctgcccaatgtggcaggtgtcctcatggcaggatctgcccctcaccagggggctgggatctacttgcttggagctctgagcaaggccacaatgcccgcccccacccccaagtagactgcagcctgggcctcatggggcttctcccaggcccacatggcatccctctctgagtttccaggccaccgtgggaccctgcagagcatctgcaccgggctggatagggcagaaaagctcaagggcagctagcttgcctcttccctggaagaaaggtgctctgggactcaccaaccctgagaaagatagctttcctggccaccaccattccccaccaccctggagaagccaattcccaggcttgaagggcactggctggcaggaggcctcttcattctgcaggaggtggaaaggacacctgtagacaggtgatgctcacccctcacctggcgccatggggctgggaggtgagcggctggcatgtttgttcctagggagcaccatgtgagcttaaggctcccctgaccggccccaccacatggcccagcctcctagcacagcagcgctgacctcagtgcagtctgaggattggaatccaccatgagatgatgtgagagctgtgtgccccaggatcaactttttctccaacttggccatcagccagcgagttgctaaggacctgagtcagcactcacgttgcctattcacactccgcttgaaagtccggaaggtggctactgcaaaatcacccctctgagaagtcctctctccacatcttgtccccctttgtgaagacccctagttcgctctgcattttaggcatgaagagatacagcagggtgcgtccggagggagctgtggccttgcaacaccactggcaacagggccggggctcccggtgaaggtgtcaggaagtggaaaaggctggactttgtctcctctttgcctgctggtagcctaaccgcaaaagtatctctttatacagaatacttacagattctaatatatatttgtatttcattttgttacagtatttttatatgttaaagtcaacatccagcgtcttgttttgcctttcagatgctatgtggtcgtggcacgttttgttgggggtttctgtagtcgtcttgtttggatcaactcctagaggctggtttagaacaggcccatgagggagctgcacctgccctggaagtattgttttagactatgtcgatattgtctgttgtcttccatgtgaacatgacattgagtcactctgc

SEQ ID NO: 134742 - DNA, 4564 bp, Artificial Sequence
  derived and/or modified sequence
ggactgcacctggaggcggccccggacggggatggtcagcggctgctgccgtctggctcgcgagcgggacgctgtgagggcaccatggcgctgactcccgggtgggggtcctcggcggggccggtccggccggagctctggctgctgctgtgggcagccgcgtggcgcctgggtgcctcggcgtgccccgccctctgcacctgcaccggaaccacggtggactgccacggcacggggctgcaggccattcccaagaatatacctcggaacaccgagcgcctggaactcaatggcaacaacatcactcggatccataagaatgactttgcggggctcaagcagctgcgggtgctgcagctgatggagaaccagattggagcagtggaacgtggtgcttttgatgacatgaaggagctggagcggctgcgactgaaccgaaaccagctgcacatgttaccggaactgctgttccagaacaaccaggctttgtcaagactggacttgagtgagaacgccatccaggccatccccaggaaagcttttcggggagctacggaccttaaaaatttacagctggacaagaaccagatcagctgcattgaggaaggggccttccgtgctctgcgggggctggaggtgctgaccctgaacaacaacaatatcaccaccatccccgtgtccagcttcaaccatatgcccaagctacggaccttccgcctgcactccaaccacctgttttgcgactgccacctggcctggctctcgcagtggctgaggcagcggccaaccatcgggctcttcacccagtgctcgggcccagccagcctgcgtggcctcaatgtggcagaggtccagaagagtgagttcagctgctcaggccagggagaagcggggcgcgtgcccacctgcaccctgtcctccggctcctgcccggccatgtgcacctgcagcaatggcatcgtggactgtcgtggaaaaggcctcactgccatcccggccaacctgcccgagaccatgacggagatacgcctggagctgaacggcatcaagtccatccctcctggagccttctcaccctacagaaagctacggaggatagacctgagcaacaatcagatcgctgagattgcacccgacgccttccagggcctccgctccctgaactcgctggtcctctatggaaacaagatcacagacctcccccgtggtgtgtttggaggcctatacaccctacagctcctgctcctgaatgccaacaagatcaactgcatccggcccgatgccttccaggacctgcagaacctctcactgctctccctgtatgacaacaagatccagagcctcgccaagggcactttcacctccctgcgggccatccagactctgcacctggcgcagaaccctttcatttgcgactgtaacctcaagtggctggcagacttcctgcgcaccaatcccatcgagacgagtggtgcccgctgtgccagtccccggcgcctcgccaacaagcgcatcgggcagatcaagagcaagaagttccggtgctcagccaaagagcagtacttcattccaggcacggaggattaccagctgaacagcgagtgcaacagcgacgtggtctgtccccacaagtgccgctgtgaggccaacgtggtggagtgctccagcctgaagctcaccaagatccctgagcgcatcccccagtccacggcagaactgcgattgaataacaatgagatttccatcctggaggccactgggatgtttaaaaaacttacacatctgaagaaaatcaatctgagcaacaacaaggtgtcagaaattgaagatggggccttcgagggcgcagcctctgtgagcgagctgcacctaactgccaaccagctggagtccatccggagcggcatgttccggggtctggatggcttgaggaccctaatgctgcggaacaaccgcatcagctgcatccacaacgacagcttcacgggcctgcgcaacgtccggctcctctcgctctacgacaaccagatcaccaccgtatccccaggagccttcgacaccctccagtccctctccacactgaatctcctggccaaccctttcaactgcaactgccagctggcctggctaggaggctggctacggaagcgcaagatcgtgacggggaacccgcgatgccagaaccctgactttttgcggcagattcccctgcaggacgtggccttccctgacttcaggtgtgaggaaggccaggaggaggggggctgcctgccccgcccacagtgcccacaggagtgcgcctgcctggacaccgtggtccgatgcagcaacaagcacctgcgggccctgcccaagggcattcccaagaatgtcacagaactctatttggacgggaaccagttcacgctggttccgggacagctgtctaccttcaagtacctgcagctcgtggacctgagcaacaacaagatcagttccttaagcaattcctccttcaccaacatgagccagctgaccactctgatcctcagctacaatgccctgcagtgcatcccgcctttggccttccagggactccgctccctgcgcctgctgtctctccacggcaatgacatctccaccctccaagagggcatctttgcagacgtgacctccctgtctcacctggccattggtgccaaccccctatactgtgactgccacctccgctggctgtccagctgggtgaagactggctacaaggaaccgggcattgctcgttgtgctgggccccaggacatggagggcaagctgctcctcaccacgcctgccaagaagtttgaatgccaaggtcctccaacgctggctgtccaggccaagtgtgatctctgcttgtccagtccgtgccagaaccagggcacctgccacaacgacccccttgaggtgtacaggtgcgcctgccccagcggctataagggtcgagactgtgaggtgtccctggacagctgttccagtggcccctgtgaaaatgggggcacctgccatgcacaggagggcgaggatgccccgttcacgtgctcctgtcccaccggctttgaaggaccaacctgtggggtgaacacagatgactgtgtggatcatgcctgtgccaatgggggcgtctgtgtggatggtgtgggcaactacacctgccagtgccccctgcagtatgagggaaaggcctgtgagcagctggtggacttgtgctctccggatctgaacccatgtcaacacgaggcccagtgtgtgggcaccccggatgggcccaggtgtgagtgcatgccaggttatgcaggtgacaactgcagtgagaaccaggatgactgcagggaccaccgctgccagaatggggcccagtgtatggatgaagtcaacagctactcctgcctctgtgctgagggctacagtggacagctctgtgagatccctccccatctgcctgcccccaagagcccctgtgaggggactgagtgccagaatggggccaactgtgtggaccagggcaacaggcctgtgtgccagtgcctcccaggcttcggtggccctgagtgtgagaagttgctcagtgtcaactttgtggatcgggacacttacctgcagttcactgacctgcaaaactggccacgggccaacatcacgttgcaggtctccacggcagaggacaatgggatccttctgtacaacggggacaacgaccacattgcagttgagctgtaccagggccatgtgcgtgtcagctacgacccaggcagctaccccagctctgccatctacagtgctgagacgatcaacgatgggcaattccacaccgttgagctggttgcctttgaccagatggtgaatctctccattgatggcgggagccccatgaccatggacaactttggcaaacattacacgctcaacagcgaggcgccactctatgtgggagggatgcccgtggatgtcaactcagctgccttccgcctgtggcagatcctcaacggcaccggcttccacggttgcatccgaaacctgtacatcaacaacgagctgcaggacttcaccaagacgcagatgaagccaggcgtggtgccaggctgcgaaccctgccgcaagctctactgcctgcatggcatctgccagcccaatgccaccccagggcccatgtgccactgcgaggctggctgggtgggcctgcactgtgaccagcccgctgacggcccctgccatggccacaagtgtgtccatgggcaatgcgtgcccctcgacgctctttcctacagctgccagtgccaggatgggtactcgggggcactgtgcaaccagagtccgagtgccggggggaccctgtccgggactttcaccaggtccagaggggctatgccatctgccagaccacgcgccccctgtcatgggtggagtgccggggctcgtgcccaggccagggctgctgccagggccttcggctgaagcggaggaagttcacctttgagtgcagcgatgggacctcttttgccgaggaggtggaaaagcccaccaagtgtggctgtgccctctgcgcata

SEQ ID NO: 134743 - DNA, 4605 bp, Artificial Sequence
  derived and/or modified sequence
atggccctgacccccggctggggcagcagcgccggccccgtgcggcccgaactgtggctcctgctgtgggccgccgcctggaggcttggagcctctgcttgtccagccctgtgcacttgcacaggtacaacagtcgattgtcacggcaccggcttacaggcgatccccaagaacatacctaggaacactgagaggctggagctgaatgggaacaatattacgcgaatccacaaaaatgacttcgctggtctgaagcagctcagggttttgcagctgatggaaaaccagattggcgccgtagaacgcggagcattcgatgacatgaaagaattggaacgcctgcggctgaaccgaaaccagttacacatgctgcccgagctgttattccaaaacaaccaggctctgtccagactcgatttatcagagaatgctatccaggccatcccccgcaaggcattccgcggtgccactgatttgaagaacctgcagttggataaaaaccagatctcttgtattgaggagggggcgtttcgcgccctgagagggctcgaggtgctgaccctgaacaataacaacatcaccacaatccccgtgagctcattcaatcacatgccaaagcttcggacattccgccttcatagcaaccacttgttctgtgattgccatctggcatggctgagccaatggctgagacaacgccccaccatcggtttgttcacccagtgctcgggaccagcctctctgaggggcctgaatgtggccgaggtccaaaagagtgagttcagttgttccgggcagggcgaggcggggcgggtcccaacctgtactttgtcctcagggagctgtccggctatgtgcacatgtagcaacggcatcgtcgactgccgggggaaaggcctgaccgcaatcccagccaacctccccgagaccatgaccgaaattcgactggagctaaacgggattaaaagtatccctcccggcgccttcagcccataccgaaaactgcgaaggatagatctgtctaacaatcaaattgctgagattgctcccgacgcctttcaggggctgcgcagcctgaatagtctggtgctgtacggcaacaagatcaccgatttacctcgcggtgtttttggaggcttgtatactctgcaattgctgctgctgaacgccaataagatcaattgtatcagacccgatgctttccaggacctacagaacctgtccctgctgagcctgtacgacaacaagattcagagcctggcaaaaggaactttcacctccctccgcgctattcagaccctgcacttggcgcagaatccatttatctgcgactgtaatctgaaatggcttgctgattttctcaggacaaaccctattgagacctcaggcgctcgctgcgccagcccccggagattggccaataagcgcattggacagatcaaatctaagaaattcaggtgtagtgccaaggagcaatacttcatcccaggcaccgaagactaccaacttaactctgagtgcaattccgacgttgtgtgtccacataagtgccgctgtgaggctaacgtggtagagtgcagcagtctcaagcttaccaagatccctgaacgtatcccacagagtacggcagagctccgattaaacaacaacgaaatctctatcctcgaagccaccggaatgtttaagaaactgacacacctgaaaaagataaacctctccaataacaaagtgtccgagatcgaagacggcgcttttgaaggcgccgcgagcgtgtcagagctgcatttgaccgccaaccagcttgagagtatccgctcgggaatgtttcgaggcctcgacggactgcgaacactcatgctgcgcaacaaccgcatatcatgtattcataatgacagcttcaccggcctacggaacgtccgacttctgtccctctatgacaaccagataacaaccgtgtcccctggggcatttgatacgctgcagtcccttagcaccctgaacctcctggcaaatccgttcaattgcaattgccaacttgcctggctcggcggatggctgaggaagaggaaaattgtgactgggaacccccgttgtcaaaaccccgactttctccgtcagattccactacaggatgtagcttttcctgatttcagatgcgaagagggtcaggaagaaggaggctgtcttcccagaccgcagtgtcctcaagaatgtgcctgccttgacacagttgttaggtgtagcaataagcatctgagggcactgccaaagggaattccaaagaatgtgaccgagttgtatctggacggcaatcaatttacgttagtgcctggacagctgagcactttcaagtatctgcagctggtagacctgtccaataataaaattagctccctctcgaacagcagctttactaatatgagccagctgactaccctcatattaagctacaatgccctgcagtgtatcccccctttggccttccagggcctgagatctttacggttgttgtccctgcacggcaatgatatatcaactttgcaggagggtatcttcgctgacgtcacgagcctctctcaccttgcaatcggcgccaaccctctatactgcgactgccaccttcgctggctgagcagttgggtgaagactggctataaagaacctgggatcgctaggtgcgcgggtccacaagacatggagggaaagttgctcctcacaacacccgcaaaaaagtttgaatgtcagggacctcccaccttagccgtacaggctaaatgtgacctgtgtttatcaagcccatgccaaaaccaggggacgtgccacaatgaccctctggaagtgtacaggtgcgcctgcccaagcggatataagggacgggattgcgaggtgtcacttgatagctgttcatcgggaccttgtgagaatggtggcacctgccacgcccaggagggcgaagatgccccttttacgtgcagctgcccgaccggcttcgaagggccgacttgtggcgttaatactgatgattgcgtggatcacgcatgcgcgaatggcggagtctgtgttgatggcgtaggaaactacacttgtcagtgtccactgcagtatgagggcaaggcttgtgaacagctggtggacctgtgttcaccagatcttaacccatgccaacacgaagcccaatgcgtcgggaccccggatggccccagatgcgaatgcatgccagggtacgctggagataattgtagcgagaaccaagacgactgtcgggatcaccggtgtcagaacggggctcagtgcatggatgaggtaaacagttacagctgcctgtgcgccgagggatattcaggccagctttgcgaaatcccaccccatctcccagcccccaagtccccctgcgagggcaccgagtgtcagaacggagccaattgtgtggatcagggaaatagacctgtctgccaatgcctccccggctttggcggacctgagtgcgaaaagctgctgtccgtcaacttcgtggatcgggacacctatctgcagttcacagaccttcagaattggcccagggccaacattaccttacaggtatccaccgcagaagataatggaatccttctctataacggcgacaatgatcacattgccgttgagctgtaccagggacatgtgagggtgtcttatgatcccggcagttacccttcctcagctatctactccgctgagactataaacgacggtcagttccacaccgtcgaactcgttgctttcgatcaaatggttaatctgtcaatagatgggggaagtcctatgaccatggataacttcggcaagcattataccttgaactctgaggcccccctctacgtgggcggaatgccggtcgacgtcaactccgccgccttccgcctttggcagatcctgaacggcaccggtttccacggttgtatcagaaacctgtatataaataacgagttacaggattttacaaagactcagatgaagccaggggttgtgcctggctgtgaaccttgccgcaaattatattgtctgcacgggatctgtcagccaaacgctacgccaggcccaatgtgtcactgcgaggcaggctgggtcggcctgcattgcgaccagccggcggatggaccttgccacgggcataagtgcgttcatgggcaatgcgttccgttggatgctctgtcttacagctgccaatgtcaggatggctattcaggagcactttgtaatcaggcaggagccctggccgagccatgtagggggttgcaatgtctccatggacactgccaggccagtggaacgaagggggcgcattgcgtgtgcgatcccgggttctcgggagaactgtgtgagcaggagtccgagtgtcgaggggaccccgtgcgggatttccatcaggtccaaagggggtacgccatctgtcagactacccggcctctcagttgggtggagtgtcggggctcttgtcctgggcaaggatgttgccaggggctgcggcttaagcggcggaagtttacattcgaatgttcggacgggacgtcatttgccgaagaagttgaaaaacccacaaagtgcggctgtgcattgtgcgcctag

SEQ ID NO: 134744 - DNA, 2349 bp, Artificial Sequence
  derived and/or modified sequence
ctgtggctgctgctgtgggccgccgcctggcggctgggcgccagcgcttgcccagccctctgcacctgcacgggcaccactgtggactgtcacggcaccggcctgcaggctatccctaagaacattccgcggaatacagagcgcctcgagctgaatggcaacaatataaccaggattcacaaaaatgattttgctggccttaagcaactccgggtgcttcagctcatggagaaccagatcggagcagtggaaagaggagcctttgatgatatgaaagagctggagcgtcttcgcctaaatagaaatcaattacatatgctgcccgagctcctgtttcagaacaatcaggcactaagccgcctcgatctatccgagaatgccatacaggctatcccacggaaagcctttaggggcgccaccgatctcaaaaatctccagctcgacaaaaaccaaatcagttgtatcgaggaaggtgcattcagagccctgagaggcctggaggtgttaacactcaacaataacaatatcaccacaattccagtgagctccttcaatcacatgccgaaactgcggacgttccgacttcactccaaccacctgttttgcgattgtcatctcgcctggctgagccagtggctcagacaaagacctactatcgggcttttcactcagtgcagtggcccagcttcgctccgaggtctgaacgtggccgaggttcagaaatcggaattttcttgctcaggccaaggcgaagccggcagagtgccaacgtgcactttgagtagtggatcttgtcctgccatgtgcacctgctcaaatggtattgtggactgtaggggtaagggtctcacagcaattccggcaaacctgcctgaaactatgaccgagatcaggcttgagctgaatgggatcaaatccattccacccggtgccttctctccatataggaaactgcgccgcatttgccccctgagcttctgctcaccctgtcgtgatctgtccaataatcaaatcgccgagattgcaccagacgcctttcaggggctcagaagcttaaactccctggtgttgtacgggaataaaataacagatctacccagaggtgtctttggtgggctttacaccttacaattgttgctactcaacgctaataaaattaattgtatccgtccagacgcctttcaggacctgcaaaacctgtcgctgctctctctctacgacaacaaaatacagagtttggcaaagggcactttcacgtctcttagggcgattcagacgttacatctcgcccagaaccctttcatttgcgactgtaatctgaagtggttggccgacttcctccgaactaaccccattgagacatctggcgctagatgcgcttcccctcggcggcttgccaataagcggatcggtcagatcaaatccaagaaattcaggtgcagcgccaaagaacagtatttcataccagggacagaagattatcaattgaactctgagtgtaatagtgatgtggtgtgcccccataagtgtagatgtgaagccaacgtggtggaatgctcctctctgaaactgaccaaaatcccagaacgaatcccacagagtacagccgagctgcggctcaataacaacgaaatcagcatccttgaagcaaccgggatgtttaaaaagctgacccatttaaaaaagattaatctcagtaacaataaggtcagtgaaatagaggacggagcctttgagggcgccgcgtcagtgagcgagctgcaccttacggccaatcaacttgagtccatccgctctggcatgttcagggggctggacggactgagaaccctcatgttgcgcaataacagaatcagctgcatacacaacgattcttttacgggtttgcggaacgtacgcttgctgtccctttacgacaaccagattacgaccgtgtcccctggtgcctttgacacactacaatccctgagcacacttaatctgcttgccaacccttttaactgcaattgccagctggcctggcttggtggctggctccgtaaaaggaagattgtgacaggcaacccgcggtgccagaaccctgacttcctgcgccaaatacccctgcaggatgtcgcttttcctgatttccggtgtgaggaaggccaggaagaggggggatgtctaccccgccctcagtgccctcaggagtgcgcttgtctagacacagtggtacgctgtagtaataaacacttgcgcgcattgccgaagggtattcccaagaatgttactgaactctacctagacggcaatcagttcaccctggtcccaggccagttgagtactttcaaatacttgcaactagtgtag

SEQ ID NO: 134745 - DNA, 1230 bp, Artificial Sequence
  derived and/or modified sequence
atggccctgacccccggctggggcagcagcgccggccccgtgcggcccgagttgtggctattgctctgggccgccgcttggcgactgggggcctccgcttgtcccgcgctctgcacgtgtaccggcacaaccgtggattgccatggcacggggctacaggcaatcccaaagaacatcccaaggaacactgaacgcctggaactgaatggaaataatattactcggattcacaagaatgactttgccggcctgaaacagcttcgtgtcttacaactgatggaaaaccagatcggggctgtggaacggggggcctttgatgacatgaaggagctggaacgccttcgtctcaatcggaatcagctgcacatgctccccgaactgttattccagaacaaccaggcactgagcagattagacttgagcgagaacgctatccaggcaattcctagaaaagcattcaggggggccaccgatctcaagaacctgcaactcgacaagaatcagataagctgcatcgaggagggggctttccgggctctcagaggtctggaggtcctgacccttaacaataataatattaccacaattcccgtcagtagctttaaccacatgcccaaactccggacctttcggcttcatagtaatcacctgttctgtgattgccaccttgcttggctctctcagtggctgagacaacgtccaacaattgggctgtttacccaatgctcagggcccgcctccttgcgggggcttaatgtcgccgaagtgcaaaaatctgagttctcgtgcagcgggcagggagaggccggacgggtgccaacatgtaccctgagcagtggttcatgccctgctatgtgtacgtgtagcaatggtattgtggattgccgcggcaagggattaacggcgatccctgccaacttgccggagactatgaccgagatccgacttgaattgaatggaattaaatccattccccccggagccttttcaccatatcggaagcttagacggattgacctgtcaaacaaccagattgcagaaatagctcccgacgcctttcagggcttgcgaagtctgaactcactccacacggggccggtcacgtgcccacatactaccgggacgcactctagtcactgcagggctttcgctgtcgcggtcccacacagtaggaacgatctggaagcaatgtttgaggaggaagtgccacgcattttctatagcgcgtag

SEQ ID NO: 134746 - DNA, 1143 bp, Artificial Sequence
  derived and/or modified sequence
atggccctgacccccggctggggcagcagcgccggccccgtgcggccggagttgtggctcctcctgtgggcagccgcatggcgcctaggagccagtgcatgcccggcactttgcacctgcacaggtacgactgtggattgccacggaactggccttcaggcaattccgaaaaacatacctcggaacacagagagattggaacttaacgggaacaacattactcgcatacataaaaatgactttgcaggactgaaacagctgcgggttctgcagctgatggagaatcaaattggagccgtggagcgcggcgcattcgatgacatgaaggagctggaaaggttagatctctcagagaacgctatccaggcaatccctcggaaggctttcaggggggcaactgatctgaaaaacctgcagctcgataaaaaccagattagttgcatcgaagaaggcgcctttcgggctttacgcggtctggaagttcttacgttgaataataataacatcactaccattcccgtatcaagcttcaaccatatgcccaagctacgcacctttcgcctccacagtaatcacctgttttgcgactgccacttggcctggctgtcccagtggctgagacagcgaccgactattggactgttcacacagtgctcagggccagctagccttagaggcctaaacgtggcagaggtccagaagagtgaattctcgtgtagtgggcagggagaagccggacgtgtgcctacctgtaccctcagctccggatcttgccccgcgatgtgtacttgtagtaacggcatagtggactgcaggggtaaaggcctcacagccattcccgctaacctccctgagaccatgactgaaatacggctcgagttaaacggaattaaatcaattcctcccggggcttttagcccttacaggaaactgcgacgtatcgatctgtccaacaaccagatagccgagatcgcccccgacgccttccagggcttaagatccttaaacagtctagtgctctacggtaataagattacagatctgccccgtggggtgttcggcggactttatacactccagctgctgctgttgaacgcaaataagatcaactgtatccgtccagacgcatttcaagacttgtag

SEQ ID NO: 134747 - DNA, 2448 bp, Artificial Sequence
  derived and/or modified sequence
atggccctgacccccggctggggcagcagcgccggccccgtgcggcctgaactctggctcctcctgtgggcagccgcgtggcgactcggtgcaagtgcctgcccagccctgtgcacttgtaccggcacaaccgtagactgtcacggaacgggactacaggcaattcccaagaatatccctcggaatactgaacgcctcgagctgaatggtaacaacattactcggatccataagaatgatttcgccggcctgaaacagttgagggtactacagttgatggagaaccagattggagccgtcgaacgcggtgcgtttgacgatatgaaagaattggagcgtcttcggctgaaccgtaatcagctgcatatgctgcccgaactgctttttcaaaacaatcaggctctcagtaggctggacctcagtgaaaacgcgattcaggccataccgaggaaagcgtttcgcggtgccactgacttaaagaacctgcagctggacaagaatcagatcagctgcatcgaggagggcgctttccgtgcactccgagggctggaagtgttaacactcaacaataacaacatcaccacaatccctgtcagctccttcaatcacatgcccaagctgcggacatttcgcctgcattccaaccacttgttctgtgactgtcatttagcctggctttcccaatggttgaggcagcgacctacaatcggcttgttcacacagtgttccgggccagcatccctgcgtggactcaatgtggctgaagtccagaagagtgagttttcatgcagcggccagggcgaggctgggcgagttccaacctgcactctgagcagcggttcctgtcctgcaatgtgcacctgctccaacggtattgtggactgtcgggggaaaggtcttacagccatacctgcaaatctgccagaaaccatgaccgaaatcaggctggaactcaatgggattaaatccattccaccgggggcgttcagcccttatcggaagttacgaagaatttgcccgctgagcttttgctccccatgcagggacctgagcaacaatcagattgctgaaattgctcctgacgcgtttcaaggattgcggtccctgaattcacttgtgctgtacgggaataaaatcaccgacctgccacggggagtatttggtggcctgtatacactacaattgttgttgttaaatgccaataaaattaattgcatacggcccgacgcattccaggacctgcagaacctctcccttttgagtctctacgataataaaatccagagcctggccaaaggtaccttcacttcactgcgggctatacagactcttcacctcgcgcaaaaccccttcatttgcgactgcaacctgaaatggttagccgactttctgcgcacaaaccctatcgagacgtccggggctcgctgcgcctcccctcggaggttggctaataagaggatcggacaaatcaagtctaaaaaattccgctgcagcgcaaaggaacagtacttcattcctggtactgaagattaccagctgaacagcgagtgcaattccgacgtagtgtgcccccacaagtgtcggtgtgaagccaatgtcgttgagtgctcttcactaaaattaactaaaatccctgaacggataccgcaatccacagcagagctgaggctaaacaacaatgagatctcaatactcgaggctactggtatgttcaaaaaattaactcacctgaaaaagattaacctgtctaacaacaaggtaagcgaaattgaagacggagcgtttgagggggctgcatcggtaagcgagcttcatctgacagctaaccagctcgagagcatcagaagcgggatgttccgggggctggacggcctacggacgctgatgctcagaaacaatcgaatatcttgcatccacaatgacagttttacaggcctgagaaacgtgcggctgctctcactctacgataaccagattaccactgtatcaccgggagccttcgatactctccaaagcctttccactctcaacctgctggcaaatccctttaattgtaattgtcagctggcatggctcgggggatggttaaggaaacgcaagatcgtaacaggtaatccccgatgtcaaaatcctgatttcctccggcaaatccccctacaagatgtcgccttcccggacttcaggtgcgaggaggggcaggaggaaggtggctgtctgcctcgcccccagtgcccacaagagtgcgcgtgcctagacaccgttgtccgttgtagcaataaacacctgagggctttacccaagggtataccaaagaacgttaccgagctctacctggacggaaaccagtttactctggttccggggcagctgagtacctttaaataccttcaattggtgatcctaagctacaatgctctgcaatgcatcccacccttagcatttcagtag

SEQ ID NO: 134748 - DNA, 4386 bp, Artificial Sequence
  derived and/or modified sequence
atggccctgacccccggctggggcagcagcgccggccccgtgcggcccgagttgtggctcctgctgtgggccgccgcttggcgcctaggggccagcgcatgtcctgccttatgcacttgcactgggacaacagtggattgccatggaaccggactgcaggccataccgaagaacatacctcggaacactgagcgcctggaactaaacggcaataacataacccggattcataaaaatgattttgcaggcctgaagcagcttagggttcttcagcttatggaaaaccagatcggcgcagtagaaaggggcgctttcgacgacatgaaagagcttgaaaggttgcgccttaatcgcaatcaactgcacatgttacccgagctcttgtttcaaaataatcaggcactgagcagactggacctctctgaaaacgctatacaagccatcccacgtaaggcctttcgcggggctactgaccttaaaaatcttcagctggataagaatcagatctcctgtatcgaagagggcgcattccgcgctctcagaggcctggaagtgctgactctaaacaataacaatatcaccacaattcccgtgtcatctttcaaccacatgcccaaattgaggacctttcgcctgcattcaaaccacctgttttgcgactgtcacttggcctggttaagccagtggcttcggcagagaccaacaatagggctgtttacccagtgtagtgggcctgcctctctgcgtggccttaacgtggctgaggtgcagaagtctgagttttcttgctctggacagggggaagccggacgggtccctacttgtactttaagttccgggagttgccccgcaatgtgtacttgctctaatggcattgtggactgtcggggaaaagggctcactgccatcccagctaatcttccggaaaccatgaccgagattcggttagagctcaatggaattaaatcaatcccacccggggccttcagcccttaccgaaagttgcggcgcatagacttgagcaacaatcagatagccgaaattgctcctgacgcattccagggcttgcgcagtctcaactctcttgtcctgtatggcaacaagatcacagacctgcctaggggtgtttttgggggtctttatactctgcagctgctcctgttaaacgccaataagatcaactgcattcggccagacgcctttcaagacttacagaacctgtctctactttcactgtacgataacaagatacagtcactcgccaaagggacctttacatcactgcgcgctatccagacacttcatctggctcagaaccccttcatttgtgactgcaatctgaagtggctggcagattttcttcgtacaaaccccatcgagacttcaggagctagatgcgctagccctaggcgtctcgccaacaagcggataggccaaatcaagtctaagaaatttaggtgcagcgccaaagaacagtattttataccaggcacggaagattaccagctgaatagtgagtgcaactcggacgtggtgtgcccacacaaatgtagatgcgaggccaacgttgtggagtgttcttcattgaagctcaccaaaattcccgagcgcattccacagagcacggctgagcttcggctcaataataatgaaataagcattctggaggctaccggaatgttcaaaaagctgactcaccttaaaaagattaatttatctaataacaaagtgtctgaaatagaggacggagcatttgaaggcgcagcctctgtctccgagcttcacctcaccgcaaaccagttggaatccattcggagtggaatgttcaggggcctagacggtctgcggaccctgatgcttcgcaataataggatttcctgcattcacaacgactcctttacaggcttgaggaatgtgaggctgttgagtttgtatgacaatcagattaccacagtctctcccggggcattcgacaccctgcagtccttgagtaccctgaacctgctcgccaatcctttcaactgtaattgccagctggcctggctgggcggctggctccggaagagaaaaatcgtcacaggaaacccacgatgccagaatccagacttccttcgccagatccctctccaggatgtggcctttccagattttcgctgcgaggagggacaggaggaaggaggctgcctgccaagaccacagtgtccccaggagtgcgcctgcctggataccgtcgtccggtgctcaaacaaacatttacgggcgttgcctaaagggatcccaaaaaacgttaccgaattgtatttggatggaaatcaatttaccttagtgcccgggcagctgtcaaccttcaagtacctgcagttagtggacctgagcaacaacaagatcagtagcctgtcgaacagctcctttactaatatgagccagcttacaacactcatactctcctacaacgcattgcagtgtattccccccctcgcattccagggactccggtctttacgcctcctctcactgcacgggaatgacatttcaacgttgcaagaaggcatctttgcggacgtcacatctctgtcacatctggcgataggcgctaaccctttatactgcgactgccacctaagatggctgtcctcctgggtgaagacagggtataaagaacccggcattgccagatgcgcggggccccaggacatggaaggtaaactgcttctaacgacgccagccaaaaagttcgaatgtcagggcccacccactctagccgtgcaggccaagtgcgacctctgcctctctagtccctgccagaaccagggtacttgtcacaatgaccctctcgaagtctacagatgcgcctgtccgtctgggtataagggaagggactgtgaggtctccttggactcctgctcctccggcccttgtgagaacggcggcacttgtcacgcccaggagggtgaagatgctccgttcacgtgttcttgccccaccggcttcgaaggacccacctgcggcgtcaacaccgatgattgcgtggaccatgcttgtgcaaacggtggagtctgtgtcgacggtgttggcaattatacgtgccagtgcccacttcagtacgaaggaaaagcctgcgaacagttagtggacctgtgcagccccgacctgaatccatgtcagcatgaagcccaatgcgtcggtacccccgacggacccagatgtgagtgcatgcccggctacgccggggacaattgcagtgagaatcaggacgactgtcgggaccacaggtgtcagaacggggctcagtgtatggatgaggttaactcctatagttgcctgtgcgccgagggctatagtggccaactttgtgagattcctcctcatctgcccgcgccaaaaagcccgtgtgaggggacagaatgccaaaacggtgcgaactgtgtggatcagggcaaccggcctgtgtgccagtgtctgccgggttttggtgggccagaatgcgagaaacttctttctgttaatttcgtggatcgagatacttacctgcagtttacagatttacaaaactggcctcgggctaacattacgctccaagtaagcactgccgaagataacggcattttgctgtacaatggggacaatgaccatatcgcagtcgagttgtatcaagggcacgtaagagtgtcttacgacccgggctcttaccccagcagtgccatatactccgcggaaactataaacgacggccagttccacacggttgagctggtggctttcgatcagatggtcaacctgagcatagatggcggatccccgatgacgatggacaatttcgggaaacactacacgctgaactcagaagccccgttatatgtgggcggcatgcctgtggacgtgaattccgcagcctttcgcttatggcagattctcaatggcactggctttcacggctgcatcaggaatctttacattaacaacgaactccaggacttcacaaagacgcagatgaagcccggggtcgtccccggttgcgaaccctgtagaaagttatactgtttgcatgggatatgccagccgaacgccacccctggacccatgtgtcactgcgaggctgggtgggttggactccactgcgaccagccagcagacgggccttgccacggacacaagtgtgtacatggccaatgcgtgccactggatgctctttcgtattcttgtcagtgccaggatggttattctggggctctatgtaatcagagccctagtgccggtgggactctgtcaggaacctttacccgatccagaggcgctatgccaagcgcaaggcctcgtgccccgtgccatgggtggtccgctggcgcaagggctcaggctcgcgcagcagctagagcctttggttag

SEQ ID NO: 134749 - DNA, 1143 bp, Artificial Sequence
  derived and/or modified sequence
atggccctgacccccggctggggcagcagcgccggccccgtgcggccagagctgtggctcctactatgggcagctgcctggagactgggcgccagcgcttgcccagctctgtgcacatgcaccgggactacggtggactgccacggcaccggtcttcaggcaatccccaagaatatcccacgaaataccgaacggctcgagctgaatggcaacaacattacccggatacataagaacgattttgctggactgaagcagctgagggtactgcagctcatggaaaatcagatcggcgctgttgagcgcggcgcctttgatgacatgaaagaacttgagagattggacttaagcgagaacgcaatccaggccatcccacgcaaagcgtttagaggggctacagaccttaagaatttacaattagacaaaaaccagatcagctgcattgaagaaggggcctttagggcactgagggggctcgaagtgttgacgctgaataacaataacattactactatccctgtaagtagtttcaatcacatgccgaaactcagaacattcaggctacattcaaaccatctgttttgcgactgtcacctcgcgtggttgagccagtggctgaggcagcgaccaacaatcggtctgttcactcagtgtagtgggccagcctccctgcgaggtctcaatgtggccgaggtgcaaaaatcagaattttcctgtagcggtcagggtgaagctgggagggtacctacatgcaccctcagctccggatcttgccccgctatgtgtacctgttctaacggtattgtcgactgcagaggtaagggactgacagcaattccagcaaacctccctgagactatgactgaaatcaggcttgagctaaatgggataaaaagcatcccgccaggagcctttagtccttatcggaaactgagacgaattgatctgagtaacaaccagatagccgagattgcccccgacgcgttccaggggttgcgctctctgaactccctcgtactgtatggcaacaagataaccgacttgcctcgcggagttttcggaggactttacaccctgcaattgcttcttcttaatgcaaataagataaattgcatccgaccggacgccttccaggacttgtag

SEQ ID NO: 134750 - DNA, 8956 bp, Artificial Sequence
  derived and/or modified sequence
atggcgactgaggcacagagtgaaggggaggtgccagcccgcgaatccggccggagtgatgccatctgcagttttgtgatctgcaatgattcttcccttcgaggtcagcccattatctttaatcctgacttttttgtggagaaactccgacatgagaaacctgagattttcactgagttggtggtcagcaatatcacaaggctcatcgatttacctggaactgagttggctcagctgatgggggaagtggaccttaagttgcctggcggggctggcccagcatcaggattcttccggtctctcatgtctctcaagcgaaaggaaaaaggagtgatatttgggtccccactgacggaggaaggcattgcccagatataccaactgattgagtatctacacaaaaacttgcgagtagagggtttgtttagagtaccgggtaatagtgtccgacagcagattttaagggatgctctcaataatggaactgacattgacttggaatcaggggaatttcactcaaatgatgttgccactttgctgaagatgtttctaggagagttgccggagcctctgctgacacataaacacttcaatgcacacctcaaaatcgctgatttgatgcagtttgatgataaaggaaacaagaccaatataccagacaaggaccggcaaattgaggctctccagttgctcttcctcattctccctcctcctaatcgtaatttgctgaagttattgcttgatctcctataccagacagcaaagaaacaagacaagaacaagatgtcagcctataaccttgcccttatgtttgcaccccatgtcctgtggccaaaaaatgtcactgcaaatgaccttcaggagaatatcacaaagttaaacagtgggatggcttttatgattaaacactcccagaaactttttaaggctcctgcttacattcgggagtgtgcgagattgcactatttgggatccagaactcaggcatcaaaggatgaccttgacctcatagcttcatgtcatactaagtcctttcagctggcaaagtctcagaaacggaaccgggtagattcctgccctcaccaggaggagacccagcaccatacggaagaggcactgagagagctgtttcaacacgttcatgatatgccagagtcagcaaagaagaaacaacttattagacagtttaataagcaatcattgacccagacaccagggcgagaaccttctacttcccaggtacaaaagagggctcgttcgcgctccttcagtgggcttattaagcggaaggtcctgggaaatcagatgatgtcagaaaagaaaaagaagaaccctactccagaatctgtggccattggtgaattgaagggaaccagcaaagaaaataggaacttattattttctggctctccagctgtcacgatgacaccaacaagattgaagtggtctgaagggaagaaagaggggaaaaaagggaactcaatggcaacaacatcactcggatccataagaatgactttgcggggctcaagcagctgcgggtgctgcagctgatggagaaccagattggagcagtggaacgtggtgcttttgatgacatgaaggagctggagcggctgcgactgaaccgaaaccagctgcacatgttaccggaactgctgttccagaacaaccaggctttgtcaagactggacttgagtgagaacgccatccaggccatccccaggaaagcttttcggggagctacggaccttaaaaatttacagctggacaagaaccagatcagctgcattgaggaaggggccttccgtgctctgcgggggctggaggtgctgaccctgaacaacaacaatatcaccaccatccccgtgtccagcttcaaccatatgcccaagctacggaccttccgcctgcactccaaccacctgttttgcgactgccacctggcctggctctcgcagtggctgaggcagcggccaaccatcgggctcttcacccagtgctcgggcccagccagcctgcgtggcctcaatgtggcagaggtccagaagagtgagttcagctgctcaggccagggagaagcggggcgcgtgcccacctgcaccctgtcctccggctcctgcccggccatgtgcacctgcagcaatggcatcgtggactgtcgtggaaaaggcctcactgccatcccggccaacctgcccgagaccatgacggagatacgcctggagctgaacggcatcaagtccatccctcctggagccttctcaccctacagaaagctacggaggatagacctgagcaacaatcagatcgctgagattgcacccgacgccttccagggcctccgctccctgaactcgctggtcctctatggaaacaagatcacagacctcccccgtggtgtgtttggaggcctatacaccctacagctcctgctcctgaatgccaacaagatcaactgcatccggcccgatgccttccaggacctgcagaacctctcactgctctccctgtatgacaacaagatccagagcctcgccaagggcactttcacctccctgcgggccatccagactctgcacctggcgcagaaccctttcatttgcgactgtaacctcaagtggctggcagacttcctgcgcaccaatcccatcgagacgagtggtgcccgctgtgccagtccccggcgcctcgccaacaagcgcatcgggcagatcaagagcaagaagttccggtgctcagccaaagagcagtacttcattccaggcacggaggattaccagctgaacagcgagtgcaacagcgacgtggtctgtccccacaagtgccgctgtgaggccaacgtggtggagtgctccagcctgaagctcaccaagatccctgagcgcatcccccagtccacggcagaactgcgattgaataacaatgagatttccatcctggaggccactgggatgtttaaaaaacttacacatctgaagaaaatcaatctgagcaacaacaaggtgtcagaaattgaagatggggccttcgagggcgcagcctctgtgagcgagctgcacctaactgccaaccagctggagtccatccggagcggcatgttccggggtctggatggcttgaggaccctaatgctgcggaacaaccgcatcagctgcatccacaacgacagcttcacgggcctgcgcaacgtccggctcctctcgctctacgacaaccagatcaccaccgtatccccaggagccttcgacaccctccagtccctctccacactgaatctcctggccaaccctttcaactgcaactgccagctggcctggctaggaggctggctacggaagcgcaagatcgtgacggggaacccgcgatgccagaaccctgactttttgcggcagattcccctgcaggacgtggccttccctgacttcaggtgtgaggaaggccaggaggaggggggctgcctgccccgcccacagtgcccacaggagtgcgcctgcctggacaccgtggtccgatgcagcaacaagcacctgcgggccctgcccaagggcattcccaagaatgtcacagaactctatttggacgggaaccagttcacgctggttccgggacagctgtctaccttcaagtacctgcagctcgtggacctgagcaacaacaagatcagttccttaagcaattcctccttcaccaacatgagccagctgaccactctgatcctcagctacaatgccctgcagtgcatcccgcctttggccttccagggactccgctccctgcgcctgctgtctctccacggcaatgacatctccaccctccaagagggcatctttgcagacgtgacctccctgtctcacctggccattggtgccaaccccctatactgtgactgccacctccgctggctgtccagctgggtgaagactggctacaaggaaccgggcattgctcgttgtgctgggccccaggacatggagggcaagctgctcctcaccacgcctgccaagaagtttgaatgccaaggtcctccaacgctggctgtccaggccaagtgtgatctctgcttgtccagtccgtgccagaaccagggcacctgccacaacgacccccttgaggtgtacaggtgcgcctgccccagcggctataagggtcgagactgtgaggtgtccctggacagctgttccagtggcccctgtgaaaatgggggcacctgccatgcacaggagggcgaggatgccccgttcacgtgctcctgtcccaccggctttgaaggaccaacctgtggggtgaacacagatgactgtgtggatcatgcctgtgccaatgggggcgtctgtgtggatggtgtgggcaactacacctgccagtgccccctgcagtatgagggaaaggcctgtgagcagctggtggacttgtgctctccggatctgaacccatgtcaacacgaggcccagtgtgtgggcaccccggatgggcccaggtgtgagtgcatgccaggttatgcaggtgacaactgcagtgagaaccaggatgactgcagggaccaccgctgccagaatggggcccagtgtatggatgaagtcaacagctactcctgcctctgtgctgagggctacagtggacagctctgtgagatccctccccatctgcctgcccccaagagcccctgtgaggggactgagtgccagaatggggccaactgtgtggaccagggcaacaggcctgtgtgccagtgcctcccaggcttcggtggccctgagtgtgagaagttgctcagtgtcaactttgtggatcgggacacttacctgcagttcactgacctgcaaaactggccacgggccaacatcacgttgcaggtctccacggcagaggacaatgggatccttctgtacaacggggacaacgaccacattgcagttgagctgtaccagggccatgtgcgtgtcagctacgacccaggcagctaccccagctctgccatctacagtgctgagacgatcaacgatgggcaattccacaccgttgagctggttgcctttgaccagatggtgaatctctccattgatggcgggagccccatgaccatggacaactttggcaaacattacacgctcaacagcgaggcgccactctatgtgggagggatgcccgtggatgtcaactcagctgccttccgcctgtggcagatcctcaacggcaccggcttccacggttgcatccgaaacctgtacatcaacaacgagctgcaggacttcaccaagacgcagatgaagccaggcgtggtgccaggctgcgaaccctgccgcaagctctactgcctgcatggcatctgccagcccaatgccaccccagggcccatgtgccactgcgaggctggctgggtgggcctgcactgtgaccagcccgctgacggcccctgccatggccacaagtgtgtccatgggcaatgcgtgcccctcgacgctctttcctacagctgccagtgccaggatgggtactcgggggcactgtgcaaccaggccggggccctggcagagccctgcagaggcctgcagtgcctgcatggccactgccaggcctcaggcaccaagggggcacactgtgtgtgtgaccccggcttttcgggcgagctgtgtgagcaagagtccgagtgccggggggaccctgtccgggactttcaccaggtccagaggggctatgccatctgccagaccacgcgccccctgtcatgggtggagtgccggggctcgtgcccaggccagggctgctgccagggccttcggctgaagcggaggaagttcacctttgagtgcagcgatgggacctcttttgccgaggaggtggaaaagcccaccaagtgtggctgtgccctctgcgcatagcgctgggcgtggacaggccggtgagggcgggcaaggggccccagccgctgcagcagcggagacagtcgccagcagctgggctggggtgcaggtcatcacaggacggctcctgggcagctgggccctcctgggtggggtggtgccagagcagccttttaaaagcaaattgcgccatagctgggggcagcgggggtgggcgaggcctgagctgcgggctgccctctccggaagtgccttgcacaaataggcgcttaataaatatttgttgagtgaatgtgtgcgtgaggtcaggccaagaagtgcagaacgatgacacccctccttacctgctatctgaatctggagaagaaaaatgacagccttccaaaccaacccttccctttggcctgtggcccaggctggcttggaactgggtctgtggccccagaagcctcttacccctctgcgggcaaccatgaagtactgtcagcctccccgggaagccagcctggttcattctgctgctacagaatctgctggtggtaggccaggctctggagcgggggtgccgcctcctgctggccagggagggtcggacccttgccccctgggctgactggcagctctgcagccacggcttgggaacgaggctgtgggtggaggtggttcttaggaccaggcctctgaatcctaaagttctagcatgactactgtagctgcgagggcttatgtggaggaaacagtcacaggggctgctcagggtggcagaccccactaaagagggcagagggttctttgctctagataaacaaacatcatctgcctccagacactggccacagtaggagtattggtcctgggcttccccagccaccagtcagccacaagctgtcggtgacctattggtagagggactgggtgtgagggtctgggccagggtgcttgacctgggagcagctggttcagagtccttcacaccgcaggccagtagggagcagtggaagggacagtgctccaggcattgggaagtccctgctggctctatcactcggggcaaacttctccccacctgggccttgggttcttcagctataaaatggccagaggtggggggcgggatgactaaaggaacagtgcagactcccccactgtggtcttgggaggccagaggagttagaagacctatctatctatctatctatctacattgatcacatcaaaagtatttatgtgcctaacccggggctggggattgtggacgttctggcctaatggacagatgtgaactcatcccagagcatcgcaggaatgaccaggatgcccgggaagagttgagctgagtgggggctccagccacagacagcggcccaggccagggagttgctggcaacgaaggagccagtggtggaagaagaagaggccctgaatatacgattgcctgcccacgttgtcttctcttccatacacagtgaaaatgtagaaagatggtttgtgaggccaaactgtgaatgggctaaagggaggcaaagttgcactctccttccccagagggctcaccaagagggcacacccccgggggttctggtgggcaacgggggtgagcatgtccctgccctggctccctccatctgtgaccaggaggcatggctgggtgtatgttcaggtgaggctcagagtggcattgtgtccctgtcccctgcccagggcagtgaggggagcccttgatgctgattagaaggctagaactggggtagaggtgcctggcatgtctcatgccatggggactcaatctagcaactgtgagtcctggggtccctgtgatgggaagagggcagtgccctgcccaatgtggcaggtgtcctcatggcaggatctgcccctcaccagggggctgggatctacttgcttggagctctgagcaaggccacaatgcccgcccccacccccaagtagactgcagcctgggcctcatggggcttctcccaggcccacatggcatccctctctgagtttccaggccaccgtgggaccctgcagagcatctgcaccgggctggatagggcagaaaagctcaagggcagctagcttgcctcttccctggaagaaaggtgctctgggactcaccaaccctgagaaagatagctttcctggccaccaccattccccaccaccctggagaagccaattcccaggcttgaagggcactggctggcaggaggcctcttcattctgcaggaggtggaaaggacacctgtagacaggtgatgctcacccctcacctggcgccatggggctgggaggtgagcggctggcatgtttgttcctagggagcaccatgtgagcttaaggctcccctgaccggccccaccacatggcccagcctcctagcacagcagcgctgacctcagtgcagtctgaggattggaatccaccatgagatgatgtgagagctgtgtgccccaggatcaactttttctccaacttggccatcagccagcgagttgctaaggacctgagtcagcactcacgttgcctattcacactccgcttgaaagtccggaaggtggctactgcaaaatcacccctctgagaagtcctctctccacatcttgtccccctttgtgaagacccctagttcgctctgcattttaggcatgaagagatacagcagggtgcgtccggagggagctgtggccttgcaacaccactggcaacagggccggggctcccggtgaaggtgtcaggaagtggaaaaggctggactttgtctcctctttgcctgctggtagcctaaccgcaaaagtatctctttatacagaatacttacagattctaatatatatttgtatttcattttgttacagtatttttatatgttaaagtcaacatccagcgtcttgttttgcctttcagatgctatgtggtcgtggcacgttttgttgggggtttctgtagtcgtcttgtttggatcaactcctagaggctggtttagaacaggcccatgagggagctgcacctgccctggaagtattgttttagactatgtcgatattgtctgttgtcttccatgtgaacatgacattgagtcactctgc

SEQ ID NO: 134751 - RNA, 4605 nt, Artificial Sequence
  derived and/or modified sequence
auggcgcucaccccuggcuggggcucuagcgcuggucccguuaggccugaacuguggcugcuuuuaugggcggcugccuggaggcugggcgccucagcuuguccugccuuguguacauguacaggaacaaccguugacugucacggcaccggguugcaggcuauccccaaaaauaucccacgcaacacagagagguuggaauugaacggcaauaauaucacuagaauccauaaaaaugacuucgccggacucaagcagcuuagagucuuacagcuuauggagaaucagaucggggccguggagagaggcgcuuucgacgacaugaaggagcuggaacgauuacgucugaauagaaaccaguugcacaugcuucccgaacuguuguuucagaauaaucaggcccugucccgacuugauuugucagagaaugcgauucaggcaaucccucgaaaagccuucagaggagcgacugaccucaagaaccugcaacuggacaagaaccagaucagcugcaucgaagaaggggcauuuagggcauuacggggacuagagguccuuacacucaauaauaacaacauaacaaccauccccguguccuccuucaaccauaugccaaaacugcgaacauucaggcuccauagcaaccaccuuuucugugauugccaccuggccuggcugagccagugguugcgccagaggccuacaaucgggcuguuuacgcagugcaguggcccggcaucacugcgggggcuaaacguggcagaagugcaaaagagcgaguucuccuguucuggucagggagaagcaggacgaguacccaccugcacucucuccucuggcagcugcccggccaugugcacaugcuccaacggaauuguggauugccgaggcaaaggguugacagcaauaccugccaaccuucccgaaacuaugacagagauacggcuggaauuaaauggcaucaaaagcaucccuccuggagccuucaguccuuaucgcaaacuucggaggauugauuuaucuaauaaucaaauugccgaaaucgcaccugaugcauuucaggggcuccggagccucaauagcuugguguuguaugggaauaagaucaccgaucugccacgcggugucuucggggggcuguauacccugcagcugcuccuucugaaugcuaacaaaaucaauuguauacgcccagaugcauuucaggaucuacaaaaccuuagccuacuuagccucuaugauaacaaaauccagucucucgcuaaggggacuuuuaccagucuccgcgcuauucaaacauugcaccucgcccagaauccuuucaucugugacuguaaccuaaaauggcucgccgauuuucuacgcacaaauccuauugagacaaguggcgcacguugugcaagcccuagacgacuggcuaacaagcgcaucggccagaucaaaucuaagaaauuuagguguucagcaaaggagcaauauuuuauucccggaaccgaggacuaccagcugaacagcgagugcaacucagacguggucugcccacauaaaugccggugcgaagccaacgucguagagugcucaucuuugaaauuaaccaagaucccugagcggauuccccagucuacagcggagcugagacugaacaauaacgaaauuaguauacuggaagccacagguauguuuaaaaagcugacccaccugaagaagaucaaccugucaaacaauaaggugucugaaaucgaagauggagccuuugagggggcggccuccguaucugagcugcaucucaccgccaaccagcuagaaagcauccgguccgggauguucagaggacuggacggacuccgcacucucaugcuccgaaauaaucggauuaguuguauccacaaugauagcuuuacuggucuccggaaugucagguugcuguccuuguacgauaaucagauuacuacaguuagcccaggagcuuucgacacacuacagucguugucuaccuugaaucugcuggcuaaccccuuuaacuguaauugccaacucgccuggcucgggggguggcuuaggaagaggaaaauuguuaccgggaacccuaggugucagaaccccgauuuucugcggcaaauuccacugcaggaugucgcguuucccgauuuucgaugcgaggagggacaggaggagggcggcugccugccccguccacaauguccucaggaaugugccugccuggauaccguuguaaggugcucaaacaaacaucugcgagccuugcccaaggguauuccaaagaacguuaccgaguuguaccuggaugguaaucaguucacauuggucccuggacaauugucuaccuuuaaauauuuacagcugguggaucucaguaauaacaagauuuccucccucucaaauuccaguuuuacuaauaugucacagcuuacaacccugaucuugagcuauaaugcccugcagugcaucccacccuuagcauuucaaggacugagaucccugcgccugcugagccuccauggcaacgauaucucuacacuucaggaaggcaucuuugccgacgugaccucacucagccaucuugcuauaggugcuaaucccuuguauugcgauugucacuugcgguggcuaagcaguugggucaagacgggcuauaaagaaccuggcaucgcccgaugugccggcccucaggauauggagggcaaacuguuauuaacuacgccugcuaagaaguuugaaugccaggggcccccaacacuugccgugcaggccaaaugcgaccucugucuauccucaccuugccaaaaccagggaacuugucacaaugacccacuggaagucuauagaugugccugcccaaguggcuauaaagggcgagauugcgaaguaucuuuagauagcugcaguagcggccccugugaaaacggcgggaccugucaugcgcaggagggcgaggaugcuccuuuuacuuguucaugccccacuggauuugagggcccuaccugcggugugaauacagaugacuguguggaccacgcuugcgcaaauggcggaguuugugucgacggggugggcaauuacacuugucaaugcccccuccaauaugaaggcaaggccugugagcagcugguggaccugugcagcccugaccuaaauccuugccagcacgaggcacaguguguuggaacucccgaugguccaagaugcgaaugcaugcccggcuacgccggagauaacugcucagaaaaccaggaugauugucgggaucaccgaugucaaaacggcgcccaguguauggaugaaguuaacucguacucuugccuuugcgcugagggguacucuggccagcucugugaaauccccccucacuuaccugcgccuaagucuccuugcgaagggaccgaaugucaaaauggagccaacuguguggaccaaggaaaccggcccguaugccagugucuccccggcuuuggcgggcccgagugcgagaaacuccugucuguuaacuucguugauagggauacauaucuucaguucacugacuugcagaacuggccccgagcaaacaucacccugcaggugaguacagcugaggacaauggaaucuugcuuuauaacggcgauaacgaucacauugcgguggaacucuaccaaggccauguccgcguaaguuacgauccagggucuuacccuagcagugcgaucuacucugccgagacaauuaacgacggucaguuccauacaguagaguuggucgcguucgaucagauggugaaucuuaguaucgacggggguucuccuaugacuauggacaauuucggaaaacacuacaccuugaauagcgaagcuccccuguacgugggcgggaugcccguugauguuaacucugccgccuuucggcucuggcagauccuuaacgggaccggcuuucacggcuguauccgcaaccuguacaucaacaacgaacugcaagauuuuacaaaaacucaaaugaagccuggaguggugccuggcugugagccuugccggaaacuguacugccugcauggaaucugucagccaaaugccacacccggaccaaugugccacugcgaagcuggcugggugggccuccacugugaccaacccgccgacggcccaugccacggucacaaauguguacacggucagugcguaccucucgaugcccuuucauacagcugccagugccaggacgguuauaguggagcccuguguaaucaggccggagcccuugcugaaccgugcaggggccuucagugcuuacauggccauugucaagccucaggcaccaaaggggcucauugugucugcgacccggguuuuucaggcgagcucugugaacaggaguccgaaugucggggcgacccugugcgggauuuucaccaagugcaaaggggguaugccauaugccagacuacuagaccucuuaguuggguggaauguagagguagcuguccaggucagggaugcugucaaggcuugcguuugaagcggagaaaguuuacguucgaguguuccgauggcaccucauucgccgaagagguagaaaaaccaaccaaguguggcugugcccuuugugcauag

SEQ ID NO: 134752 - RNA, 2349 nt, Artificial Sequence
  derived and/or modified sequence
uuauggcuccuguugugggcugccgccuggaggcucggcgccuccgccuguccugcucuuugcacauguacuggaaccacugucgacugccacggaacaggacuccaggcuauaccaaaaaauaucccucguaacacggagcgacuugagcuaaauggaaacaauaucaccagaauacacaaaaaugacuucgccggauuaaaacagcuccggguccuucaacucauggaaaaucaaauaggcgccguggagagaggagcuuucgaugauaugaaggagcucgagcggcugcgucugaaccgcaaccagcuucacauguugcccgaacugcuguuccaaaauaaccaagcacuuucccgucucgaccuuuccgagaaugccauccaggcuauuccaagaaaggcauucagaggugcuacugaccuuaaaaaucuucagcuggauaaaaaccagaucaguuguauugaggaaggugcuuuucgggcccuucgcggauuggaggugcuuacguuaaacaacaauaacauuaccacaauuccugucuccagcuucaaucacaugcccaaauugcgaaccuuccggcugcacucuaaccaccuguuuugcgauugccaucuggccuggcugagccaguggcugcgacaacgcccuacgaucgggcuguucacucaguguucaggacccgcaucauuacggggguuaaauguggccgaaguccagaagagugaguucucauguagcggacagggagaagcuggaagaguaccgacgugcacccugucuucaggcucauguccugcaaugugcacauguaguaacgguaucguggacuguagagguaaaggucuuacagcaauccccgcuaaucuaccugagacaaugacugagauuagacuggaacuuaacgggaucaagucaaucccgccgggggcauuuucaccguaccguaaauugcggcggauuuguccccuaagcuucuguagcccuugucgugaucugucuaacaaucaaaucgccgaaaucgcuccggacgcguuucaaggucuccggucucugaacagucucgugcuguauggaaauaaaauaaccgaucuuccgcgaggugucuucggcggacuguacacucugcagcugcuacugcucaacgccaauaaaaucaacugcauccggccugacgcuuuccaggaccugcaaaaccugucucugcugucucuguaugacaauaaaauucagucccuggcaaagggcaccuucaccucccugagagcgauucagacucugcauuuagcccagaaucccuucaucugcgacugcaaucucaaauggcuugccgauuuccuccgaacuaaucccauugaaacuuccggagcacggugugcgagcccuagacgacuggccaauaaaaggaucggccagauuaagucuaaaaaguuccgguguucugcuaaagaacaguacuuuauucccgguacagaagauuaucaguugaauagugaguguaacagcgacguagugugcccgcacaaguguaggugcgaagcaaacguuguagagugcaguucccuaaagcugaccaagauucccgagcgcaucccucaguccaccgcagaacuucggcugaacaacaaugagaucucaauuuuggaggcaaccggcauguuuaaaaaacugacacaccucaagaaaaucaaucucuccaauaacaaagugucagaaaucgaggacggagccuuugaaggcgccgcuucagugucugaacugcacuugaccgcuaaccaacuagagucaauaaggucuggcauguuccguggacucgauggccugcgaacccugaugcuucgcaacaaccgaauaagcugcauccacaacgauucuuucacuggauuacgcaauguucgguuguuaucucucuaugauaaucagaucacgaccguguccccaggugcuuuugacacacugcagagucuguccacuuugaaccucuuggccaaucccuucaacugcaacugccagcuggccuggcucggaggcugguuacgaaagcgaaagauugugacugggaacccuagaugccagaaucccgauuuccuucgccaaauccccuugcaggaugucgcauuuccagauuuucguugcgaagaaggccaagaggagggaggcugcuugccccgcccacaauguccucaagaaugugcuugucuagauacuguugugcgauguaguaacaaacaucugcgugccuugcccaagggaauuccuaagaacgugaccgagcuuuacuuagaugguaaccaguucacucucgugccugggcagcugaguaccuuuaaauaucugcagcugguauag

SEQ ID NO: 134753 - RNA, 1230 nt, Artificial Sequence
  derived and/or modified sequence
auggcauugacuccaggauggggcucuagcgcagguccaguucggccagagcuuuggcuacugcugugggccgccgcguggcgauuaggugccagugcguguccugcccuaugcaccugcaccgggaccacuguggacugucauggaacuggguugcaggccauuccaaagaacauaccuagaaacaccgagaggcucgaacugaacgguaacaauauaacaaggauucauaaaaaugauuucgccggccugaagcaacuuagagugcugcagcucauggagaaucagauuggcgcuguggagcggggcgccuucgacgauaugaaagagcuggaacgccuucgucugaauagaaaucagcugcauauguugcccgagcugcuauuucagaacaaccaagccuugagccgccucgaucuguccgaaaacgccauucaggcuaucccucguaaagcauuuaggggcgcuaccgaccucaaaaaucuccagcuggacaagaaccagauuucgugcaucgaggaaggggcuuucagagcccugagagggcucgaaguuuuaacgcuuaauaacaacaauaucaccacuauuccuguauccuccuucaaccacaugccuaagcuucgaacuuucagguugcacuccaaccaccucuucugcgacugucaucuggcuuggcuuucccagugguuaaggcagcggccaacuaucggccuguuuacccagugcaguggccccgcuagucuccgggguuugaauguugcugagguccagaaguccgaauuuaguugcucuggacaaggggaagcuggacgcgugccuaccuguacccugucauccgguuccugcccugccaugugcaccugcagcaacgggaucgucgauugucgaggaaaaggucucacagcuauccccgccaaccucccugagacuaugacagagaucaggcuggaacugaacggcauuaagucuaucccgccaggcgccuuuaguccauauagaaagcuccgccgcaucgaccugaguaacaaucagauugcggagaucgcuccugaugcuuuccagggucuucgcagucucaacuccuugcauaccgggcccgucacaugcccacauacaacaggcacgcacuccagucacugcagagcguuugcuguggccgucccucacucucgcaaugaucuugaggcuauguuugaagaggaagugccucggauuuucuauucagcguag

SEQ ID NO: 134754 - RNA, 1143 nt, Artificial Sequence
  derived and/or modified sequence
auggccuuaacuccaggaugggggucaagcgcuggaccugugcggccugagcucuggcuucugcucugggcagcggcuuggcggcugggcgcaucugcaugucccgcucugugcacaugcaccggcacgaccguggacugccaugguaccgggcugcaagcgauuccuaagaacauuccgcggaacaccgagcgacuggaauugaacgggaacaacaucacacggauacacaagaacgacuucgcggggcugaaacaguugagaguacugcagcugauggaaaaucagauaggcgcaguagagagaggcgcauuugacgauaugaaggaguuggagagacuggaccugagcgaaaacgccauucaagcuauacccagaaaagccuuucgcggcgcgacggaccugaaaaauuugcaacuggauaagaaccaaaucucuugcauugaagagggggcauuccgagccuuacgcggacuugaagugcucacauugaauaauaacaauaucacuaccauaccuguguccucuuucaaucauaugccaaaacugaggacauuucggcugcacagcaaccaccucuucugcgauugucaccucgccuggcuaucacaguggcucagacagcgccccacuauaggauuguuuacacaauguucuggcccugccagccugagaggccuaaauguggcggaggugcagaaauccgaauucucuugcucaggacagggggaagcuggccgggugccgaccuguacccucucuucaggaagcugucccgcuaugugcacauguucuaaugguauuguugauugccgugguaaaggacuaaccgccauccccgcuaaccucccggagacaaugaccgaaauuaggcuugagcucaacgggaucaaauccauccccccaggcgcauucucacccuaccguaaacuucgaaggauugaccugagcaacaaucagaucgccgaaauugccccugacgcauuucagggauugaggucucucaacagcuuggugcuuuauggcaacaaaauuacugauuuacccaggggcguuuuugguggguuauauacguugcagcuuuuacuuuuaaacgcaaacaaaauuaauugcauacgaccugaugcuuuccaggaccucuag

SEQ ID NO: 134755 - RNA, 2448 nt, Artificial Sequence
  derived and/or modified sequence
auggcacucacacccggguggggcuccuccgccggacccguucgcccagaacuguggcugcuuuugugggcagcugccuggcgccuuggagcaagcgccugccccgcucuguguacuugcacagggaccacaguggacugucauggcaccggguugcaggcuaucccuaagaauaucccacgcaauaccgaacgucuggaacugaauggaaauaauauuacucgcauccacaaaaaugauuucgcuggccuuaagcaacucaggguacuacagcugauggaaaaccagaucggugcaguggaacgaggcgccuucgaugauaugaaagaauuggagcgacugcggcucaaccggaaucagcugcauaugcuucccgaacuccuguuccaaaauaaucaagcccugucuagacucgaucuuagugagaaugcaauucaggccauaccacgcaaagcauuucgcggggcaacugaucucaagaaucugcagcuagacaaaaaccagaucaguugcauugaagagggugcauuuagggcuuugcgcgggcucgagguucucacacuaaauaacaacaauaucaccaccaucccuguaucguccuuuaaucauaugcccaagcuuagaacauuuaggcuucauagcaaccacuuauuuugugacugucaucucgcauggcucucccagugguugcggcaacggcccacuaucggcuuguucacucaaugcucuggcccagcuucccuacgcgggcugaauguagcggaggugcagaagucagaguucucaugcucaggccagggggaagcaggacgugugcccaccuguacccucucaucaggguccuguccugcaaugugcaccugcagcaauggaaucgucgacugccgcgggaaaggacugaccgcuauuccugcaaaccugccagaaacuaugaccgagauccgacucgagcucaauggaauuaagucuauuccaccgggcgccuucucccccuaccgcaaacugaggcgcauuugcccucuuagcuucugcaguccaugcagggaucucucgaacaaucagaucgcagaaaucgcccccgacgccuuucaaggucugagaagucucaacagcuuaguucuguacggcaacaagauaaccgaccugccuagagguguauucggagggcuguauacacugcaacuucuccugcuuaacgcaaacaaaauuaacuguaucagaccugacgcauuucaagaucugcagaacuugucucugcugucucuguaugacaacaagauccaguccuuagcgaaaggaaccuuuacuucacugcgggcgauccagacucuccaccucgcucagaaucccuucauuugugauuguaaccugaaguggcucgccgacuuccugaggacaaacccuauugaaacaucaggcgcuaggugugcaucucccagacgacuggccaacaagcguauagggcagauuaaauccaagaaauucaggugcagugcuaaggagcaauauuucaucccagggaccgaagauuaucaacugaacagugaauguaauuccgaugucguguguccucacaagugcaggugcgaagcaaacguuguugagugcucaucuuuaaaacuuacuaagaucccagaaaggaucccccaguccacggcugagcucaggcuaaauaauaaugaaauuaguauccuggaggccacugguauguucaaaaagcucacgcaucugaaaaagauaaaucugagcaauaacaaagugucagaaaucgaagauggggcuuuugaaggcgcugccuccgugagcgaguuacaccuuacugcuaaccaacuagagucaaucagguccggaauguuucggggccuugauggcuuacgaacucuaaugcugcguaacaaucggaucucuuguauacacaacgauaguuuuacuggguuacguaacguccggcuccuguccuuguacgacaaucagaucaccacaguaagccccggggccuucgauacucuucagagucucuccacgcugaacuuacuggcaaauccuuuuaacugcaauugccagcuugcauggcugggaggcuggcuucguaagagaaagauugugacaggaaauccccgcugccagaacccugacuucuugcgccagauuccucuccaagacgucgcuuucccugacuuucggugugaagaaggucaggaagaaggagguugucucccccgcccccaguguccucaagagugcgccugucuggacacuguagucagauguaguaacaagcaccuuagggcccugcccaagggcauuccaaaaaaugugaccgaguuauaucuggacggcaaccaguuuacgcuaguuccuggucaacugucgacuuuuaaguaccugcagcuaguaauccucuccuacaacgcacuccaguguauuccgccgcuggcuuuucaauag

SEQ ID NO: 134756 - RNA, 4386 nt, Artificial Sequence
  derived and/or modified sequence
auggcuuugacaccaggcuggggaucaagcgcgggccccguucgacccgagcuuugguuacugcugugggcugccgcauggcgacuuggagcuagugcuuguccugcgcugugcacauguacagggacuacuguggacugccacggcaccggacuacaagcaauuccuaagaauauucccaggaauaccgagcgacucgaacuaaacgggaauaacauaacccggauucacaagaaugauuuugccggauuaaagcagcuccgcgugcuucagcuuauggagaaucagaucggagcuguggagcgcggcgccuuugaugacaugaaggaacucgaaagauugagacugaacaggaaccagcugcauaugcucccugagcuccuguuccagaacaaucaagcucuuagucgacucgauuugagugaaaacgcaauacaggcuaucccucgcaaggccuuccggggcgcuacugaucugaagaaccugcagcucgauaagaaccaaauaucaugcaucgaagagggagcauucagggcccugcggggccucgaggugcugacgcuaaacaauaauaauauuaccacaaucccuguguccuccuuuaaccacaugccgaaguuacggacauuuagguugcauucgaaucaccucuucugcgacugucaccuggccugguuaucccaguggcugcgacagcgccccaccaucggacuauucacccagugcuccgggcccgccucccugcgcggccugaacguggccgaaguucaaaaaucugaguucucuuguucuggacaaggcgaggcuggaagaguucccaccuguacucuuuccucagggagcugccccgccauguguaccuguucaaacggcauuguggauuguagaggaaaaggccucaccgcuauccccgccaacuugcccgaaacuaugaccgagauccggcuggagcugaacggcaucaagucuauuccuccaggcgcguuuuccccauauagaaaacuuagaagaauugaccucagcaacaaucagauugccgaaauagccccugacgcuuuucaaggccugagaucccugaacucacugguucuuuacggaaacaaaauuaccgaccuuccuagaggggucuuuggcggccuguacacccuucagcugcuguuacuuaacgcaaacaagaucaacugcauccgcccugaugcauuccaggacuuacagaaucuuucacuuuuaucuuuguacgacaauaagauacagucccuggcgaaggggaccuuuacuucccuucgggcgauccagacacugcaucucgcccagaacccuuucauuugugacugcaaccucaaaugguuagcugauuuucuucggacaaaucccauugaaacgagcggggcgcgcugugccuccccgaggagacucgcuaauaagagaaucgggcaaauaaagucaaagaaguuuagaugcagugcuaaggagcaguauuucauucccggcaccgaggauuaccagcuuaauuccgaguguaauucagacgugguguguccacacaagugucggugugaggcaaauguuguugaaugcaguucccugaaacugacuaaaaucccggagcgaaucccgcaaucaaccgccgagcugaggcuuaacaauaacgagauaucaauucucgaagcuaccgguauguucaaaaaacugacucaucucaagaaaaucaaccugucaaacaacaaggucucagagauugaggauggagcauuugagggugcugcaucaguuagcgagcuucauuuaacagcaaaccaguuggaaagcauucgcuccggcauguuuagagguuuggacgggcuaaggacccuuaugcugcggaauaaccguaucucuuguauacauaaugauuccuucacgggucuuagaaacguccgccuccugucuuuauaugacaaucagauuacuacagucagccccggcgcguuugauaccuuacaaucucucagcacccuaaauuugcuggccaaccccuucaauuguaacugccagcucgcaugguuaggcggguggcugcgcaaaagaaaaauagucaccgggaacccgcgcugccagaacccugauuuuuugcgccaaauuccacuucaagacguugccuuuccugacuuccgaugcgaggagggacaggaggaaggggggugccuaccucgcccucaaugcccucaggaaugcgccugccuggacacagucgucagauguuccaacaaacaccuaagagcacuucccaaaggcauaccaaaaaaugucacugaacuauaccuggacggaaaucaguucacccucguucccggucaguugucuacauucaaauacuugcaacucgucgaccuguccaauaauaaaauuucuagucugagcaauucaagcuucacaaauaugucucaguugacuacauuaauuuuaucguacaacgcgcuucaguguauccccccucuggccuuccaaggcuuacgauccuugagacugcucucccuccacggaaacgauaucucuacccugcaggaaggaaucuucgcugaugucacgagccuuucacaccucgccauaggugccaauccacuguacugcgauugccauuugcgguggcuuucgagcugggugaagacggguuauaaagagccggguaucgcccgcugcgcaggaccacaagacauggaagggaaacuccugcucacaacuccugcaaaaaaauucgagugccaaggcccaccuacacuggccguucaagcaaaaugugaccuauguuuaucgucccccugucagaaccaaggcacuugccacaacgaccccuuagagguauaccggugcgcuugcccuagcggcuauaaagggagagacugugagguuucgcucgacaguuguagcucuggcccuugcgagaauggaggaacaugccacgcacaagaaggggaggaugccccguuuacguguagcuguccuacaggguuugaaggcccgacguguggcgugaacaccgaugauuguguagaucaugccugugccaacggugggguauguguugacggagucggcaauuacaccugccagugcccuuugcaguacgagggcaaggccugcgagcagcuuguggaccucugcucaccagaucuuaacccaugucagcaugaggcccaauguguugggacuccagacgggccuaggugugagugcaugccagguuaugccggcgacaauugcucugagaaucaggacgacugccgcgaccaucguugccagaauggcgcacaauguauggacgagguuaauagcuacagcugccugugugcugagggauacucuggccagcucugugaaauuccaccgcauuugccugccccgaagucccccugcgaagggaccgaaugccagaauggggcgaauuguguagaccaagggaauaggcccgugugccagugccugccgggcuuugggggucccgagugugagaaguuacuuagcguaaauuuugucgacagggacacuuaucuccaauuuacagaccuccaaaacuggccgagggcuaauauuacacugcaaguguccaccgcugaagacaacgggauccuccuuuauaacggcgauaacgaucacaucgcaguugagcuuuaccagggccacgugcgaguaucauacgacccuggcucguaccccucuucagccauauauagcgcagagacgaucaaugacggacaguuucauacaguagagcugguugccuuugaccaaauggucaauuugagcauagauggcgggagccccaugacaauggauaauuuuggcaaacauuauacacuuaacucggaggcaccgcuauaugugggggggaugccggucgaugugaauuccgcugcauuucgccuguggcaaauuuugaauggcacaggauuccacggcugcauaaggaaucuuuacaucaacaacgaauuacaggacuucacaaagacccagaugaagcccggggugguuccuggcugcgagccaugccgaaaguuguacugccuccacgggauuugccaaccaaacgcaacaccuggaccaaugugccacugugaagcugguugggugggccuucauugugaccagccggcagaugggccuugccauggucacaagugugugcacggacagugcgugccacucgaugccuuguccuacaguugccagugccaggacggcuacucuggcgccuugugcaaccagucuccuucggcgggcggcacacucucugggacguucacgcgaucccggggggccaugccauccgcucgaccacgugccccuugccacggcuggagcgccggagcccgagcucaggcccgcgcagccgcccgggcuuuuggauag

SEQ ID NO: 134757 - RNA, 1143 nt, Artificial Sequence
  derived and/or modified sequence
auggcucugacgccaggauggggauccuccgccgguccaguccgccccgagcuguggcugcuacuuugggccgccgcuuggcgucucggcgcaagugccuguccagcucuuugcacauguacagggacuaccgucgauugucacgggacaggccuccaggcaauaccuaaaaacauuccuaggaacacugagagacuggagcugaauggcaacaacauuaccagaauccauaaaaacgauuucgcagggcuuaaacagcuccgcgucuuacaacugauggagaaccaaaucggagcaguagaacgcggagcuuucgacgauaugaaagaacucgaacgguuagaccucuccgagaaugcaauccaagcaauacccaggaaggcuuuucguggggcgaccgaucucaagaacuuacagcuagacaaaaaucaaaucagcuguauugaggaaggcgccuuucgagccuuaagaggccuugaaguccugacacugaacaauaacaacaucacgacaaucccaguaucuagcuucaaucacaugccaaagcuucgaaccuucagacuccacagcaaccaccuguuuugugacugccaucucgcauggcuuucgcaguggcuucgucagaggccuacuaucggacuauuuacccaauguuccggccccgcaagucucaggggacuuaaugucgcagaaguacagaaaucagaguuuagcugcucaggacagggcgaagcagggcgcguccccacaugcacccuguccuccgguuccugcccugcuauguguacgugcucuaacggcauuguggacugucgaggcaaaggacucacagcuauaccagcuaacuuaccugaaaccaugacugaaaucagacuggaacucaauggaaucaagagcauuccaccuggcgcauucucaccguauaggaagcugaggcgcauagaccugucuaacaaccagaucgcagagauugcccccgaugccuuucagggcuuaaggucauuaaacucuuugguacuuuacgguaauaagauuaccgaucugcccaggggcguguuuggcggacuguauacucugcagcuccuacugcuuaaugcuaacaagauuaacuguauaagaccggaugccuuccaagaucuguag

SEQ ID NO: 134758 - RNA, 4605 nt, Artificial Sequence
  derived and/or modified sequence
auggcccuaacuccaggauggggaucaagcgcgggccccgugcguccugaacucuggcuacugcugugggccgccgcguggcgguuaggcgcguccgcuuguccagcucuguguaccuguaccggcacuaccguggauugucacgggaccggucuacaggcaauuccuaaaaauauuccucggaacaccgagcgucuugaauugaacggaaacaacaucaccaggauccauaagaacgauuucgcuggucugaaacagcuccgagugcugcaacugauggaaaaucaaauuggcgcugucgaacgcggagcuuuugacgacaugaaggaacuugagagacuucggcuaaaccggaaucaacugcauaugcugcccgagcugcucuuccaaaauaaccaagcucugucccgucuggaccuuagcgaaaaugcaauccaggcaauaccucggaaggccuuuagaggcgcaaccgaccugaagaaucuccagcuggacaagaaccagaucucuugcauugaagaaggggcauuuagagcgcugcggggucuggaaguucugaccuuaaauaauaauaacauuaccacaauuccugucucuagcuucaaucauaugccuaaacuccguacuuucagauuacacuccaaucaucucuucugcgauugccauuuagccuggcugucacagugguuaagacagcgccccacuaucggccucuucacacaguguuccgguccugcuucacuuaggggacugaaugucgccgaagugcaaaagucugaauucagcugcuccgggcagggggaagccggucgcguucccacuugcacccucucuuccggaucaugcccugcaauguguaccugcagcaacgguauuguggacugccgggggaaaggccugacugccaucccagccaacuuaccagagacuaugacggaaauccgacuugagcugaauggaauuaaaucaaucccucccggggccuuuagcccuuacagaaaauuacgaagaauugaucuuagcaacaaccagauagcagaaaucgcccccgacgcuuuccagggccugcggucacuaaauagccugguucuguacgggaacaagaucacagacuugccaaggggugucuuuggcggcuuauacaccuuacaacuccucuuacuaaaugcuaacaagaucaacuguauaaggccagacgccuuucaggaucuacaaaaccuuagccuacuuagccucuaugauaacaaaauccagucucucgcuaaggggacuuuuaccagucuccgcgcuauucaaacauugcaccucgcccagaauccuuucaucugugacuguaaccuaaaauggcucgccgauuuucuacgcacaaauccuauugagacaaguggcgcacguugugcaagcccuagacgacuggcuaacaagcgcaucggccagaucaaaucuaagaaauuuagguguucagcaaaggagcaauauuuuauucccggaaccgaggacuaccaacucaacagcgaguguaauucugacgucguguguccccacaaaugcagaugcgaagcuaaugugguggaguguuccagucugaaacugaccaaaaucccagagagaauuccacaguccacagcagaacuccggcugaauaauaaugaaauaucaauccuagaagccaccgguauguuuaaaaaguuaacacauuugaaaaagaucaaccugucuaacaacaaagucucugaaauugaagacggagcguucgagggggccgcguccguuagcgaacugcaccugacggcaaaucaacuggaaagcauuagaagcgguauguuccggggauuggauggacugaggacccugaugcugcggaacaaucggaucucuuguauacauaacgauucuuucaccggccuaaggaacguuagguuacugagccuguacgauaaccagaucacaacaguaaguccaggagcauuugacacacugcagagcuuguccacccuuaaccuguuagcuaacccauuuaacuguaacugccaacuugcauggcugggcggauggcugagaaagagaaagauugucacggguaauccaagaugucaaaaccccgauuuucuccgccagaucccccugcaagauguggccuuucccgacuuucguugcgaggaaggacaggaggaaggggguugucuccccagaccacaaugcccacaggagugugccugccuagacaccguggugcggugcaguaacaaacaccuucgugccuugcccaaaggaauaccuaagaacguaacagagcucuaccuagaugggaaucaguuuaccuuagugcccggacaauugucaacguucaaguacuuacaauuaguugaccugucgaauaacaaaauuagcucacuauccaauucuuccuuuacaaauaugucccagcucacaacucugauuuuaaguuauaaugcacuucaguguauucccccucucgcguuucagggccuuaggucacuccgacucuuaagccugcacgggaaugacauaagcacacuucaggaaggcaucuucgcagacgugaccucccucucucaccuggcuaucggcgccaauccccuguacugcgacugucaucuacgguggcuauccagcuggguaaaaacaggauauaaggaacccgguauugcucggugcgcuggcccucaggauauggagggcaaacuguuauuaacuacgccugcuaagaaguuugaaugccaggggcccccaacacuugccgugcaggccaaaugcgaccucugucuauccucaccuugccaaaaccagggaacuugucacaaugacccacuggaagucuauagaugugccugcccaaguggcuauaaagggcgagauugcgaaguaucuuuagauagcugcaguagcggccccugugaaaacggcgggaccugucaugcgcaggagggcgaggaugcuccuuuuacuuguucaugccccacuggauuugagggcccuacuugcggaguaaacacagacgacugcgucgaucacgccugugccaacgguggcguaugugucgauggcgucggcaacuacacuugucaaugcccuuuacaauacgaaggcaaggccugugaacaguuggucgacuuaugcucgccugaucugaaccccugucagcaugaagcgcaguguguuggcaccccagacggcccccgaugugaaugcaugccuggauaugcgggggauaauuguucagaaaaccaagaugacugcagagaccacagaugucaaaauggagcccaauguauggacgaagugaauucauacucuugucugugcgccgaaggcuacuccggacagcuuugcgaaauccccccucaucugcccgccccaaaaucuccaugcgaagguacggaaugccaaaacggcgcgaacugcguugaccagggcaaucgcccagucugccagugcuugccuggauucggcgguccugagugugaaaaacugcuaucagucaauuuuguggacagagacaccuaucugcaauucacggaccugcagaacuggccccgggcgaacauaacccuucaggucuccacugccgaggauaauggaauccuguuauauaauggugauaacgaucauaucgcaguggaacuuuaccaaggucacgucagagugucauaugaucccggcuccuacccuucuagugcuauuuacucugcagagacaauaaacgacgggcaauuccauaccguugagcucguggcuuucgaucaaaugguuaaccuuuccauugacgggggguccccuaugaccauggacaauuuugggaagcauuacacucucaacagcgaggcaccacucuacgucgguggaaugccaguggacgugaacuccgccgccuuuagacuauggcaaauucugaacggcacuggauuucaugggugcauacgaaauuuauacauuaauaacgaacuacaagacuuuaccaaaacccagaugaagccaggaguggugcccgguugcgaaccgugccguaagcuauacuguuugcacgguauuugucaaccuaacgcuaccccaggcccaaugugccacugcgaagccggguggguuggccuccauugcgaucagccagcagauggcccaugucacggccauaaguguguccacggccagugugucccauuagacgcccugucauacuccugccagugucaagacggauacagcggggcucucuguaaccaagcuggcgcucuugccgaaccuuguagaggccuucagugccugcacggacacugccaggccagcggaacgaagggcgcccacugugugugcgauccaggcuucuccggagaacucugugagcaggagagcgagugucgcggagacccagugcgggacuuucaucaggugcaacggggcuacgcaauaugccagacaacaagaccauuaucauggguggaauguagggggucguguccagggcagggcuguugccagggauugcguuugaagcggagaaaguuuacguucgaguguuccgauggcaccucauucgccgaagagguagaaaaaccaaccaaguguggcugugcccuuugugcauag

SEQ ID NO: 134759 - RNA, 2349 nt, Artificial Sequence
  derived and/or modified sequence
cuuuggcuacuccugugggcugccgccuggagguugggugcuagcgcaugcccagcguugugcacaugcacugggaccacggucgauugccacgguacugguuuacaggcuauccccaaaaauaucccaaggaacaccgagagacuugaauuaaauggaaacaauaucaccaggauccauaaaaaugauuuugcuggcuugaagcaguugagggugcugcaacuuauggaaaaucagauuggcgccgucgagaggggagcuuuugaugacaugaaagagcucgagagauugcgauugaaccgaaaucaacuucacaugcucccagaauuacuauuccagaauaaccaagccuugagccgccuagaucuuucugaaaacgccauucaggcgauuccucgcaaggccuuucguggcgcuacagauuuaaagaaccuucagcuugauaaaaaccaaaucuccuguauugaagaaggugcguucagggcccuacgaggguuggagguacucacccuuaauaacaacaauaucacgacuaucccgguuucuagcuucaaucacaugcccaagcugcgcacguuucgccuucauagcaaccacuuguucugcgauugccaucuggcuugguugucacagugguugaggcaacgcccuacaauuggguuguucacucaaugcagcggcccagcuucacuucgaggucuaaauguggcagaagugcagaaaucggaauucaguuguaguggacagggcgaagcaggaagagugccaacaugcacgcugagcucuggcucaugccccgcuauguguacuuguuccaacggaaucguugauugcagaggaaaaggcuugaccgccauucccgcaaaucuucccgagacaaugacagagaucaggcuugaacucaacggcauaaaaucuaucccucccggagcauucagucccuacaggaaacuucgaaggauuugcccccugaguuucugcucgccuugucgugaucucuccaacaaccaaaucgcagaaauugcacccgacgccuuccagggcuuacgcucuuugaauucccugguuuuguauggcaauaagaucaccgaucuuccccgcggagucuucggcggccuauacacacugcaacuccuucugcucaacgcaaauaagauuaacugcauucgaccagaugcuuuucaagaccugcagaaucuuucuuuacugucacuguaugauaacaaaauucaaucccuugcuaagggcacauuuaccagcuuacgcgcaauucaaacccugcaccucgcacagaauccauucauuugugacugcaaucucaagugguuggcugacuuccugcguacgaauccuauugaaacuaguggugcucgcugcgccuccccucggcgacucgccaauaaaagaauaggccagauuaagaguaaaaaguuccgcugcucagcaaaagaacaguacuuuauuccgggaaccgaagacuaccagcugaauagcgagugcaauagugaugucguaugcccgcauaagugucggugcgaagccaaugugguggagugcucuucuuuaaagcucaccaagauuccagaacgcauaccccaguccacagccgagcucagacucaauaacaacgaaaucuccauuuuggaggccaccggaauguuuaagaaauugacgcaccugaagaaaaucaauuugucuaacaacaaaguaucggagauugaagauggagcauucgaaggagccgcuucagucagcgaauuacaccucaccgccaaccaacuggagucgauuagaagcggaauguuucgcggucuggauggccucagaacuuuaaugcuuagaaauaaccgaaucucauguauucacaacgauagcuuuaccggucugagaaacgugagguuauuaucacucuaugacaaucagauaacaacuguuagccccggcgcauucgauacgcugcaaucccucucuacccucaacuugcuggccaauccauucaauugcaauugccaauuagcauggcucggcggaugguuaagaaaacggaagauuguaacagggaacccgaggugucagaauccggacuuucucaggcaaaucccccugcaggacgucgcuuuuccagacuuuagaugugaggagggccaggaagagggugguugcuuaccuaggccacaauguccacaggaaugugcaugucuggacaccguugugcgcugcucuaacaagcaucuuagggcccuuccaaaaggcauaccaaagaacguaacugaguuguauuuagacggcaaucaguucacucugguccccggccagcuuucaacuuucaaauaccuacaacugguguag

SEQ ID NO: 134760 - RNA, 1230 nt, Artificial Sequence
  derived and/or modified sequence
auggcacugacccccggcuggggauccucugcgggucccguccggccugaacuuugguugcuguugugggccgccgcuuggagauuaggugcaucugcuugccccgcccuguguacuuguaccggcaccacuguagacugccacggcacuggccuucaggcgaucccuaaaaacaucccgcgcaauacggaaagauuggaacucaacgguaauaacaucacaaggauccauaagaaugacuucgcuggacucaagcagcucaggguucugcaguuaauggaaaaccaaaucggggccguggaacggggcgcauucgacgacaugaaggaacuugaacgauuaagauuaaaccgcaaccagcugcauaugcuaccagaacugcucuuucagaacaaccaagcccuuagccgguuagaucuguccgagaacgcaauccaggcuauaccgcgaaaggcuuucaggggcgccaccgaccuuaaaaaucugcagcuggacaagaaucagauuuccuguauugaggaaggcgcauuuagagcacucagggggcuggaggugcuaacucucaacaacaacaauaucacaacuauuccugugucuaguuuuaaucacaugccuaagcucaggacuuuuagacuucacagcaaucaucuauucugcgacugucaccuggcuuggcucucccaguggcuucggcagaggcccacuauuggucuuuucacacagugcucaggccccgccagucuuagaggcuuaaauguugccgaggugcagaagucagaauucaguuguuccggucagggcgaagcaggacgggugcccaccuguacccuaagcuccggauccugucccgccauguguacauguuccaacgguauuguggauugucgaggaaagggacugacagcuauucccgccaaccuucccgagaccaugacagagauaagauuggaguuaaauggaaucaaaagcauuccuccaggugcauucucacccuaccggaaacugcggagaaucgaccugagcaauaaccagaucgcugaaaucgcucccgacgcauuccagggacuuaggagcuuaaauucucugcacacuggcccugugacauguccacauacaaccggcacacauucuucucacuguagagcauuugccgucgcaguaccacacaguaggaacgaccucgaggcuauguuugaagaggaggucccacgcaucuuuuauucagcuuag

SEQ ID NO: 134761 - RNA, 1143 nt, Artificial Sequence
  derived and/or modified sequence
auggcauuaacaccuggaugggggucaagugcaggcccuguucgcccugagcugugguuauugcugugggccgcugcuuggcgccugggugcaucagcaugucccgcacuuugcacguguaccggcaccacgguagauugccacgguaccggucugcaggccaucccuaaaaacauccccaggaacaccgaacggcuggagcucaacggaaauaacauuacacggauacauaaaaacgacuuugccggauuaaaacaacuaagggugcuucagcuuauggagaaucaaaucggggcuguggagagaggcgcguucgacgauaugaaagagcucgagcgccuggaccuaagugagaaugccauucaagccaucccccggaaagcauuuagaggcgcaaccgaccugaagaauuuacaguuagacaaaaaucaaaucucaugcaucgaggagggcgcauuucgagcccugcggggacuugaggugcugacccugaauaauaauaauaucacuacaauccccguuaguuccuucaaccacaugccgaaacugaggacauuucgccugcacuccaaucaccuauucugcgacugucacuuggcuuggcuaucacaguggcucagacagcgccccacuauaggauuguuuacacaauguucuggcccugccagccugagaggccuaaauguggcggaggugcagaaauccgaauucucuugcucaggacagggggaagcuggccgggugccgaccuguacccucucuucaggaagcugucccgcuaugugcacauguucuaaugguauuguugauugccgugguaaaggacuaaccgccauccccgcuaaccucccggagacaaugaccgaaauuaggcuugagcucaacgggaucaaauccauccccccaggcgcuuucagccccuaccgaaaauugaggcguauugaucugaguaacaaccaaaucgccgaaauugcccccgaugccuuccaaggacuucgaucucugaauucucuuguguuguacgguaauaaaauuaccgaucugccaagagggguuuuuggcggccucuacaccuugcagcuccuucuccugaaugccaacaaaaucaacugcauacgaccagaugccuuucaagaccucuag

SEQ ID NO: 134762 - RNA, 2448 nt, Artificial Sequence
  derived and/or modified sequence
auggcccugacaccuggcuggggaagcucagcagggcccgugaggccagaacuguggcuauugcuuugggccgcugcguggcgauugggcgcaagcgcaugccccgcacuuuguacuugcacagggacuacuguugauugucacgggaccggacuccaagcaauccccaaaaauaucccacguaauaccgaaaggcuugagcucaauggaaacaauaucacucgcauacacaaaaacgacuucgccggccugaaacaauuaaggguccugcaguugauggagaaccaaauuggcgcuguagaacguggugccuucgacgauaugaaagaacuugaacgacugcgacucaaccgaaaucagcuccacauguuacccgaacugcuguuccagaauaaccaggcacucagccgucuagaccuaucugagaacgcuauccaggccauaccacgcaaagcauuccggggggcgacagaccugaaaaaucuccaauuggacaagaaucagauuagcuguaucgaggagggcgcuuucagggcccucaggggcuuggagguuuuaacccuaaauaauaacaacaucacuacaaucccugugagcucauucaaccacaugccgaagcugcgcacuuuuagauuacacuccaaccaccuguucugcgacugucaccucgccuggcuuucacaaugguuacgacagcggccuacaaucggucuauuuacucaguguaguggcccugcuucacuaaggggccugaaugucgccgagguacagaagucugaauucuccuguucuggacagggcgaagcgggccguguuccaacuugcacucuaucauccggaagcugccccgccaugugcacaugcagcaauggaauagucgacugcagggggaagggucugacugcaauuccugccaauuugccagaaacuaugaccgaaauucgccuugagcugaaugggauuaaaucgaucccuccuggugcauuuucuccuuaccgcaaacuccgaagaaucugcccccuuucguuuugcagcccuugucgugacuugucgaauaaccaaauagcugagauugcucccgaugccuuucaaggccugcgcagccucaauucccucgugcucuacggaaacaaaauaaccgaucucccgcgcggaguguucgggggccuguacacgcuucaguugcuguuguugaaugcaaacaagauaaauugcauacgccccgacgcuuuccaggauuugcaaaaccucucucucuuaucucuguacgauaauaagauucagucccuggcaaagggaaccuucacuucucuaagagccauucagacccuccaucuugcccagaacccauuuaucugcgacuguaaccugaagugguuggcugacuuucucaggacaaauccuaucgagacuuccggagcuagaugugcauccccacgacgccucgccaauaaaagaauagggcagauuaaguccaaaaaguuucgcuguucugcaaaagaacaauauuucaucccgggcaccgaggauuaccaacugaauucugaauguaacucugacgucgugugcccccauaaaugccguugugaagccaaugugguagaaugcagcagccucaaacugacaaaaauacccgagagaaucccccagaguacugcugaauugagacuaaauaacaacgagauuucaauucucgaagcuaccggcauguuuaaaaaacuaacgcaucugaagaagaucaaccuaucaaauaacaaagucagugaaaucgaggacggagccuucgaaggggccgccagcgugagcgaacuacaccugacugcaaaucagcuagagaguauaagaagcggcauguuccgcggacucgacggccuucguacgcucaugcugcggaauaacaggauaucauguauccauaaugauucauuuacggggcucaggaaugugcgccugcugagccuuuacgacaaucagauuacuaccgugucucccggagcuuuugauacacugcaaucccuuucaacauugaaucugcuugcgaaucccuuuaauuguaacugccaacuugcuugguuaggaggcugguugagaaagcgcaaaaucguuacgggaaauccaaggugccagaacccugacuuucugcgacagauuccguuacaggacguggcauuccccgauuucaggugcgaagaaggucaagaggagggggguugcuuaccgcggccacaguguccacaggagugugcaugccuagacaccguuguucguugcucuaauaaacaccugagggccuugccuaaggggaucccuaaaaacguuaccgagcucuauuuagauggcaaucaguuuacauugguccccggacaguugucuacuuuuaaauaucuccaacugguuauucucaguuacaacgcuuugcaauguaucccaccucuagcuuuccaguag

SEQ ID NO: 134763 - RNA, 4386 nt, Artificial Sequence
  derived and/or modified sequence
auggccuugacaccuggguggggaaguagugccggccccgugcgaccugaauuguggcuacuacugugggcugcugccuggagauugggcgcaucugcauguccagcccucugcacaugcaccgggacaaccguugacugccacgggacgggcuugcaggccaucccaaagaauauuccaagaaacacagaaaggcucgagcugaacggcaacaauauuacucggauccauaagaaugauuucgccggacuuaagcaacugagagugcuccagcucauggaaaaccaaauuggagcgguggaaaggggcgcuuuugacgauaugaaggaauuagagagacucagacugaacagaaaucaacugcauaugcucccagagcuguuguuucaaaacaaucaggccuugucucgauuagacuuaucugagaacgcuauccaggccauuccacgcaaggcguuucguggugccaccgaccuuaagaaccugcaguuagacaagaaccaaauaucgugcauugaggagggcgcuuuccgcgcguugagggggcuagagguguuaacccucaauaacaacaauauuacaacuauucccguuuccuccuuuaaucacaugccaaagcugcguaccuucagacuacauuccaaccaccuguuuugugacugccaucuugcauggcugucccaguggcuuagacaacggccuacaaucggcuuauucacacaguguuccggcccggcaucucuucggggucuuaacgucgcagaaguacagaaaagcgaauuuuccugcagcgggcagggcgaggcuggcagaguuccuaccugcacacucagcucugggucuugucccgcuaugugcacguguagcaacgggaucguugauugcagaggaaagggcuuaacagcaaucccagcuaaucuuccagaaacuaugaccgagauccgucuugaacugaacgggauuaaguccauccccccaggcgccuucagcccauaccgcaaacuuagaagaauugaucuguccaacaaccagauugccgagaucgccccugaugccuuucaaggucugcgcucuuugaacagccucgucuuguacggcaacaaaauaacagaucuuccacgcggcguauucggcggcuuguauacccuacaacuguuacugcugaacgcuaauaaaaucaacuguauccgcccggaugcuuuucaggaccugcaaaaccucucccuacucagcuuguacgacaauaaaauccagagccuugcuaaagggaccuucacuagucucagagcuauucaaacacugcaucuggcccaaaacccauucaucugugacuguaacuugaaguggcucgccgacuuucugagaaccaacccaauagaaacaucaggcgcacgcugugcaucccccaggagacuugccaacaaaaggauuggccagauuaagucuaaaaaauuucguugcucugcaaaagagcaauacuuuauaccagguacagaggacuaucaguuaaauagcgagugcaacucagacguggugugcccccauaaguguagaugugaggccaacguuguagaaugcuccucucuaaagcucacaaagauaccggagcggauaccucaaaguacugcugagcugcggcugaauaauaacgagauaaguauacuugaagccaccgggauguuuaaaaagcugacccaccugaagaaaauaaauuuauccaauaacaaagucuccgaaauagaagauggcgcuuuugaaggcgcagccuccguaagugaacugcaucucaccgccaaucagcuagaaagcauaagaucagguauguuuagaggccuggauggacuacgaacccucauguuaaggaacaauagaauaucuuguauucauaacgauucguuuacgggccuuagaaaugucaggcuccucucccuguacgacaaucagaucaccaccgugucaccuggcgcuuuugacaccuugcagucccuuaguaccuugaaccugcucgcaaacccauuuaauugcaauugucagcucgcauggcugggaggauggcuucgcaaacgcaagauagugaccgggaauccacgcugccagaauccugauuuuuugcgccaaauuccacuucaagacguugccuuuccugacuuccgaugcgaggagggacaggaggaaggggggugccuaccucgcccucaaugcccucaggaaugcgccugccuggacacagucgucagauguuccaacaaacaccuaagagcacuucccaaaggcauaccaaaaaaugucacugaacuauaccuggacggaaaucaguucacccucguucccggucaguugucuacauucaaauacuugcaacucgucgaccuguccaauaauaaaauuucuagucugagcaauucuuccuuuacaaauaugagccagcugacaacccuuauccuuaguuacaacgcacugcaguguaucccaccauuagcguuccagggccugaggucucuccgccugcucucccugcacgggaacgauaucuccaccuugcaagaaggaauuuuugcugauguuacaagccuaucccauuuggccauuggcgccaacccuuuauauugugacugucaucuuagguggcuguccuccuggguuaagaccggcuauaaagagccaggcaucgccaggugugcggguccucaagacauggaagggaaacuccugcucacaacuccugcaaaaaaauucgagugccaaggcccaccuacacuggccguucaagcaaaaugugaccuauguuuaucgucccccugucagaaccaaggcacuugccacaacgaccccuuagagguauaccggugcgcuugcccuagcggcuauaaagggagagacugugagguuucgcucgacaguuguagcucuggcccuugcgagaauggaggaacaugccacgcacaagaaggggaggaugccccguuuacguguagcuguccuacaggguuugaaggcccgacaugcggugugaacaccgaugacugcguggaucaugcaugugcaaacggcggcgucugcguggauggggugggaaauuacacaugucagugucccuugcaauaugaaggcaaagcaugcgaacaacugguagaucuguguucucccgaucuaaacccuugccagcaugaggcucagugugugggaaccccugauggaccaagaugcgaauguaugccaggauacgcaggagacaauugcagcgagaaccaggacgacugcagggaccaccguugccagaauggagcucagugcauggaugaaguaaauucguacuccugucucugcgcagagggauauagcggccaguuaugcgagaucccaccacaccuccccgcaccaaaaagcccaugcgagggcaccgaaugucaaaacggcgcuaauugcguugaucaggguaaccgcccagucugucaaugccugcccggguuuggaggaccagaaugcgagaaacuccucucuguuaauuucguugaucgagacaccuaucuacaguuuaccgaccuucaaaauuggccccgcgcuaacauuacucuucaggugucuaccgccgaagacaauggcauauuacuauacaauggagauaaugaucacauugccgucgaacuauaccaaggacacguuagaguuagcuaugaucccgguuccuaucccuccagugcaauauauucagccgagacuauuaaugacggucaguuucacacaguugagcugguggccuuugaucaaauggugaauuugaguauagacggcggcaguccgaugaccauggacaacuucggcaaacauuauacacugaacucugaagcaccccuguacguuggaggaaugccuguagauguuaacagcgcagccuuucguuuguggcaaauacugaacgguacaggauuucacggguguaucagaaacuuauauauaaacaacgagcugcaggauuucaccaaaacgcagaugaaaccaggagucgugccgggaugugaaccgugcagaaagcuguacugccugcauggcaucugucaaccaaacgccacaccgggccccaugugccacugcgaagccgggugggugggacuacauugcgaucaaccugcugauggcccuugccacggucacaaaugcguacacggccagugcgucccucuggacgcuuugaguuauagcugucaaugucaagacggguauucuggugcacugugcaaucaguccccaucugcaggcggcacucugagcgguacuuucacaagaucaaggggagcuaugccaagcgcacguccuagggcacccugucauggaugguccgccggcgcccgagcgcaggcucgugccgccgcuagagcuuucggguag

SEQ ID NO: 134764 - RNA, 1143 nt, Artificial Sequence
  derived and/or modified sequence
auggcccucacucccggcuggggaaguagcgccggccccguucgcccugagcugugguugcuccugugggcugcugccuggaggcugggagccagugcaugcccagcacugugcacuugcaccggcacuaccgucgauugccauggaacgggcuuacaagcuaucccuaaaaacauaccaagaaacaccgagcgacuagaacugaaugguaauaauaucaccaggauccauaagaaugauuucgccgggcuaaagcaacuccgaguauugcagcugauggaaaaucagauuggcgcgguugaaagaggcgcauuugaugauaugaaagaacucgagcguuuagaccugagcgagaaugcaauccaggccauccccaggaaggcuuuuagaggggcaaccgaccugaaaaaucuucaacuugacaagaaccaaaucaguuguaucgaagaaggggcguuccgggcucugcgaggacuggagguacugacucuuaacaacaauaauaucacaacuauaccaguuucuucguuuaaccacaugcccaaacugcguaccuuccgacuucacuccaaucaucucuucugugauugucaccucgccugguuaucacaguggcuccgucaacgaccaaccauuggccuuuuuacacagugcucuggacccgccagucugcgagggcucaauguugccgaggugcagaaauccgaauucucuuguagcgggcaaggggaggccggucgcguccccacuuguacuuugucuaguggaucauguccagccaugugcacauguagcaacgggaucgucgauugucggggaaaaggacugacugcuauuccagcuaaucugcccgagaccaugacggaaauccggcuugaacugaacggcaucaagaguaucccuccuggggcuuuuucaccauaccggaagcugcgaagaauagaucucucaaauaaccagaucgcugagaucgccccugacgcauuccaaggacugagaucuuugaauucuuugguccuguacggaaauaaaauuaccgacuugccuagagggguuuuugguggccuuuauacacugcaacugcuguuacuuaacgccaauaagaucaauuguauacgcccagacgcuuuccaagaccuguag

SEQ ID NO: 134765 - protein, 1472 aa, Artificial Sequence
  derived and/or modified sequence
MAPGWAGVGAAVRARLALALALASVLSGPPAVACPTKCTCSAASVDCHGLGLRAVPRGIPRNAERLDLDRNNITRITKMDFAGLKNLRVLHLEDNQVSVIERGAFQDLKQLERLRLNKNKLQVLPELLFQSTPKLTRLDLSENQIQGIPRKAFRGITDVKNLQLDNNHISCIEDGAFRALRDLEILTLNNNNISRILVTSFNHMPKIRTLRLHSNHLYCDCHLAWLSDWLRQRRTVGQFTLCMAPVHLRGFNVADVQKKEYVCPAPHSEPPSCNANSISCPSPCTCSNNIVDCRGKGLMEIPANLPEGIVEIRLEQNSIKAIPAGAFTQYKKLKRIDISKNQISDIAPDAFQGLKSLTSLVLYGNKITEIVKGLFDGLVSLQLLLLNANKINCLRVNTFQDLQNLNLLSLYDNKLQTISKGLFAPLQSIQTLHLAQNPFVCDCHLKWLADYLQDNPIETSGARCSSPRRLANKRISQIKSKKFRCSGSEDYRSRFSSECFMDLVCPEKCRCEGTIVDCSNQKLVRIPSHLPEYVTDLRLNDNEVSVLEATGIFKKLPNLRKINLSNNKIKEVREGAFDGAASVQELMLTGNQLETVHGRVFRGLSGLKTLMLRSNLIGCVSNDTFAGLSSVRLLSLYDNRITTITPGAFTTLVSLSTINLLSNPFNCNCHLAWLGKWLRKRRIVSGNPRCQKPFFLKEIPIQDVAIQDFTCDGNEESSCQLSPRCPEQCTCMETVVRCSNKGLRALPRGMPKDVTELYLEGNHLTAVPRELSALRHLTLIDLSNNSISMLTNYTFSNMSHLSTLILSYNRLRCIPVHAFNGLRSLRVLTLHGNDISSVPEGSFNDLTSLSHLALGTNPLHCDCSLRWLSEWVKAGYKEPGIARCSSPEPMADRLLLTTPTHRFQCKGPVDINIVAKCNACLSSPCKNNGTCTQDPVELYRCACPYSYKGKDCTVPINTCIQNPCQHGGTCHLSDSHKDGFSCSCPLGFEGQRCEINPDDCEDNDCENNATCVDGINNYVCICPPNYTGELCDEVIDHCVPELNLCQHEAKCIPLDKGFSCECVPGYSGKLCETDNDDCVAHKCRHGAQCVDTINGYTCTCPQGFSGPFCEHPPPMVLLQTSPCDQYECQNGAQCIVVQQEPTCRCPPGFAGPRCEKLITVNFVGKDSYVELASAKVRPQANISLQVATDKDNGILLYKGDNDPLALELYQGHVRLVYDSLSSPPTTVYSVETVNDGQFHSVELVTLNQTLNLVVDKGTPKSLGKLQKQPAVGINSPLYLGGIPTSTGLSALRQGTDRPLGGFHGCIHEVRINNELQDFKALPPQSLGVSPGCKSCTVCKHGLCRSVEKDSVVCECRPGWTGPLCDQEARDPCLGHRCHHGKCVATGTSYMCKCAEGYGGDLCDNKNDSANACSAFKCHHGQCHISDQGEPYCLCQPGFSGEHCQQVFRAQVFQSSLPGNCSWSCWPPRPPMP

SEQ ID NO: 134766 - protein, 1523 aa, Artificial Sequence
  derived and/or modified sequence
MAPGWAGVGAAVRARLALALALASVLSGPPAVACPTKCTCSAASVDCHGLGLRAVPRGIPRNAERLDLDRNNITRITKMDFAGLKNLRVLHLEDNQVSVIERGAFQDLKQLERLRLNKNKLQVLPELLFQSTPKLTRLDLSENQIQGIPRKAFRGITDVKNLQLDNNHISCIEDGAFRALRDLEILTLNNNNISRILVTSFNHMPKIRTLRLHSNHLYCDCHLAWLSDWLRQRRTVGQFTLCMAPVHLRGFNVADVQKKEYVCPAPHSEPPSCNANSISCPSPCTCSNNIVDCRGKGLMEIPANLPEGIVEIRLEQNSIKAIPAGAFTQYKKLKRIDISKNQISDIAPDAFQGLKSLTSLVLYGNKITEIVKGLFDGLVSLQLLLLNANKINCLRVNTFQDLQNLNLLSLYDNKLQTISKGLFAPLQSIQTLHLAQNPFVCDCHLKWLADYLQDNPIETSGARCSSPRRLANKRISQIKSKKFRCSGSEDYRSRFSSECFMDLVCPEKCRCEGTIVDCSNQKLVRIPSHLPEYVTDLRLNDNEVSVLEATGIFKKLPNLRKINLSNNKIKEVREGAFDGAASVQELMLTGNQLETVHGRVFRGLSGLKTLMLRSNLIGCVSNDTFAGLSSVRLLSLYDNRITTITPGAFTTLVSLSTINLLSNPFNCNCHLAWLGKWLRKRRIVSGNPRCQKPFFLKEIPIQDVAIQDFTCDGNEESSCQLSPRCPEQCTCMETVVRCSNKGLRALPRGMPKDVTELYLEGNHLTAVPRELSALRHLTLIDLSNNSISMLTNYTFSNMSHLSTLILSYNRLRCIPVHAFNGLRSLRVLTLHGNDISSVPEGSFNDLTSLSHLALGTNPLHCDCSLRWLSEWVKAGYKEPGIARCSSPEPMADRLLLTTPTHRFQCKGPVDINIVAKCNACLSSPCKNNGTCTQDPVELYRCACPYSYKGKDCTVPINTCIQNPCQHGGTCHLSDSHKDGFSCSCPLGFEGQRCEINPDDCEDNDCENNATCVDGINNYVCICPPNYTGELCDEVIDHCVPELNLCQHEAKCIPLDKGFSCECVPGYSGKLCETDNDDCVAHKCRHGAQCVDTINGYTCTCPQGFSGPFCEHPPPMVLLQTSPCDQYECQNGAQCIVVQQEPTCRCPPGFAGPRCEKLITVNFVGKDSYVELASAKVRPQANISLQVATDKDNGILLYKGDNDPLALELYQGHVRLVYDSLSSPPTTVYSVETVNDGQFHSVELVTLNQTLNLVVDKGTPKSLGKLQKQPAVGINSPLYLGGIPTSTGLSALRQGTDRPLGGFHGCIHEVRINNELQDFKALPPQSLGVSPGCKSCTVCKHGLCRSVEKDSVVCECRPGWTGPLCDQEARDPCLGHRCHHGKCVATGTSYMCKCAEGYGGDLCDNKNDSANACSAFKCHHGQCHISDQGEPYCLCQPGFSGEHCQQENPCLGQVVREVIRRQKGYASCATASKVPIMECRGGCGPQCCQPTRSKRRKYVFQCTDGSSFVEEVERHLECGCLACS

SEQ ID NO: 134767 - DNA, 4419 bp, Artificial Sequence
  derived and/or modified sequence
atggctccggggtgggctggggtcggagcagcagtgagagcccggttggcactagccctcgcgcttgcatcagtgctcagcggacctccagccgttgcctgcccaactaaatgtacttgctcagctgcctcagtggactgtcacggccttggtctgagagctgtcccccgcggtattcctcgcaatgctgagcgcctagacttggatagaaataacatcactcgtattaccaagatggatttcgccggtctgaagaatctacgcgtactgcatcttgaggacaaccaggtttccgtcattgagcgcggcgcatttcaggacctcaaacagctggaaagactgcgccttaataagaataagctgcaagtactcccagaactgctgttccagagcacacccaagctgaccagactggacttgtccgaaaatcagatccagggcatccccaggaaagcatttcgtggcatcacagatgtaaagaatctgcaattggacaacaatcacataagctgcatcgaggacggcgcattccgcgccctcagggaccttgaaattcttacccttaacaataataatataagccggattctagtcacaagctttaaccatatgcccaagattagaaccctaagactacattcgaaccatttgtactgtgactgtcacttggcctggctctctgattggctgagacaacgccggacggtggggcagtttacactttgcatggccccagtccatttgcggggtttcaacgtggcagacgtgcagaaaaaagagtacgtctgtccggcgccacatagtgagcccccttcctgcaacgccaatagcatatcatgtccctccccttgcacatgctcaaacaatattgtagactgtcgcggcaagggactcatggagattcccgctaacctgccagagggaatagtggaaattcgcttggagcaaaactctatcaaggccatccccgcaggagcttttacgcagtataagaagctcaagcgaatcgatatctccaagaaccagattagtgatatcgcccccgacgccttccagggcctcaaatccttgacctcacttgtgctgtatggcaacaaaatcaccgaaatcgtgaagggactcttcgatggattggtgtcattacagctgttactgctcaatgctaacaaaatcaattgcctgcgtgtcaacaccttccaggacctgcagaacctgaatctgctttctctttacgacaataaactccagacaatcagcaaggggctgtttgcgcccctgcagtctatccagaccctccatctggctcagaacccattcgtgtgcgactgtcacctgaagtggctggccgattatttacaagacaatcctattgagacgagcggggctcggtgttccagtccgcgccgtctagcaaataagcgcatctcacagatcaagtccaaaaaattccgctgttctggaagcgaggactaccgttctcgtttctcgtccgagtgcttcatggacttagtttgcccggaaaagtgccgctgcgaggggaccattgtggattgcagcaaccagaagctagtgcgcatcccatcacatctaccagaatacgttaccgacctgcggctcaacgacaatgaggtctccgtgctagaagccactgggattttcaaaaaactaccaaatctgaggaagatcaacttgtccaacaacaagatcaaggaagtgcgcgagggagctttcgacggcgccgcttctgttcaagagctgatgttaaccggaaatcagctggaaaccgttcatgggagagtgtttagaggactctcaggcctgaaaactctcatgctgcgtagtaacctcatcgggtgtgtgtcaaacgacactttcgccggcctaagttccgtgagattgctgtctctgtatgacaaccggatcactacaattaccccaggggccttcacaactctggtctcactgtctacaattaatctgttgtctaacccttttaactgtaactgccatttggcctggctcgggaagtggttacggaagcgcagaatcgtctccggcaaccccaggtgccagaagcccttttttcttaaggaaattcccatccaagatgtggcaatacaggattttacatgcgatggcaatgaggagagcagctgccaattaagccctcggtgtccggagcagtgtacttgtatggagaccgtagtgcggtgttccaacaagggacttcgagctttgccccgcggcatgcctaaggatgtgacagagctgtatctggaaggaaaccatctgacagctgtcccccgggaactgtccgctttgagacatctcacgttgattgacttgtcgaacaatagtattagtatgttgaccaactatacattttcaaatatgtcccacttgtccacactgattctcagttataacagactacgctgtattccagtccacgcattcaacggcctcagatctctgcgggtgctaactctccacggtaatgacattagttcagtgcctgagggctcatttaacgatttaacatccctctcccacctggcgctcggcaccaaccccctgcactgcgattgttctctgaggtggctatctgagtgggttaaggctggatataaagagcccggcatcgcccgctgttccagtcccgagccaatggccgacaggttgctcctgacgaccccaactcacagattccaatgtaagggaccagtggacattaatatagtggccaaatgcaacgcctgcctgtcttcaccatgcaagaataacggtacatgcacgcaagaccccgtggaactctatagatgcgcatgtccttacagctataaggggaaggactgcaccgtgccgatcaacacctgcattcagaacccctgtcagcacggcggtacatgtcacttgagcgactctcataaggacggattctcctgttcctgtcctctggggtttgaagggcagaggtgcgagatcaatccagacgactgcgaagataacgactgtgaaaacaacgctacgtgcgttgatggaataaacaattacgtgtgcatctgtccacccaactatactggcgaactttgtgacgaggtgatagatcattgcgtgcccgagctcaacctgtgccagcacgaagccaagtgtatcccgctggacaagggattttcctgcgagtgtgtaccgggatattctggtaaactgtgcgagaccgacaatgatgactgcgtggctcataaatgtagacacggggcgcagtgcgtggacaccatcaacgggtacacttgtacttgcccccagggatttagcgggcccttctgcgaacatccccctcctatggtgcttttgcagacctccccatgcgatcagtatgaatgtcagaatggtgcacaatgcattgttgtgcaacaagagccaacttgcagatgcccacctggctttgcaggacccaggtgtgagaaactcatcactgttaactttgtaggtaaggacagctatgttgagctggcttccgctaaggtccggccccaagcaaacatttctctgcaggttgctaccgacaaagacaacggaattttgctgtataagggagacaacgaccccctcgccttagaactgtatcaagggcacgtgcggttagtatatgattctctgagctcccctccaactacagtttattccgtcgaaaccgtcaatgatggccaatttcactccgttgaactggtgaccctcaatcagaccctgaatcttgtcgttgataaagggacacccaagagcctcgggaaactgcagaagcaaccagcagtggggattaacagccccctgtacctcggaggaatacctacctcaactgggttgtcagccctgagacaggggacggatcggcctctgggcggatttcatggttgcatccacgaggtgaggatcaacaatgaactgcaggactttaaagctcttcccccccagagtctaggcgtgtctccaggttgtaagtcctgcacagtctgcaagcacggcctctgcagatcagtggagaaggactctgttgtctgcgaatgcagacctggttggaccgggcccctgtgcgaccaggaagcacgcgatccctgcttgggacatagatgtcatcacggcaagtgcgtcgccaccggtacctcatacatgtgcaagtgtgcagagggctacggcggggacctttgtgacaataagaacgacagcgccaacgcctgcagtgcctttaaatgccaccacgggcaatgtcatatttctgatcagggggaaccttattgtctctgtcaacctggattctctggagagcactgtcagcaagtgttccgggctcaggtttttcagtcaagtctgccaggcaactgtagctggtcatgttggcctccccggcctccgatgccttag

SEQ ID NO: 134768 - DNA, 4572 bp, Artificial Sequence
  derived and/or modified sequence
atggccccggggtgggccggtgtcggcgccgccgtgagagctcgtcttgctctggccctggcactggcgtctgtgctcagtggccctcccgcagtcgcatgtccaactaagtgcacatgctccgcagcttccgtcgattgccacggactgggtctgagggcggtgccacggggtatcccccgaaatgccgagagacttgacctggaccgcaacaacatcacccgcatcactaagatggacttcgccgggctcaaaaacctgagggtgctccatctggaggacaaccaggtgagtgttatcgagaggggcgcctttcaagacctcaaacagctcgagaggctcagactgaacaaaaacaagctccaggtactgcccgagctgcttttccagagtacccccaagctgacgcgcctggatctgagcgagaaccagattcagggtataccaaggaaggcttttagggggattacggacgtaaagaacctgcagctggataacaatcacatatcatgtattgaagatggggcattcagagcactgcgggacctggaaattctgacactgaacaacaacaatattagcagaattttagttacatcatttaaccatatgccgaagattaggacacttcgcctgcattcaaaccatctgtattgcgattgccaccttgcgtggctttccgactggctgagacagcgacgaacagtcggacaatttactctgtgtatggcccctgtgcacttgagggggttcaacgtggccgatgttcagaaaaaggagtacgtatgcccagccccccactcggaacctccatcatgtaatgctaattcgataagctgcccatcaccatgcacttgtagtaacaacattgtagattgcaggggaaaaggactcatggaaatcccagccaacctccccgagggcatagtggagattcgacttgagcagaattctatcaaggccatacctgcgggggcgtttacccagtacaagaagcttaagaggatcgacatttccaaaaaccaaattagcgacatagcccctgacgcatttcagggcctgaaaagtctaacatcacttgttctctatggtaataaaatcacggaaatcgtgaaaggactcttcgatggcctggtcagtttacagctgctccttttgaacgcaaacaaaatcaattgtctaagagtcaatactttccaagatctccagaacttgaatctcctgagcttatatgataacaagctgcagactatatctaaggggttatttgccccgcttcagagcatccaaactctgcacttagcgcaaaatcccttcgtgtgcgattgccacctcaaatggttagcagattacttgcaagacaatccaattgaaaccagcggcgcacgatgtagctctccacgtagactggccaataaaaggatctcccagatcaaaagcaagaagttccgttgttctggctctgaggattatagatcccggttttcatccgagtgcttcatggatctcgtgtgtcccgaaaaatgcagatgtgaagggaccatcgtcgactgctctaatcagaagctggtgcggattccctctcaccttccggaatacgtcacggacttgaggttgaatgataacgaagtatctgttctagaagccactgggatcttcaagaagctgccgaacctcagaaagatcaaccttagcaataataaaatcaaagaagtgagagaaggcgcattcgacggggcagcgtctgtccaagagcttatgctcactggcaaccaactcgaaaccgtgcacggccgagtattccgcgggttgagcggactgaagacattgatgctgagatctaatctcatcgggtgcgtcagcaatgataccttcgctggcctgtccagcgtgaggttactgagcctatacgataaccgcattacgactataacaccaggcgcatttacaacactggtgagccttagcacgatcaatctcctgagcaacccctttaactgcaactgccacctggcctggctggggaaatggttgcggaagcgccggatagtgtcaggaaatccaagatgtcagaagccattcttcctgaaggaaattccaattcaggacgtggccattcaggacttcacatgcgatggcaacgaagaaagttcgtgtcagctgtctcctcgctgccctgaacagtgtacttgtatggagacagttgtgcgatgttcaaataagggcctcagagcccttccccgcggtatgcctaaggacgtcaccgagctctacctggaaggaaatcacctaactgcagtgcctcgagagctatccgctctgcgccacctcactctcattgacctgtctaacaatagtatctcgatgttaacaaattacacctttagcaatatgagtcacctctcaaccctaattctgagctataacagattgagatgtattccggtgcacgcattcaatggtctgcgatctctcagagtcttgactctccatggcaatgatatatccagcgtgcccgagggcagcttcaatgatctgacgtctctctcccatcttgccctcggtaccaaccccttgcactgtgactgttcattgagatggctctccgagtgggttaaggccgggtataaggaaccggggatagcaaggtgtagttctccggaacccatggccgacagattgctgctgactacgcccacccatcgctttcaatgcaaaggacccgtcgacataaacattgtggccaaatgcaacgcttgcctctcctcaccttgtaaaaataacggcacttgtacgcaagatcccgtggagctttaccgatgcgcctgcccctatagctataagggtaaggattgtactgtgcccataaatacttgcatccagaatccgtgtcagcatggcggcacttgtcatctaagcgattcccacaaagacggtttctcatgttcttgtccattaggcttcgagggtcaacgatgcgagataaatcctgacgattgcgaggacaacgactgtgagaacaacgctacgtgcgtggacggcattaacaactacgtgtgtatttgcccacctaactatactggagagctctgtgacgaggtaattgatcactgcgtcccggaactcaacctttgtcaacatgaggcaaagtgtattcctctggacaaagggttctcttgtgaatgcgtccccgggtattctggtaagctatgcgaaaccgacaacgacgactgtgtggctcacaaatgtcgccacggcgcacagtgcgtggatacaatcaatgggtacacctgtacgtgcccccaaggcttttctgggcctttttgcgaacacccaccccctatggtcttactgcagaccagcccttgtgatcagtatgagtgtcagaatggtgcccaatgtattgtcgtgcaacaggagcccacgtgcaggtgtcccccgggatttgccggaccaaggtgcgaaaagctgattacggttaactttgtgggtaaggatagttacgtcgaactggcttctgctaaggtaagaccacaagcaaatatctcactccaggtggctacggataaagacaatgggatcctgctatacaaaggtgacaacgacccacttgccctggaactctaccaaggccacgtgagactggtctacgacagccttagttctcctccaaccaccgtatattccgtagagaccgtgaatgatggtcaattccactcagtcgagctggtgacattgaaccagacccttaacttggtagttgacaagggcacaccaaaaagcctggggaagcttcagaagcagcccgcggtagggatcaacagcccactctacctggggggcatccctacaagcacaggtctctccgcacttaggcagggcaccgatcgtcccctgggtgggttccatggttgtattcacgaagtaaggattaataacgaacttcaggactttaaggcgctgcctcctcagtcactcggggtgagtccagggtgcaaatcatgcactgtatgtaaacacgggctttgtagatccgtagaaaaggactctgtagtgtgcgagtgcagaccaggatggacaggaccattgtgtgatcaagaggcccgggacccgtgcctagggcacaggtgccaccacggaaaatgtgttgcaactgggacaagttatatgtgcaaatgtgctgaggggtatggcggggatctttgtgataataagaatgacagtgcaaatgcatgttccgctttcaaatgtcatcacgggcaatgtcacatttccgatcagggagagccttattgcctatgccaacccggctttagcggagaacactgtcagcaagagaatccatgcctgggtcaggtggtgagggaggttattaggcgccagaaagggtatgccagctgtgccacagctagcaaagtgccaattatggagtgtcgaggtgggtgtggaccccagtgttgtcagccaacgcggtcaaagagacgtaagtacgtctttcagtgtaccgatggttcctcgtttgttgaagaggtcgaaagacacctggagtgtgggtgcctggcctgtagttag

SEQ ID NO: 134769 - DNA, 4419 bp, Artificial Sequence
  derived and/or modified sequence
atggcccctggctgggccggcgtgggcgctgctgtgcgggcccggctggccctggccctggccctggcctctgtgctgagcggccccccagctgtggcctgccccaccaagtgcacctgcagcgctgcctctgtggactgccacggcctgggcctgcgggctgtgccccggggcatccccagaaatgctgagcggctggacctggacaggaacaacatcacccgcatcaccaagatggactttgctggcctgaagaacctgcgggtgctgcacctggaggacaaccaggtgtctgtcatcgagcggggggccttccaggacctgaagcagctggagcggctgcggctgaacaagaacaagctgcaggtgctgcctgagctgctcttccagagcacccccaagctgacccggctggacctgtctgagaaccagatccagggcatccccaggaaggccttccggggcatcacagatgtgaagaacctgcagctggacaacaaccacatcagctgcattgaagatggagccttccgggccctgcgggacctggagatcctgaccctgaacaacaacaacatcagccgcatcctggtgaccagcttcaaccacatgcccaagatccgcaccctgcggctgcacagcaaccacctgtactgtgactgccacctggcctggctgagtgactggctgcggcagaggagaacagtgggccagttcaccctgtgcatggcccctgtgcacctgcggggcttcaacgtggctgatgtgcagaagaaggagtatgtgtgcccagccccccacagcgagccccccagctgcaatgccaacagcatcagctgccccagcccctgcacctgcagcaacaacatcgtggactgccggggcaagggcctgatggagatcccagccaacctgcctgagggcatcgtggagatccggctggagcagaacagcatcaaggccatcccagctggggccttcacccagtacaagaagctgaagagaattgacatcagcaagaaccagatcagtgacatcgccccagatgccttccagggcctgaagagcctgaccagcctggtgctgtatggcaacaagatcacagagatcgtgaagggcctgtttgatggcctggtgtccctgcagctgctgctgctgaatgccaacaagatcaactgcctgcgggtgaacaccttccaggacctgcagaacctgaacctgctgagcctgtatgacaacaagctgcagaccatcagcaagggcctgtttgcccccctgcagagcatccagaccctgcacctggcccagaacccctttgtgtgtgactgccacctgaagtggctggccgactacctgcaggacaaccccatcgagaccagcggggcccgctgcagcagcccccggcggctggccaacaagaggatcagccagatcaagagcaagaagttccgctgcagcggcagcgaggactaccgcagccgcttcagcagcgagtgcttcatggacctggtgtgcccagagaagtgccgctgtgagggcaccatcgtggactgcagcaaccagaagctggtgcgcatccccagccacctgcctgaatatgtgacagacctgcggctgaatgacaatgaggtgtctgtgctggaggccaccggcatcttcaagaagctgcccaacctgaggaagatcaacctgagcaacaacaagatcaaggaggtgcgggagggcgcctttgatggagctgcctctgtgcaggagctgatgctgactggaaaccagctggagaccgtgcacggccgggtcttccggggcctgagcggcctgaagaccctgatgctgcggagcaacctgattggctgtgtgtccaatgacacctttgctggcctgagctctgtgcggctgctgagcctgtatgacaaccgcatcaccaccatcacccctggggccttcaccaccctggtgtccctgagcaccatcaacctgctgagcaaccccttcaactgcaactgccacctggcctggctgggcaagtggctgaggaagagaagaattgtgtctggcaacccccgctgccagaagcccttcttcctgaaggagatccccatccaggatgtggccatccaggacttcacctgtgatggaaatgaggagagcagctgccagctgagcccccgctgcccagagcagtgcacctgcatggagaccgtggtgcgctgcagcaacaagggcctgcgggccctgccccggggcatgcccaaggatgtgacagagctgtacctggagggcaaccacctgacagctgtgccccgggagctgagcgccctgcggcacctgaccctgattgacctgagcaacaacagcatctccatgctgaccaactacaccttcagcaacatgagccacctgagcaccctcatcctgagctacaaccggctgcgctgcatccctgtgcacgccttcaacggcctgcggagcctgcgggtgctgaccctgcatggaaatgacatcagctctgtgcctgagggcagcttcaatgacctgaccagcctgagccacctggccctgggcaccaaccccctgcactgtgactgcagcctgcgctggctgtctgagtgggtgaaggccggctacaaggagcccggcatcgcccgctgcagcagccctgagcccatggctgaccggctgctgctgaccacccccacccaccgcttccagtgcaagggccctgtggacatcaacatcgtggccaagtgcaatgcctgcctgagcagcccctgcaagaacaacggcacctgcacccaggaccctgtggagctgtaccgctgtgcctgcccctacagctacaagggcaaggactgcaccgtgcccatcaacacctgcatccagaacccctgccagcacggcggcacctgccacctgagtgacagccacaaggatggcttcagctgcagctgccccctgggctttgagggccagagatgtgagatcaacccagatgactgtgaagataatgactgtgagaacaatgccacctgtgtggatggcatcaacaactacgtgtgcatctgcccccccaactacacaggagagctgtgtgatgaggtgattgaccactgtgtgcctgagctgaacctgtgccagcacgaggccaagtgcatccccctggacaagggcttcagctgtgaatgtgtgcccggctacagcggcaagctgtgtgaaacagacaatgatgactgtgtggcccacaagtgcagacatggagcccagtgtgtggacaccatcaatggctacacctgcacctgcccccagggcttcagcggccccttctgtgagcaccccccacccatggtgctgctgcagaccagcccctgtgaccagtatgagtgccagaatggagcccagtgcatcgtggtgcagcaggagcccacctgccgctgccccccaggctttgctggcccccgctgtgagaagctgatcaccgtgaactttgtgggcaaggacagctatgtggagctggccagcgccaaggtgcggccccaggccaacatcagcctgcaggtggccacagacaaggacaatggcatcctgctgtacaagggggacaatgaccccctggccctggagctgtaccagggccacgtgcggctggtgtatgacagcctgagcagcccccccaccaccgtgtacagcgtggagaccgtgaatgatggccagttccacagcgtggagctggtgaccctgaaccagaccctgaacctggtggtggacaagggcacccccaagagcctgggcaagctgcagaagcagcctgctgtgggcatcaacagccccctgtacctgggcggcatccccaccagcacaggcctgagcgccctgcggcagggcacagaccggcccctgggcggcttccacggctgcatccacgaggtgcgcatcaacaatgagctgcaggacttcaaggccctgcccccccagagcctgggcgtgtccccaggctgcaagagctgcaccgtgtgcaagcacggcctgtgccgctctgtggagaaggacagcgtggtgtgtgagtgcaggcctggctggacaggccccctgtgtgaccaggaggcccgggacccctgcctgggccaccgctgccaccacggcaaatgtgtggccaccggcaccagctacatgtgcaagtgtgccgagggctatggaggagacctgtgtgacaacaagaatgacagcgccaatgcctgcagcgccttcaagtgccaccacggccagtgccacatcagtgaccagggcgagccctactgcctgtgccagcccggcttctctggagagcactgccagcaggtgttccgggcccaggtgttccagagcagcctgcccggcaactgctcctggagctgctggccacccaggcctcccatgccctag

SEQ ID NO: 134770 - DNA, 4572 bp, Artificial Sequence
  derived and/or modified sequence
atggcccctggctgggccggcgtgggcgctgctgtgcgggcccggctggccctggccctggccctggcctctgtgctgagcggccccccagctgtggcctgccccaccaagtgcacctgcagcgctgcctctgtggactgccacggcctgggcctgcgggctgtgccccggggcatccccagaaatgctgagcggctggacctggacaggaacaacatcacccgcatcaccaagatggactttgctggcctgaagaacctgcgggtgctgcacctggaggacaaccaggtgtctgtcatcgagcggggggccttccaggacctgaagcagctggagcggctgcggctgaacaagaacaagctgcaggtgctgcctgagctgctcttccagagcacccccaagctgacccggctggacctgtctgagaaccagatccagggcatccccaggaaggccttccggggcatcacagatgtgaagaacctgcagctggacaacaaccacatcagctgcattgaagatggagccttccgggccctgcgggacctggagatcctgaccctgaacaacaacaacatcagccgcatcctggtgaccagcttcaaccacatgcccaagatccgcaccctgcggctgcacagcaaccacctgtactgtgactgccacctggcctggctgagtgactggctgcggcagaggagaacagtgggccagttcaccctgtgcatggcccctgtgcacctgcggggcttcaacgtggctgatgtgcagaagaaggagtatgtgtgcccagccccccacagcgagccccccagctgcaatgccaacagcatcagctgccccagcccctgcacctgcagcaacaacatcgtggactgccggggcaagggcctgatggagatcccagccaacctgcctgagggcatcgtggagatccggctggagcagaacagcatcaaggccatcccagctggggccttcacccagtacaagaagctgaagagaattgacatcagcaagaaccagatcagtgacatcgccccagatgccttccagggcctgaagagcctgaccagcctggtgctgtatggcaacaagatcacagagatcgtgaagggcctgtttgatggcctggtgtccctgcagctgctgctgctgaatgccaacaagatcaactgcctgcgggtgaacaccttccaggacctgcagaacctgaacctgctgagcctgtatgacaacaagctgcagaccatcagcaagggcctgtttgcccccctgcagagcatccagaccctgcacctggcccagaacccctttgtgtgtgactgccacctgaagtggctggccgactacctgcaggacaaccccatcgagaccagcggggcccgctgcagcagcccccggcggctggccaacaagaggatcagccagatcaagagcaagaagttccgctgcagcggcagcgaggactaccgcagccgcttcagcagcgagtgcttcatggacctggtgtgcccagagaagtgccgctgtgagggcaccatcgtggactgcagcaaccagaagctggtgcgcatccccagccacctgcctgaatatgtgacagacctgcggctgaatgacaatgaggtgtctgtgctggaggccaccggcatcttcaagaagctgcccaacctgaggaagatcaacctgagcaacaacaagatcaaggaggtgcgggagggcgcctttgatggagctgcctctgtgcaggagctgatgctgactggaaaccagctggagaccgtgcacggccgggtcttccggggcctgagcggcctgaagaccctgatgctgcggagcaacctgattggctgtgtgtccaatgacacctttgctggcctgagctctgtgcggctgctgagcctgtatgacaaccgcatcaccaccatcacccctggggccttcaccaccctggtgtccctgagcaccatcaacctgctgagcaaccccttcaactgcaactgccacctggcctggctgggcaagtggctgaggaagagaagaattgtgtctggcaacccccgctgccagaagcccttcttcctgaaggagatccccatccaggatgtggccatccaggacttcacctgtgatggaaatgaggagagcagctgccagctgagcccccgctgcccagagcagtgcacctgcatggagaccgtggtgcgctgcagcaacaagggcctgcgggccctgccccggggcatgcccaaggatgtgacagagctgtacctggagggcaaccacctgacagctgtgccccgggagctgagcgccctgcggcacctgaccctgattgacctgagcaacaacagcatctccatgctgaccaactacaccttcagcaacatgagccacctgagcaccctcatcctgagctacaaccggctgcgctgcatccctgtgcacgccttcaacggcctgcggagcctgcgggtgctgaccctgcatggaaatgacatcagctctgtgcctgagggcagcttcaatgacctgaccagcctgagccacctggccctgggcaccaaccccctgcactgtgactgcagcctgcgctggctgtctgagtgggtgaaggccggctacaaggagcccggcatcgcccgctgcagcagccctgagcccatggctgaccggctgctgctgaccacccccacccaccgcttccagtgcaagggccctgtggacatcaacatcgtggccaagtgcaatgcctgcctgagcagcccctgcaagaacaacggcacctgcacccaggaccctgtggagctgtaccgctgtgcctgcccctacagctacaagggcaaggactgcaccgtgcccatcaacacctgcatccagaacccctgccagcacggcggcacctgccacctgagtgacagccacaaggatggcttcagctgcagctgccccctgggctttgagggccagagatgtgagatcaacccagatgactgtgaagataatgactgtgagaacaatgccacctgtgtggatggcatcaacaactacgtgtgcatctgcccccccaactacacaggagagctgtgtgatgaggtgattgaccactgtgtgcctgagctgaacctgtgccagcacgaggccaagtgcatccccctggacaagggcttcagctgtgaatgtgtgcccggctacagcggcaagctgtgtgaaacagacaatgatgactgtgtggcccacaagtgcagacatggagcccagtgtgtggacaccatcaatggctacacctgcacctgcccccagggcttcagcggccccttctgtgagcaccccccacccatggtgctgctgcagaccagcccctgtgaccagtatgagtgccagaatggagcccagtgcatcgtggtgcagcaggagcccacctgccgctgccccccaggctttgctggcccccgctgtgagaagctgatcaccgtgaactttgtgggcaaggacagctatgtggagctggccagcgccaaggtgcggccccaggccaacatcagcctgcaggtggccacagacaaggacaatggcatcctgctgtacaagggggacaatgaccccctggccctggagctgtaccagggccacgtgcggctggtgtatgacagcctgagcagcccccccaccaccgtgtacagcgtggagaccgtgaatgatggccagttccacagcgtggagctggtgaccctgaaccagaccctgaacctggtggtggacaagggcacccccaagagcctgggcaagctgcagaagcagcctgctgtgggcatcaacagccccctgtacctgggcggcatccccaccagcacaggcctgagcgccctgcggcagggcacagaccggcccctgggcggcttccacggctgcatccacgaggtgcgcatcaacaatgagctgcaggacttcaaggccctgcccccccagagcctgggcgtgtccccaggctgcaagagctgcaccgtgtgcaagcacggcctgtgccgctctgtggagaaggacagcgtggtgtgtgagtgcaggcctggctggacaggccccctgtgtgaccaggaggcccgggacccctgcctgggccaccgctgccaccacggcaaatgtgtggccaccggcaccagctacatgtgcaagtgtgccgagggctatggaggagacctgtgtgacaacaagaatgacagcgccaatgcctgcagcgccttcaagtgccaccacggccagtgccacatcagtgaccagggcgagccctactgcctgtgccagcccggcttctctggagagcactgccagcaggagaacccctgcctgggccaggtggtgcgggaggtgatccggcggcagaagggctacgccagctgtgccacagccagcaaggtgcccatcatggagtgccggggcggctgcggcccccagtgctgccagcccaccaggagcaagaggaggaaatatgtgttccagtgcacagatggcagcagctttgtggaggaggtggagcggcacctggagtgtggctgcctggcctgcagctag

SEQ ID NO: 134771 - DNA, 4419 bp, Artificial Sequence
  derived and/or modified sequence
atggcccccggctgggccggcgtgggcgccgccgtgcgggcccggctggcactcgcattggccctggccagtgtcctgagcggaccccccgccgtcgcatgccctaccaagtgcacttgttcggccgccagtgttgattgccacggactgggcctcagagccgtgcctcgcggaattccccgcaacgctgagaggttagatctggatcggaataacatcactcggattacgaaaatggacttcgccggactgaagaatctgcgggtccttcatctggaggacaaccaggtctctgtgatcgaacgcggggcgttccaggacctgaaacagctggaacggctcaggctgaacaagaacaagctacaggtgctccccgaactgctatttcagtcaaccccgaagcttactcgcctcgacctgagcgaaaatcaaatccagggaattcctcgcaaagcattcagggggataactgatgtgaaaaacttacagttggataacaaccatatctcttgtatcgaggacggggctttccgagccctccgcgatctggagatccttactctgaataacaacaacatcagccggattctagttacaagcttcaatcacatgcccaaaatccgtactcttagactccatagtaatcatttgtattgtgactgtcacttggcctggctctcggactggctgcgccagcggcggaccgttggtcagtttacgctctgcatggcacccgtccaccttcgagggttcaatgtcgcggacgtccagaaaaaagagtacgtctgcccagccccacattcagagccacctagttgtaatgccaacagtataagttgcccttctccctgtacatgtagtaataacatcgttgattgtcggggcaaaggtctcatggagattccagcgaacctccccgagggaatcgtggagatacggcttgagcagaactccattaaagccatccccgccggcgcctttacccagtataaaaaacttaagcgtattgacatttcaaagaatcagatttcagacattgctcctgacgccttccagggactgaaatctctgacatctctcgtgctttatggcaataaaataacagagatcgtgaaagggctgtttgacgggttggtctctctccaactcttgctcctcaacgctaacaagatcaattgtctcagagtgaataccttccaggatctgcagaacctcaacctcttgtccctttacgataacaagctgcagaccataagcaaggggctcttcgctcctctgcaatctattcagacccttcacctggcccagaatcccttcgtgtgtgactgccacctgaaatggttggcggactacctccaggataatccaatcgagacatctggcgcaagatgttcttcaccccggcgcctcgctaacaagcgaattagccagatcaaatccaaaaagtttcggtgcagcggcagcgaagattacagatcgcgtttcagttccgagtgctttatggatctggtctgtccggagaagtgccgctgcgagggcactatcgtagattgcagcaaccagaagctggttaggataccgagccatctccctgaatacgtaacagatctgaggctgaatgataatgaggtcagtgtgctggaggctacaggcatcttcaaaaaattgcccaacctcaggaaaattaacttgagtaataataaaatcaaggaggtgcgcgagggagctttcgacggcgctgcgtcagtccaagagctgatgctaacgggcaaccagttggagaccgtgcatgggcgggtgtttcgagggttatccggactgaagacattaatgctgagatcaaaccttattggctgtgtgagcaatgatacatttgccgggctgtcttccgtacggctactatcactctacgataatcggattaccacgataacgcccggggcttttaccactttggtatccctttcaaccatcaacctcctgagcaatccttttaactgcaactgccacctcgcatggttaggaaagtggttaaggaagcgtcgcatcgtgtccggcaatccaaggtgtcagaaacctttctttctgaaggagatacccattcaggatgtggctatccaagacttcacatgcgacggcaacgaggagtccagttgtcaactgagtcccagatgtccagaacagtgtacgtgcatggaaacggtcgtgagatgcagcaacaaaggcctgcgggcgctaccgcgaggaatgcctaaggatgtaacagaactgtatctggaagggaatcacttaaccgcggtcccaagggagctgagcgcgctccgacatttgaccctcattgatctgtcaaataacagtatctcaatgttgacaaattacaccttctccaacatgagtcacctatcaaccttgatactgtcatataataggctacgttgcatccctgttcatgcgttcaatggacttcgatccctgcgggtgctcaccctgcacgggaatgacatcagctctgtgcccgaaggttcctttaatgatttgaccagcctatcccatttggccttgggcacgaaccccttgcattgcgattgctcgcttcggtggctcagcgagtgggtcaaggcaggttataaagagcccggcattgcccgctgtagctcgccagaacctatggcggatcgcttacttctcacaacacccacacacaggttccagtgtaagggccccgtagatatcaatattgtggccaaatgtaatgcctgcctgtcctctccctgtaagaataatgggacatgcacccaagatcccgtcgagctgtaccgttgcgcttgtccatactcttataagggtaaagactgtaccgtgcccattaatacttgcatccaaaacccatgccaacatggcgggacctgtcacctctcagattctcacaaagatggtttttcgtgcagctgccccctgggctttgaagggcagcggtgtgagattaatcccgacgactgtgaagacaatgactgtgagaacaacgcaacctgtgtggacgggattaacaattacgtgtgcatttgtccacccaactacaccggcgaactatgcgatgaagtgatcgaccattgtgttcccgaacttaatctatgccaacacgaggctaagtgtattccccttgataagggattcagttgtgagtgtgtgccagggtactctggcaagttgtgtgagactgataatgatgattgtgtggcacataaatgtcgccacggggctcagtgcgtagatacaattaatggatacacatgcacttgcccccaggggttcagtggacctttctgcgagcatccacctcccatggtactgctacagacctcaccgtgtgatcaatacgaatgtcagaatggcgctcaatgcatcgtggtgcagcaggaacccacgtgtcgctgccccccaggatttgccggtcctagatgtgaaaagcttattacagtgaatttcgtgggaaaggactcctacgtggagctagcaagtgccaaggtaaggccacaggctaacatctccctccaagtggctaccgacaaggataatggtattctcctttataaaggggacaacgacccactggcactggaactttatcagggacacgtccgactggtctacgactcactgtcctctcccccaaccactgtttacagtgttgagactgtgaatgatggccagttccactctgttgagctcgtcactctcaatcagaccctcaatttggtagtcgacaaggggacgccaaagtccttgggaaagctgcagaagcagccagccgtaggaataaattcgcctctgtacctcggagggatccccacaagcactggtctgtccgctctgcgacagggaaccgacaggccgttgggcggcttccacgggtgcattcacgaggtacggatcaataatgagctccaagatttcaaggccttaccgcctcagtccctcggggtgtccccgggatgcaagagttgcaccgtgtgtaagcatggcctctgtcgcagtgtggaaaaggacagtgtagtctgtgaatgtcgccccgggtggaccggtccactgtgcgatcaggaggcaagggacccatgcctgggccatcgctgtcatcatgggaaatgcgtcgcaactggcactagctacatgtgcaagtgcgcagaagggtatgggggagacctctgtgataataagaatgatagtgccaacgcctgctcggcatttaaatgccaccatggccaatgtcacatctcagaccagggtgaaccgtactgcttatgtcaaccaggattctcgggcgagcactgccagcaggtatttcgagcacaggtttttcaatcgtctcttccaggaaattgctcttggagttgttggcctccccggccccctatgccatag

SEQ ID NO: 134772 - DNA, 4572 bp, Artificial Sequence
  derived and/or modified sequence
atggcccccggctgggccggcgtgggcgccgccgtgcgggcccggcttgccctggctcttgcgttggcttctgtgctctccggacctcccgccgttgcctgccctactaaatgtacgtgcagcgctgcttccgtagactgccatggacttggacttagagcagtgcctagaggaattcccaggaacgctgagcgattagatttggatcgaaataacatcacacgtattaccaaaatggatttcgctggtctgaagaaccttagagttctccatctggaagataaccaggtgagcgtgatcgagagaggcgcctttcaggacctgaaacagctagagcggttgcgtttgaacaaaaataaactccaggtattgcctgaactgctctttcagagtacacctaaactgacacgtttagatctcagtgagaaccagatacaggggatcccacgaaaggccttcaggggcatcacagacgtgaaaaacctgcagctggataataatcacattagttgtatcgaagatggtgcatttcgcgctctccgagacctggagattctgaccctgaacaataacaacatttcccggattctggttaccagtttcaatcacatgcccaaaatccgaacgttaagactccacagcaatcatctgtactgcgactgtcatttggcatggctttctgattggctcaggcagcgacggaccgtaggacaatttacactgtgtatggccccagtccacctgcgagggtttaacgtggcagatgtacaaaaaaaggagtatgtgtgcccagccccccactccgagccaccgagttgcaacgccaattccatctcctgccctagtccctgcacttgcagtaataacattgtcgactgccgggggaagggcctcatggagatccctgcaaatctgcccgaagggatagtggaaatcagactcgaacaaaatagcatcaaggctataccagccggggccttcacccagtacaaaaagttaaagagaattgatatctccaagaaccagattagcgacatagctcctgatgcgttccaaggcctcaagtctctgacctctttagtgctctacggcaataagataaccgaaatagtgaaaggcctcttcgacgggctggtgtcgttacagctgctgcttctcaatgcaaacaagattaattgcctgagagtgaacactttccaggacctgcagaatctcaacctcctcagcctgtatgataataagctgcagaccatcagcaaggggttgttcgcgccgttgcaatcgattcaaacgttgcacctggcccaaaatcctttcgtctgcgactgtcacctgaaatggctggccgactacctgcaggacaaccctattgagacttccggagccagatgtagttccccaaggcgactggcaaataagagaatttctcagataaaatccaagaaatttaggtgtagcggctctgaagattacaggtctcgattcagctccgagtgcttcatggacctggtgtgcccggaaaagtgcaggtgtgaaggaaccatcgtcgactgcagcaatcagaaactggtcaggattccttcacacctccccgaatacgtgacagacctgcgcctgaatgataacgaggtgagcgtgctggaagcaaccgggatatttaaaaagcttccaaaccttcggaagatcaacctctccaacaacaagattaaggaagtgcgcgaaggtgcttttgacggggctgcctcagtccaagagttgatgctgacaggaaaccagctggagacagtccatgggcgcgtattcagaggcctgagcggccttaagacactaatgctccgtagcaacttaatcggatgtgtcagcaatgacaccttcgccgggctaagtagtgttcggctgttgtccttgtatgataatcgcattaccacaataacgccgggtgcattcactacactggtgagtctgtccaccattaacctgttgtctaacccctttaattgtaattgtcatctggcctggctgggaaagtggttgaggaagagaaggatcgtttcaggtaatcccaggtgccagaagccttttttccttaaagagatcccaatccaggatgtcgctattcaagatttcacatgcgatggcaacgaggagtcatcctgtcagctcagtccacggtgccccgaacagtgcacatgtatggaaacagtcgtgcggtgcagcaacaaggggttaagggcgctcccacggggtatgccaaaagacgtcactgaattgtatcttgagggaaaccatctgaccgccgtgcctagagagctgagcgctctgcggcatcttaccttaatcgacctgtccaacaatagtatctctatgttgaccaattacacctttagcaacatgagccatttgtctacactgatcctttcatacaaccggctgagatgcattccagtacacgccttcaacggcctccgaagcctgagggtcctgactttgcacggaaatgatatcagcagcgtgccagaagggagttttaatgatctcaccagtctgagccacttggccctaggtacaaaccctcttcattgtgattgttccctccggtggctgagcgaatgggtgaaggcgggatacaaggaacccggaattgcaaggtgcagctcaccggagccgatggccgacaggctcctcctgactactcccacacatagattccagtgcaagggacccgtggacataaatattgtggctaaatgtaacgcatgccttagcagtccatgcaagaacaacggcacttgcacccaagacccagtggaactctatcggtgcgcctgtccttattcctacaagggaaaggattgtactgtgcccatcaacacgtgcatccaaaatccctgccagcacggggggacctgtcacttatcagactcacacaaggatggtttttcgtgttcctgtccgttgggatttgagggacaaagatgcgagatcaatccagacgactgtgaagacaacgactgtgagaacaatgccacatgtgttgacggaatcaacaattacgtatgcatttgccccccgaattatactggggagctgtgcgacgaagtcattgatcactgcgttccagagttgaatctctgtcagcacgaggcgaagtgtattcccttggataagggcttctcgtgtgagtgcgtaccagggtacagcggaaagctgtgcgagaccgacaacgacgactgcgtggcacacaaatgccgccacggcgcccagtgtgtggacacaattaacggctacacgtgtacatgcccacagggctttagcggccccttctgcgagcatccccctccaatggtgctcctacaaacctccccttgcgaccaatatgagtgtcagaatggagcacagtgcatcgtggtgcagcaggaacccacctgccggtgcccccctggattcgcggggccaagatgcgaaaagctaattactgtaaactttgtagggaaagactcttatgttgaactagctagcgcaaaagtgcgtccacaagctaacatcagcttacaagtggcaacagataaggataatggaatcttgttgtataagggagataatgaccccctggcactggagctgtaccagggccatgttagactcgtgtatgatagcttatcttcacctcccacaactgtgtactctgtggagacagtgaacgatggccagtttcattccgttgagttggtgacactcaaccagacactgaacctggttgtcgacaaagggacgcccaaatccctaggcaaacttcaaaaacagccagcagtgggaattaacagtccactgtatctaggagggatccccacatcaactggactatctgccctacgccagggcactgaccgcccactcgggggcttccatggatgtattcacgaggtgagaattaataacgagctgcaggatttcaaagctctgcctccccagagcctgggagtgtctccgggatgtaaatcctgcacggtgtgtaagcatggtctttgtagaagtgtggaaaaagactcagtcgtctgtgagtgtcgaccggggtggactggccctttgtgcgaccaagaagccagggacccttgtttggggcaccgatgtcaccatggtaaatgcgtggccaccgggacttcatacatgtgcaaatgcgccgagggctatgggggcgacctgtgcgataataagaatgacagtgctaatgcctgttctgcctttaagtgtcatcacgggcagtgtcatatttctgaccagggtgaaccatactgtttgtgtcagcctgggtttagcggcgagcactgccagcaggagaatccctgtctaggccaggtagttcgggaagtgatccgcagacagaaaggttacgcctcttgcgccaccgcctcaaaggtgcccattatggaatgccgcgggggttgcggtccccagtgctgtcagcccacccggagtaagagacggaagtatgtcttccagtgcacggacggatctagctttgtggaggaggtcgaacgccacctagagtgtgggtgcctcgcctgcagctag

SEQ ID NO: 134773 - DNA, 4419 bp, Artificial Sequence
  derived and/or modified sequence
atggcgcctggatgggccggtgtgggcgcagcggttagagccaggctggcattagccctagccttggcctcagtgctcagcggtcccccagctgtggcatgtcccactaaatgcacatgcagtgcagctagtgtggattgtcatggcctggggcttagggccgtgcctagggggataccaagaaatgccgagcgcctagatttggaccgcaacaacatcactcgtatcactaagatggacttcgccggtttaaagaatcttcgtgtgctccacctggaagacaaccaagttagtgttatcgaacgcggagccttccaagatctcaaacagcttgagagactgaggcttaacaaaaataaactacaggtactcccggaactcctgtttcagtctacccctaaacttactagactcgatctaagcgaaaaccaaatacaagggattccacgaaaagcatttcgaggaataactgacgttaagaacctgcagctggacaataatcacattagctgtattgaggatggagcctttagggctctccgcgatcttgaaatcctgacgctgaacaacaacaacatttcacggatactagtcactagcttcaatcacatgcctaagattaggaccctgcggctgcattccaaccacctctattgcgattgccacctggcatggctgagtgactggctgcgtcagcgtcgcaccgtgggtcagtttaccctctgcatggcccctgtgcatctcaggggtttcaatgtagccgacgtacagaagaaagaatacgtgtgtcctgctccgcactctgaaccgccaagctgtaacgctaattccatctcctgccctagcccttgcacctgctcaaataacattgtggactgcaggggtaaaggactgatggagattcctgctaatctcccagagggtatcgtggaaattagactggagcagaattctataaaggcaatccctgcgggtgctttcacccagtacaagaagctcaaacgtattgacatctccaagaaccagatatccgatatcgctccggacgcctttcagggactcaagagcttaacctccctggtgctatacggtaataaaatcacggagattgtgaagggcctatttgacggcttagtcagtctacagctgttgctgctgaatgccaacaaaatcaattgcttgcgcgttaacaccttccaggacctgcaaaacctgaatctattgtccctatatgataataagctccagaccatcagtaagggcttatttgcaccactccagtccattcagacattgcacttagcgcaaaaccctttcgtctgtgattgtcacctcaagtggctggctgactaccttcaggataaccctattgaaacatcaggagccaggtgctcctcccccagacgcctcgccaacaaacgtatttcccagataaagtcaaaaaagttccggtgtagcgggtcagaggactaccggagccggttcagcagcgagtgctttatggacctggtctgcccagagaagtgcagatgcgagggaacaattgttgactgctcgaaccaaaaattggtcaggatccccagccacctacccgagtacgtgactgatctgagactcaatgacaatgaggtgtctgttttggaagcgacgggtatattcaagaagttgccaaatttgagaaagattaaccttagcaataataaaattaaggaggtgcgggaaggcgctttcgacggagccgcaagcgtacaagagctgatgttgacaggcaaccagcttgagactgtccatggcagggtgtttcgcggtctgtctggactaaaaacgttaatgttgcggagcaacctgattgggtgcgtgtccaatgacacctttgccggtctctcctccgtccggttgttatcactgtatgacaatcggataacaaccattacacccggtgcatttaccacccttgtgtcattgtcaacaatcaacctgctgagcaaccccttcaactgtaattgccaccttgcctggctgggcaaatggctccgcaagaggagaatcgtgtccggtaatccgcgatgtcagaagccctttttcctcaaagaaatcccaatccaggacgtcgcaatccaggactttacgtgcgacggaaatgaagagagtagttgtcagttatccccgagatgtcctgaacagtgtacctgcatggagactgtggtgaggtgcagtaataagggcctgcgcgctcttcctagaggcatgcccaaggatgtaacagagctgtacctggaaggcaaccacctgacagctgtgccaagagagctgtccgcgctgagacatcttacactgatcgacctgtcgaacaactctatatcaatgttgaccaactacacattcagcaacatgagtcacttatctacgcttatcctgtcttacaaccggctcagatgtattccagtgcatgcctttaacggcctgcggtcactgcgagtgctcacgctgcacggcaacgacatcagcagcgtccctgagggaagctttaacgacctcacgtccctcagtcatctagccctcggaacaaatcccctgcactgtgattgttccctgagatggctttcagaatgggtgaaagccggatacaaagaaccaggaatcgcacggtgctcgtccccagaacccatggcagatcgactgctgctgacaacccccacccacaggtttcagtgcaagggccctgttgacatcaatatcgtggctaagtgtaacgcttgtctatccagtccgtgtaagaacaatggaacctgcacccaggacccagtggagctgtatcgatgcgcatgcccgtacagctacaaaggcaaggactgcaccgtgcccatcaacacatgcatacagaatccatgtcagcacggcggaacatgccacctgtccgactctcacaaagacgggttttcatgttcatgccccctggggtttgagggccagcggtgcgaaataaacccagatgattgcgaggataacgattgtgagaataacgctacctgcgttgatggaatcaacaattatgtctgcatctgtccccctaattacacaggcgagctgtgcgacgaggtgattgatcactgcgtccctgaactgaacctctgccagcatgaagccaaatgcattccattagacaagggcttttcttgtgagtgtgtcccgggatatagtggcaagttatgtgagacagataacgacgactgtgtcgcccacaagtgccgacacggcgctcagtgtgtggacactataaatggttacacgtgcacctgcccccagggctttagcgggccattttgcgaacatcctccacccatggtgttgctccaaacatccccttgcgaccagtacgagtgtcagaacggagctcagtgcatcgtggttcagcaagagccaacctgtcggtgcccaccaggtttcgccggaccaaggtgcgaaaagttgattacagtaaactttgtgggcaaggactcttatgtggagctcgcctcagccaaagtgcggcctcaggccaatataagtttgcaggtggccaccgataaagacaatgggattttgctgtacaagggggataacgacccactggcactagaactgtaccaaggacacgttagactggtgtatgatagcctttcctctccaccaacaaccgtttacagcgtcgagacggttaatgatgggcagtttcactcagtagagctagttaccctcaaccaaaccctaaatttggttgttgacaaggggactccaaagtccctcggcaagctgcagaagcagccagccgttggtataaacagtcctctctatcttggcggaattccaacatcaacaggcctctccgctctgcggcaaggtactgaccgcccattggggggttttcatggctgcatccatgaggtgcgcatcaacaacgagctgcaggactttaaggctctaccccctcagtccttgggagtatctcccggatgcaaaagctgcaccgtgtgtaaacatggactctgtcggagcgttgagaaagactccgttgtgtgcgaatgcaggccaggttggacggggcctctgtgtgaccaggaggcccgagatccctgcctggggcatcggtgccaccacggtaaatgtgtggcgactggaacaagttatatgtgtaagtgtgcagagggatatgggggagacctctgtgataataaaaatgactcagccaatgcttgttcagccttcaagtgtcaccatggacagtgccacatctcagaccagggagagccctactgcctctgtcagcctggcttctcaggcgagcattgccaacaggtcttccgggctcaagtctttcaatcctcactgcccggtaattgcagttggagttgctggcctcctcgaccaccaatgccctag

SEQ ID NO: 134774 - DNA, 4571 bp, Artificial Sequence
  derived and/or modified sequence
atggctcccggttgggctggcgtgggtgcagccgttagggcccgacttgccctcgctttggctctggcgtccgtattgtctgggcctcccgctgtggcttgcccaaccaagtgcacctgctccgctgcgtcagtagactgtcatggccttgggcttagagccgtgccccgaggcatccctagaaatgctgagagactggacctggaccgaaacaacatcacccggattactaagatggactttgccggtttgaagaacttgcgggtgcttcacctcgaagataatcaggttagcgtgatcgaaaggggcgcattccaggacttgaagcagctcgagcggttaagactgaataaaaacaaactgcaagtccttccggaactgctgtttcaatccacgcccaagctgacaagactggacctttctgagaatcagatacaaggcataccacgcaaggctttccgcggaatcacagatgtgaagaacctccagctggacaacaatcacatttcctgcattgaggacggagccttcagggccttacgggatctggagattcttacactcaacaacaacaacatcagccggatcctcgtgacatccttcaaccatatgcctaagatccgcacgcttagactccactccaatcacctgtactgcgactgtcacctggcttggttatctgactggctccgccagaggcgtaccgtcggtcagttcacgctctgtatggcccctgtgcacctcagggggtttaatgtggccgacgtgcaaaaaaaggaatacgtttgtcccgcacctcactcagaaccccctagctgtaatgcaaatagcatcagttgcccctccccttgcacatgctctaataacatcgtggattgccggggaaagggtttgatggagatcccggcaaatcttcccgaaggaattgtggagattcgcctggaacagaattctataaaggctataccagcaggtgccttcacccagtacaaaaaactaaaaagaatcgacatcagtaaaaatcagataagtgatattgcaccagatgcgttccagggactgaagagcctcacatccctagttctttacggaaacaagattacagagatagtcaagggcctgttcgatggactcgtgtctctgcagcttctgttgttgaatgccaataaaattaattgtctccgggtcaataccttccaggatctgcaaaacctgaacctcctgagtttgtacgataataaactgcagaccatttctaagggcctcttcgctcccctgcagagcatacagacactccacctggcacaaaacccttttgtgtgtgactgccatctgaaatggctggctgattacctccaggataaccctatagagacgagtggagccaggtgttctagtccccgtcggctggccaacaaacggatctctcagattaagagcaaaaaatttcgctgctctgggtcggaagattatcggagccgtttctcctctgagtgcttcatggatctggtttgtcccgagaaatgtcgatgcgagggtacaattgtagactgcagcaatcagaaactcgtgaggataccgagccacttaccagagtatgtgacagatctcagactgaacgataacgaagtttccgtgcttgaagccacgggcatttttaagaagctaccaaatctgaggaagattaacctgtcaaacaataaaatcaaggaggtgcgcgaaggagcctttgacggcgctgcctccgtgcaggaattgatgctcaccggcaatcagttggagacggtgcacggtcgagttttccgcggactgtccgggctgaagacacttatgttgcggtctaatctgatcggctgcgtcagtaatgacacctttgctggtctttctagtgtcaggttgctgagcctgtacgacaaccgtattaccaccattactccaggggcattcacaactctggtgagtttgtctaccataaacctactttcaaatcctttcaattgtaactgtcatctggcctggctgggaaagtggttaagaaagcggagaatcgtgagcggaaacccgaggtgccagaagccctttttcttgaaagagattcctatccaggacgtcgcaatccaggattttacctgcgacggcaatgaagagagtagctgtcagctttcgcctcgttgccctgaacagtgtacctgtatggagactgtggtcaggtgcagtaataagggtcttagagctctgccacgcggtatgcccaaggatgtgactgagctgtatctggagggaaatcatttgaccgcagtgcccagagagctgtccgctctgaggcacctgacgttgattgacctgtcaaataatagcatttctatgctgactaactatacttttagcaacatgtcacacctcagcaccctcattctgtcctacaatagactgaggtgtatcccagtccacgcattcaacggccttaggagtcttagggtgctgaccttacacggaaacgatatcagcagcgttcccgaaggctcatttaacgatctgacctcactgagtcacctggctctcggaactaacccattacattgtgactgctccttaagatggctatccgagtgggttaaggccggatacaaggaacctggaatagcaagatgctcctcccccgagccaatggctgaccgtctcttgctcactacacccactcaccgcttccagtgtaagggacccgtcgacattaatatcgtcgccaagtgcaacgcttgtttgtcgtccccctgtaagaacaacggcacctgtacgcaggaccccgtggagttgtaccgctgtgcctgcccatactcctataagggcaaagactgcaccgttcccatcaatacatgtattcaaaatccttgccaacatggcggaacttgtcaccttagcgacagtcataaggacggattctcgtgttcctgccccctcggattcgaagggcagcggtgcgagatcaatccggacgattgtgaggacaatgactgtgaaaacaatgcaacttgtgttgacggtataaataattacgtgtgcatctgtccgccaaattacacaggcgaactgtgcgacgaagtgattgatcattgcgtacccgaactgaatctgtgccagcacgaggccaagtgtattcccttggacaagggtttctcttgcgagtgtgtccccggttactcaggcaagctgtgcgaaacggataatgacgattgtgtggcccacaagtgccgccacggagcacagtgtgtggatactatcaacgggtatacatgtacttgtccacagggattttccggacccttttgcgaacatccgccaccaatggtcctgctgcagacatccccgtgcgaccagtatgagtgccaaaatggtgctcagtgtattgtcgtgcagcaggagcccacctgcaggtgtccccctggcttcgccggacccaggtgtgaaaaactcatcaccgtgaatttcgtgggcaaggacagttacgtggaactggcaagcgcgaaggttagaccccaagccaacatttcattacaggtcgcgacagacaaagacaacggcatactgctatacaaaggggacaacgatccattggctttagaactgtatcaggggcacgttcgcttggtctacgactccctgagctcacctcctaccacagtttactccgtggaaactgtgaacgatggccagttccactctgtggaactggttacactgaatcagaccctgaatctggtggtggataagggaacgccgaaatcgctgggaaagttacagaagcagcccgctgtgggcattaactcaccactgtacctgggaggaattcccacttctaccggcctgtccgccctgaggcaaggcaccgaccgcccattaggcggattccatggctgtatccatgaagtcaggatcaacaatgagctgcaggatttcaaagctctccccccacagtctcttggagtctctcctggttgcaagtcctgcacggtttgcaaacatggattgtgtaggagtgtcgaaaaggacagcgtggtgtgcgagtgccgtcccggatggaccggaccactctgcgatcaagaagccagagacccctgtctggggcacagatgtcaccacgggaaatgcgtcgctaccggcacctcttacatgtgtaagtgtgccgagggatacggcggtgacctgtgtgacaataagaacgatagcgccaatgcatgctcggcctttaagtgccatcatggtcagtgccacattagcgaccagggagagccttactgcctttgtcagcctggtttctccggggaacactgtcaacaggagaatccttgccttggtcaagtggtgagggaggtaatccgcaggcaaaagggctacgcgagctgcgcaactgcgtcaaaggtgccaatcatggagtgtaggggtgggtgtggccctcagtgctgccaaccaacgaggtcaaaaagacggaagtatgtgtttcagtgcaccgacggctccagttttgtcgaagaggtcgagcggcaccttgaatgcgggtgcctcgcttgtagtta

SEQ ID NO: 134775 - DNA, 4419 bp, Artificial Sequence
  derived and/or modified sequence
atggcccccgggtgggcaggggtcggcgccgccgtgcgcgcccgcctggcgctggccttggcgctggcgagcgtcctgagtgggcctccagccgtcgcctgccccaccaagtgtacctgctccgctgccagcgtggactgccacgggctgggcctccgcgcggttcctcggggcatcccccgcaacgctgagcgccttgacctggacagaaataatatcaccaggatcaccaagatggacttcgctgggctcaagaacctccgagtcttgcatctggaagacaaccaggtcagcgtcatcgagagaggcgccttccaggacctgaagcagctagagcgactgcgcctgaacaagaataagctgcaagtccttccagaattgcttttccagagcacgccgaagctcaccagactagatttgagtgaaaaccagatccaggggatcccgaggaaggcgttccgcggcatcaccgatgtgaagaacctgcaactggacaacaaccacatcagctgcattgaagatggagccttccgagcgctgcgcgatttggagatccttaccctcaacaacaacaacatcagtcgcatcctggtcaccagcttcaaccacatgccgaagatccgaactctgcgcctccactccaaccacctgtactgcgactgccacctggcctggctctcggattggctgcgacagcgacggacagttggccagttcacactctgcatggctcctgtgcatttgaggggcttcaacgtggcggatgtgcagaagaaggagtacgtgtgcccagccccccactcggagcccccatcctgcaatgccaactccatctcctgcccttcgccctgcacgtgcagcaataacatcgtggactgtcgaggaaagggcttgatggagattcctgccaacttgccggagggcatcgtcgaaatacgcctagaacagaactccatcaaagccatccctgcaggagccttcacccagtacaagaaactgaagcgaatagacatcagcaagaatcagatatcggatattgctccagatgccttccagggcctgaaatcactcacatcgctggtcctgtatgggaacaagatcaccgagattgtcaagggactgtttgatgggctggtgtccctacagctgctcctcctcaatgccaacaagatcaactgcctgcgggtgaacacgtttcaggacctgcagaacctcaacttgctctccctgtatgacaacaagctgcagaccatcagcaaggggctcttcgcccctctgcagtccatccagacactccacttagcccaaaacccatttgtgtgcgactgccacttgaagtggctggccgactacctccaggacaaccccatcgagacaagcggggcccgctgcagcagcccgcgccgactcgccaacaagcgcatcagccagatcaagagcaagaagttccgctgctcaggctccgaggattaccgcagcaggttcagcagcgagtgcttcatggacctcgtgtgccccgagaagtgtcgctgtgagggcacgattgtggactgctccaaccagaagctggtccgcatcccaagccacctccctgaatatgtcaccgacctgcgactgaatgacaatgaggtatctgttctggaggccactggcatcttcaagaagttgcccaacctgcggaaaataaatctgagtaacaataagatcaaggaggtgcgagagggagctttcgatggagcagccagcgtgcaggagctgatgctgacagggaaccagctggagaccgtgcacgggcgcgtgttccgtggcctcagtggcctcaaaaccttgatgctgaggagtaacttgatcggctgtgtgagtaatgacacctttgccggcctgagttcggtgagactgctgtccctctatgacaatcggatcaccaccatcacccctggggccttcaccacgcttgtctccctgtccaccataaacctcctgtccaaccccttcaactgcaactgccacctggcctggctcggcaagtggttgaggaagaggcggatcgtcagtgggaaccctaggtgccagaagccatttttcctcaaggagattcccatccaggatgtggccatccaggacttcacctgtgatggcaacgaggagagtagctgccagctgagcccgcgctgcccggagcagtgcacctgtatggagacagtggtgcgatgcagcaacaaggggctccgcgccctccccagaggcatgcccaaggatgtgaccgagctgtacctggaaggaaaccacctaacagccgtgcccagagagctgtccgccctccgacacctgacgcttattgacctgagcaacaacagcatcagcatgctgaccaattacaccttcagtaacatgtctcacctctccactctgatcctgagctacaaccggctgaggtgcatccccgtccacgccttcaacgggctgcggtccctgcgagtgctaaccctccatggcaatgacatttccagcgttcctgaaggctccttcaacgacctcacatctctttcccatctggcgctgggaaccaacccactccactgtgactgcagtcttcggtggctgtcggagtgggtgaaggcggggtacaaggagcctggcatcgcccgctgcagtagccctgagcccatggctgacaggctcctgctcaccaccccaacccaccgcttccagtgcaaagggccagtggacatcaacattgtggccaaatgcaatgcctgcctctccagcccgtgcaagaataacgggacatgcacccaggaccctgtggagctgtaccgctgtgcctgcccctacagctacaagggcaaggactgcactgtgcccatcaacacctgcatccagaacccctgtcagcatggaggcacctgccacctgagtgacagccacaaggatgggttcagctgctcctgccctctgggctttgaggggcagcggtgtgagatcaacccagatgactgtgaggacaacgactgcgaaaacaatgccacctgcgtggacgggatcaacaactacgtgtgtatctgtccgcctaactacacaggtgagctatgcgacgaggtgattgaccactgtgtgcctgagctgaacctctgtcagcatgaggccaagtgcatccccctggacaaaggattcagctgcgagtgtgtccctggctacagcgggaagctctgtgagacagacaatgatgactgtgtggcccacaagtgccgccacggggcccagtgcgtggacacaatcaatggctacacatgcacctgcccccagggcttcagtggacccttctgtgaacaccccccacccatggtcctactgcagaccagcccatgcgaccagtacgagtgccagaacggggcccagtgcatcgtggtgcagcaggagcccacctgccgctgcccaccaggcttcgccggccccagatgcgagaagctcatcactgtcaacttcgtgggcaaagactcctacgtggaactggcctccgccaaggtccgaccccaggccaacatctccctgcaggtggccactgacaaggacaacggcatccttctctacaaaggagacaatgaccccctggcactggagctgtaccagggccacgtgcggctggtctatgacagcctgagttcccctccaaccacagtgtacagtgtggagacagtgaatgatgggcagtttcacagtgtggagctggtgacgctaaaccagaccctgaacctagtagtggacaaaggaactccaaagagcctggggaagctccagaagcagccagcagtgggcatcaacagccccctctaccttggaggcatccccacctccaccggcctctctgccttgcgccagggcacggaccggcctctaggcggcttccacggatgcatccatgaggtgcgcatcaacaacgagctgcaggacttcaaggccctcccaccacagtccctgggggtgtcaccaggctgcaagtcctgcaccgtgtgcaagcacggcctgtgccgctccgtggagaaggacagcgtggtgtgcgagtgccgcccaggctggaccggcccactctgcgatcaggaggcccgggacccctgcctcggccacagatgccaccatggaaaatgtgtggcaactgggacctcatacatgtgcaagtgtgccgagggctatggaggggacttgtgtgacaacaagaatgactctgccaatgcctgctcagccttcaagtgtcaccatgggcagtgccacatctcagaccaaggggagccctactgcctgtgccagcccggctttagcggcgagcactgccaacaagtcttcagagcacaagtatttcaaagcagcctacctgggaactgctcatggtcctgctggccacctagaccaccaatgccctga

SEQ ID NO: 134776 - DNA, 9706 bp, Artificial Sequence
  derived and/or modified sequence
gagagcgagcgccggccagctcacccggccgccccgtgccccagccgcagccgccgcgctccccagcccagccccaagccggacctccccgggcgccacgccccattgcgctcgccccaggtccccaacccggcccgcgggccagcggggccagggggcgctccgcacctgggcactcccagcgatgcgcagcggggcagcgccggccccgccgatggagctgctgttgctgccgccgccgccgcccggagcgccccgctccgcccgcgccccgtgcgcctgagcaccgagctcgcccctcctccgcgctaactccgccgcccgctccccaggccgcccgcgctccccgcgcgcctcctcgggctccacgcgtcttgccccgcagaggcagcctcctccaggagcggggccctgcacaccatggcccccgggtgggcaggggtcggcgccgccgtgcgcgcccgcctggcgctggccttggcgctggcgagcgtcctgagtgggcctccagccgtcgcctgccccaccaagtgtacctgctccgctgccagcgtggactgccacgggctgggcctccgcgcggttcctcggggcatcccccgcaacgctgagcgccttgacctggacagaaataatatcaccaggatcaccaagatggacttcgctgggctcaagaacctccgagtcttgcatctggaagacaaccaggtcagcgtcatcgagagaggcgccttccaggacctgaagcagctagagcgactgcgcctgaacaagaataagctgcaagtccttccagaattgcttttccagagcacgccgaagctcaccagactagatttgagtgaaaaccagatccaggggatcccgaggaaggcgttccgcggcatcaccgatgtgaagaacctgcaactggacaacaaccacatcagctgcattgaagatggagccttccgagcgctgcgcgatttggagatccttaccctcaacaacaacaacatcagtcgcatcctggtcaccagcttcaaccacatgccgaagatccgaactctgcgcctccactccaaccacctgtactgcgactgccacctggcctggctctcggattggctgcgacagcgacggacagttggccagttcacactctgcatggctcctgtgcatttgaggggcttcaacgtggcggatgtgcagaagaaggagtacgtgtgcccagccccccactcggagcccccatcctgcaatgccaactccatctcctgcccttcgccctgcacgtgcagcaataacatcgtggactgtcgaggaaagggcttgatggagattcctgccaacttgccggagggcatcgtcgaaatacgcctagaacagaactccatcaaagccatccctgcaggagccttcacccagtacaagaaactgaagcgaatagacatcagcaagaatcagatatcggatattgctccagatgccttccagggcctgaaatcactcacatcgctggtcctgtatgggaacaagatcaccgagattgtcaagggactgtttgatgggctggtgtccctacagctgctcctcctcaatgccaacaagatcaactgcctgcgggtgaacacgtttcaggacctgcagaacctcaacttgctctccctgtatgacaacaagctgcagaccatcagcaaggggctcttcgcccctctgcagtccatccagacactccacttagcccaaaacccatttgtgtgcgactgccacttgaagtggctggccgactacctccaggacaaccccatcgagacaagcggggcccgctgcagcagcccgcgccgactcgccaacaagcgcatcagccagatcaagagcaagaagttccgctgctcaggctccgaggattaccgcagcaggttcagcagcgagtgcttcatggacctcgtgtgccccgagaagtgtcgctgtgagggcacgattgtggactgctccaaccagaagctggtccgcatcccaagccacctccctgaatatgtcaccgacctgcgactgaatgacaatgaggtatctgttctggaggccactggcatcttcaagaagttgcccaacctgcggaaaataaatctgagtaacaataagatcaaggaggtgcgagagggagctttcgatggagcagccagcgtgcaggagctgatgctgacagggaaccagctggagaccgtgcacgggcgcgtgttccgtggcctcagtggcctcaaaaccttgatgctgaggagtaacttgatcggctgtgtgagtaatgacacctttgccggcctgagttcggtgagactgctgtccctctatgacaatcggatcaccaccatcacccctggggccttcaccacgcttgtctccctgtccaccataaacctcctgtccaaccccttcaactgcaactgccacctggcctggctcggcaagtggttgaggaagaggcggatcgtcagtgggaaccctaggtgccagaagccatttttcctcaaggagattcccatccaggatgtggccatccaggacttcacctgtgatggcaacgaggagagtagctgccagctgagcccgcgctgcccggagcagtgcacctgtatggagacagtggtgcgatgcagcaacaaggggctccgcgccctccccagaggcatgcccaaggatgtgaccgagctgtacctggaaggaaaccacctaacagccgtgcccagagagctgtccgccctccgacacctgacgcttattgacctgagcaacaacagcatcagcatgctgaccaattacaccttcagtaacatgtctcacctctccactctgatcctgagctacaaccggctgaggtgcatccccgtccacgccttcaacgggctgcggtccctgcgagtgctaaccctccatggcaatgacatttccagcgttcctgaaggctccttcaacgacctcacatctctttcccatctggcgctgggaaccaacccactccactgtgactgcagtcttcggtggctgtcggagtgggtgaaggcggggtacaaggagcctggcatcgcccgctgcagtagccctgagcccatggctgacaggctcctgctcaccaccccaacccaccgcttccagtgcaaagggccagtggacatcaacattgtggccaaatgcaatgcctgcctctccagcccgtgcaagaataacgggacatgcacccaggaccctgtggagctgtaccgctgtgcctgcccctacagctacaagggcaaggactgcactgtgcccatcaacacctgcatccagaacccctgtcagcatggaggcacctgccacctgagtgacagccacaaggatgggttcagctgctcctgccctctgggctttgaggggcagcggtgtgagatcaacccagatgactgtgaggacaacgactgcgaaaacaatgccacctgcgtggacgggatcaacaactacgtgtgtatctgtccgcctaactacacaggtgagctatgcgacgaggtgattgaccactgtgtgcctgagctgaacctctgtcagcatgaggccaagtgcatccccctggacaaaggattcagctgcgagtgtgtccctggctacagcgggaagctctgtgagacagacaatgatgactgtgtggcccacaagtgccgccacggggcccagtgcgtggacacaatcaatggctacacatgcacctgcccccagggcttcagtggacccttctgtgaacaccccccacccatggtcctactgcagaccagcccatgcgaccagtacgagtgccagaacggggcccagtgcatcgtggtgcagcaggagcccacctgccgctgcccaccaggcttcgccggccccagatgcgagaagctcatcactgtcaacttcgtgggcaaagactcctacgtggaactggcctccgccaaggtccgaccccaggccaacatctccctgcaggtggccactgacaaggacaacggcatccttctctacaaaggagacaatgaccccctggcactggagctgtaccagggccacgtgcggctggtctatgacagcctgagttcccctccaaccacagtgtacagtgtggagacagtgaatgatgggcagtttcacagtgtggagctggtgacgctaaaccagaccctgaacctagtagtggacaaaggaactccaaagagcctggggaagctccagaagcagccagcagtgggcatcaacagccccctctaccttggaggcatccccacctccaccggcctctctgccttgcgccagggcacggaccggcctctaggcggcttccacggatgcatccatgaggtgcgcatcaacaacgagctgcaggacttcaaggccctcccaccacagtccctgggggtgtcaccaggctgcaagtcctgcaccgtgtgcaagcacggcctgtgccgctccgtggagaaggacagcgtggtgtgcgagtgccgcccaggctggaccggcccactctgcgatcaggaggcccgggacccctgcctcggccacagatgccaccatggaaaatgtgtggcaactgggacctcatacatgtgcaagtgtgccgagggctatggaggggacttgtgtgacaacaagaatgactctgccaatgcctgctcagccttcaagtgtcaccatgggcagtgccacatctcagaccaaggggagccctactgcctgtgccagcccggctttagcggcgagcactgccaacaagagaatccgtgcctgggacaagtagtccgagaggtgatccgccgccagaaaggttatgcatcatgtgccacagcctccaaggtgcccatcatggaatgtcgtgggggctgtgggccccagtgctgccagcccacccgcagcaagcggcggaaatacgtcttccagtgcacggacggctcctcgtttgtagaagaggtggagagacacttagagtgcggctgcctcgcgtgttcctaagcccctgcccgcctgcctgccacctctcggactccagcttgatggagttgggacagccatgtgggaccccctggtgattcagcatgaaggaaatgaagctggagaggaaggtaaagaagaagagaatattaagtatattgtaaaataaacaaaaaatagaacttatttttattatggaaagtgactattttcatcttttattatataaatatattacaccatctgcgtatatgtaccatatagtgagttatttttaccaagttttgtgttgtgtatttgttgtgtttttaaaaatagctgtttaaaaatttaagaaaaaaatagactaataaaaatgctttaaaacaaaaggataagaataaagaatgatagcctgtctgaggaaggaggaagatgttttcatgtttatgaaacggtattatgtcggcagtagaccaagagctgctcattgagatcagaaaaaggaataagaggaagagagagaaggaaaagacctttgtttcttgttttttaactcccttttatttttcctcccctaaaattacccagcttttcggagtcctggatgtcagtgcccaaaatgcccagttcttccaggaaaagctgctgagccctggccttctcagtctcactgccactcaaaaatattgctgtccctgtctgtcccagaccccccttcagggtatctgaacccactgggggacccctcttctccttcctgggtggccctggcttccgtatctgaacccactgggggacccctcttctccttcctggctggccctggcttccaatcgaggactgactattgaagtctgctacaggtgtcatttggaactgtcttaccaaattttaaaacagctgctatttttcctgctcctccccaggagaggggtcttcctagaggaggcgagggaagagaatatcatggtgtctcctcaggacccatgcactggccctctctcctccttccaggtaatttttcattggaatgtatcccagtagagaaggtagtcagcccttcttggaagcggaaggctgggagccaagtcaagtctgcccacagcgctagatgtccaactctggaaggttcttggaggctcttgttgtaagacaggcctctgccacctgatcctccaggtcaccagcatgacgatagagactccttgcccatctgtgacactttccaatgcatatccaaactttaccttattttatctatgcaacccctgcctccctgggaaggataagggagtagagctgggttcactaagaaggaagtttaggccctcacaggctctggaacttgccttaagccacacaccagataagtggaggagccagaccagaagtccagacccaaagcttgagattcttcctctagaatgggtgagcacaggtgattcaggcggcttaaatccatcagagcagccctgccggaaaaggaaataatatgatgttttttcctgctcttgttctgccttgctcactccttctccctccgcagtatctggaaagattctggagaccagggcttatgcatctagggaaagtgaccaagggcagcctatccagcctctgcctccattcctgaaggggacttccctgcccctgtttctttccatgtctctccctccctcactcccatttgcccccttccaccccatcaggttagccacatatcttccagggctcagctgttcacaccaactccctggctcttatcatccatccctccttcccccaggagcttccactgtaggagtttcagggagaagagtttggaattcattggacctttcagccctcaggttccctagaggagcctagttgatctgtgagtaccaatggtgggccaaagacgcagggaataatgaagggagaaagaaaagaaaggaagatggaggaaaacgaggcaactggaagaaggaaggaaggaaagaaggaagggatggaggggatgaagagaagggagagagggatatagctgaggaatttatctaaaaatgtgcatgtaaatctccattatgttccaggtactgtgccttatgatggctttgttttttgttgtcattagagacaaggtcttgctttgtcacccaggctggagtagagtggttcgatcatagctcaccgcagcctcaacctcctaggctcaagccatcttcctgcctcagtctcccaaaatgctgggattacaggtgtgagccactatgctcagcctgtttcaaacattattataatagcagatttatttagtactttattatacatcagataccactctaattgtgaaatagatatatattcatttaattattgaaacaaccatgtagttaaaacactattaactcattttacagttgagtagactgagacacagagaagttaaagaacttgcccaagagtaaatgtctaataaaccgtagagccaggatctgggcccaggctgtctgactccagaacttgctcactcaaccactaaaccatcctgcttctcatgggaaagaaacacatcctgcctttgaggatcctacagcctgtgacaaaaacagtcataaaaatggacaattgccttattacacaaggagctcttaagtggcaatacaagcaatggaagtggctgtccagaggagggaacttctagtcctaggtctttaaggatgaataggagtttgccagagtgagaaagggaattgaactttcctgggagtggccttttaaaaagcaatgagatatggccaggcctggcttgtttggggaagagtcaaaatctagggtggcaagagtatgggaagcacactgaggagcagagagaaatggggtaggtaggaaggtagggttttgaccacaaagagctgtgcatgctaaactgggccacaggtgccagcagggttgtttgaggaagggaagagcaagacaagctctggtttaggaagagagctgtggcagcataaaggcctgaaagaggagacagagctgtcacccaaaatggacttgagagctccctgtggtttactctgtggctagaaaacactgccggccagatggatcacaaatgtctatggtagcttagaagctctgctcttgaagaggatcctgggatctgcccaacacccttcccaacctccatttccccatccccacctccattgccccatcccccctctccccctaggcaggtggatctgagccttatcccaccaccaatgcccctgctagcctctccccacccagcccagagcctactcagcctgccatctcaagagccccaccgagggtcactggcttcctgggaggagtcaccaggctgccagctttccctctgcctccccaaggaacctgagacctccctctgctcatcaccctgggcccaatcctgaatccagcccccatcaaccaagacagcaaaagggccaggtctgtcccttataattttgagccttctccctcaagtttggaagccctgactttaagaaatgccaaatgcaaggaccattaagaaaattctccccgaaatgaggctcctctaacaaatgatgattaaaacgctctctccttgagcagtcacattctagaaacaggacattccatgaggcaggaagagttcagttaatttgctcctgaaaaagtgtggttcagtgtttgtgtggcaatgtacgtgggcagaagaggccgctcaagctgtgtcccccctgagcaggattcaggaaagggaaaagaagttctcttcaactcagccaaggggccgtacgatggccgatgagattatgtatttaaaagttctttgtaaagtgtaaactaaaaaccttaaatgtaagatgctgttgttattattactgttgttgttgctgttatggacatgccaaaaggcccttgttagaagacagttttgccttttcaatctcatagcaaggaactcaagtctgatgcttcaaaaagatgagaagaagggcaagaagagggataactcccaagctcagagggaaaaaaaaggtgggggaaaagagccccagggtgaccttcaggaaaggccaggaccaggatgatctaacctttcccttcaccagaaacaaagctattgccagactgaaccctaaagtcaagcagtcacccactgcctttgctgggagcagaagcccatagcaacaagtgacctgcccctcagactcaagatcccagataccagagctggaggagtcatagggcattactggtaggcaggaaaactgagggtcgaacaaatggaagaatgcggtgatcatagaccaaagacacacagataattaaccccatgtgtccacccaggccaaagttcttcctgctaccccacagtggatgtccaggcagatggtccccacatgatggggaagcagagggcatagtgtggttttgtgggacttgttcatgttttgtagtgtgggctcaacagtgccaaaggaaacactagggaaaagttggtgaaacatgccagctagcaggaccagtaaaggcataatcaggcatttggcaaagcttgcttttctaattcaatgataggttctaataggaaatttttgaagattttttaaaacaatgttatagtggcacttccccagtatggaataaataacatgcattcttttttcaatatactgtcatattcagatgtcattaaaataaatggatgagtcacagaggagctatcagatgctctcatgactaccataactca

SEQ ID NO: 134777 - DNA, 4419 bp, Artificial Sequence
  derived and/or modified sequence
atggcccccggctgggccggcgtgggcgccgccgtgagagccagactggccctggccctggccctggccagcgtgctgagcggcccccccgccgtggcctgccccaccaagtgcacctgcagcgccgccagcgtggactgccacggcctgggcctgagagccgtgcccagaggcatccccagaaacgccgagagactggacctggacagaaacaacatcaccagaatcaccaagatggacttcgccggcctgaagaacctgagagtgctgcacctggaggacaaccaggtgagcgtgatcgagagaggcgccttccaggacctgaagcagctggagagactgagactgaacaagaacaagctgcaggtgctgcccgagctgctgttccagagcacccccaagctgaccagactggacctgagcgagaaccagatccagggcatccccagaaaggccttcagaggcatcaccgacgtgaagaacctgcagctggacaacaaccacatcagctgcatcgaggacggcgccttcagagccctgagagacctggagatcctgaccctgaacaacaacaacatcagcagaatcctggtgaccagcttcaaccacatgcccaagatcagaaccctgagactgcacagcaaccacctgtactgcgactgccacctggcctggctgagcgactggctgagacagagaagaaccgtgggccagttcaccctgtgcatggcccccgtgcacctgagaggcttcaacgtggccgacgtgcagaagaaggagtacgtgtgccccgccccccacagcgagccccccagctgcaacgccaacagcatcagctgccccagcccctgcacctgcagcaacaacatcgtggactgcagaggcaagggcctgatggagatccccgccaacctgcccgagggcatcgtggagatcagactggagcagaacagcatcaaggccatccccgccggcgccttcacccagtacaagaagctgaagagaatcgacatcagcaagaaccagatcagcgacatcgcccccgacgccttccagggcctgaagagcctgaccagcctggtgctgtacggcaacaagatcaccgagatcgtgaagggcctgttcgacggcctggtgagcctgcagctgctgctgctgaacgccaacaagatcaactgcctgagagtgaacaccttccaggacctgcagaacctgaacctgctgagcctgtacgacaacaagctgcagaccatcagcaagggcctgttcgcccccctgcagagcatccagaccctgcacctggcccagaaccccttcgtgtgcgactgccacctgaagtggctggccgactacctgcaggacaaccccatcgagaccagcggcgccagatgcagcagccccagaagactggccaacaagagaatcagccagatcaagagcaagaagttcagatgcagcggcagcgaggactacagaagcagattcagcagcgagtgcttcatggacctggtgtgccccgagaagtgcagatgcgagggcaccatcgtggactgcagcaaccagaagctggtgagaatccccagccacctgcccgagtacgtgaccgacctgagactgaacgacaacgaggtgagcgtgctggaggccaccggcatcttcaagaagctgcccaacctgagaaagatcaacctgagcaacaacaagatcaaggaggtgagagagggcgccttcgacggcgccgccagcgtgcaggagctgatgctgaccggcaaccagctggagaccgtgcacggcagagtgttcagaggcctgagcggcctgaagaccctgatgctgagaagcaacctgatcggctgcgtgagcaacgacaccttcgccggcctgagcagcgtgagactgctgagcctgtacgacaacagaatcaccaccatcacccccggcgccttcaccaccctggtgagcctgagcaccatcaacctgctgagcaaccccttcaactgcaactgccacctggcctggctgggcaagtggctgagaaagagaagaatcgtgagcggcaaccccagatgccagaagcccttcttcctgaaggagatccccatccaggacgtggccatccaggacttcacctgcgacggcaacgaggagagcagctgccagctgagccccagatgccccgagcagtgcacctgcatggagaccgtggtgagatgcagcaacaagggcctgagagccctgcccagaggcatgcccaaggacgtgaccgagctgtacctggagggcaaccacctgaccgccgtgcccagagagctgagcgccctgagacacctgaccctgatcgacctgagcaacaacagcatcagcatgctgaccaactacaccttcagcaacatgagccacctgagcaccctgatcctgagctacaacagactgagatgcatccccgtgcacgccttcaacggcctgagaagcctgagagtgctgaccctgcacggcaacgacatcagcagcgtgcccgagggcagcttcaacgacctgaccagcctgagccacctggccctgggcaccaaccccctgcactgcgactgcagcctgagatggctgagcgagtgggtgaaggccggctacaaggagcccggcatcgccagatgcagcagccccgagcccatggccgacagactgctgctgaccacccccacccacagattccagtgcaagggccccgtggacatcaacatcgtggccaagtgcaacgcctgcctgagcagcccctgcaagaacaacggcacctgcacccaggaccccgtggagctgtacagatgcgcctgcccctacagctacaagggcaaggactgcaccgtgcccatcaacacctgcatccagaacccctgccagcacggcggcacctgccacctgagcgacagccacaaggacggcttcagctgcagctgccccctgggcttcgagggccagagatgcgagatcaaccccgacgactgcgaggacaacgactgcgagaacaacgccacctgcgtggacggcatcaacaactacgtgtgcatctgcccccccaactacaccggcgagctgtgcgacgaggtgatcgaccactgcgtgcccgagctgaacctgtgccagcacgaggccaagtgcatccccctggacaagggcttcagctgcgagtgcgtgcccggctacagcggcaagctgtgcgagaccgacaacgacgactgcgtggcccacaagtgcagacacggcgcccagtgcgtggacaccatcaacggctacacctgcacctgcccccagggcttcagcggccccttctgcgagcaccccccccccatggtgctgctgcagaccagcccctgcgaccagtacgagtgccagaacggcgcccagtgcatcgtggtgcagcaggagcccacctgcagatgcccccccggcttcgccggccccagatgcgagaagctgatcaccgtgaacttcgtgggcaaggacagctacgtggagctggccagcgccaaggtgagaccccaggccaacatcagcctgcaggtggccaccgacaaggacaacggcatcctgctgtacaagggcgacaacgaccccctggccctggagctgtaccagggccacgtgagactggtgtacgacagcctgagcagcccccccaccaccgtgtacagcgtggagaccgtgaacgacggccagttccacagcgtggagctggtgaccctgaaccagaccctgaacctggtggtggacaagggcacccccaagagcctgggcaagctgcagaagcagcccgccgtgggcatcaacagccccctgtacctgggcggcatccccaccagcaccggcctgagcgccctgagacagggcaccgacagacccctgggcggcttccacggctgcatccacgaggtgagaatcaacaacgagctgcaggacttcaaggccctgcccccccagagcctgggcgtgagccccggctgcaagagctgcaccgtgtgcaagcacggcctgtgcagaagcgtggagaaggacagcgtggtgtgcgagtgcagacccggctggaccggccccctgtgcgaccaggaggccagagacccctgcctgggccacagatgccaccacggcaagtgcgtggccaccggcaccagctacatgtgcaagtgcgccgagggctacggcggcgacctgtgcgacaacaagaacgacagcgccaacgcctgcagcgccttcaagtgccaccacggccagtgccacatcagcgaccagggcgagccctactgcctgtgccagcccggcttcagcggcgagcactgccagcaggtgttcagagcccaggtgttccagagcagcctgcccggcaactgcagctggagctgctggccccccagaccccccatgccctag

SEQ ID NO: 134778 - DNA, 4572 bp, Artificial Sequence
  derived and/or modified sequence
atggcccccggctgggccggcgtgggcgccgccgtgagagccagactggccctggccctggccctggccagcgtgctgagcggcccccccgccgtggcctgccccaccaagtgcacctgcagcgccgccagcgtggactgccacggcctgggcctgagagccgtgcccagaggcatccccagaaacgccgagagactggacctggacagaaacaacatcaccagaatcaccaagatggacttcgccggcctgaagaacctgagagtgctgcacctggaggacaaccaggtgagcgtgatcgagagaggcgccttccaggacctgaagcagctggagagactgagactgaacaagaacaagctgcaggtgctgcccgagctgctgttccagagcacccccaagctgaccagactggacctgagcgagaaccagatccagggcatccccagaaaggccttcagaggcatcaccgacgtgaagaacctgcagctggacaacaaccacatcagctgcatcgaggacggcgccttcagagccctgagagacctggagatcctgaccctgaacaacaacaacatcagcagaatcctggtgaccagcttcaaccacatgcccaagatcagaaccctgagactgcacagcaaccacctgtactgcgactgccacctggcctggctgagcgactggctgagacagagaagaaccgtgggccagttcaccctgtgcatggcccccgtgcacctgagaggcttcaacgtggccgacgtgcagaagaaggagtacgtgtgccccgccccccacagcgagccccccagctgcaacgccaacagcatcagctgccccagcccctgcacctgcagcaacaacatcgtggactgcagaggcaagggcctgatggagatccccgccaacctgcccgagggcatcgtggagatcagactggagcagaacagcatcaaggccatccccgccggcgccttcacccagtacaagaagctgaagagaatcgacatcagcaagaaccagatcagcgacatcgcccccgacgccttccagggcctgaagagcctgaccagcctggtgctgtacggcaacaagatcaccgagatcgtgaagggcctgttcgacggcctggtgagcctgcagctgctgctgctgaacgccaacaagatcaactgcctgagagtgaacaccttccaggacctgcagaacctgaacctgctgagcctgtacgacaacaagctgcagaccatcagcaagggcctgttcgcccccctgcagagcatccagaccctgcacctggcccagaaccccttcgtgtgcgactgccacctgaagtggctggccgactacctgcaggacaaccccatcgagaccagcggcgccagatgcagcagccccagaagactggccaacaagagaatcagccagatcaagagcaagaagttcagatgcagcggcagcgaggactacagaagcagattcagcagcgagtgcttcatggacctggtgtgccccgagaagtgcagatgcgagggcaccatcgtggactgcagcaaccagaagctggtgagaatccccagccacctgcccgagtacgtgaccgacctgagactgaacgacaacgaggtgagcgtgctggaggccaccggcatcttcaagaagctgcccaacctgagaaagatcaacctgagcaacaacaagatcaaggaggtgagagagggcgccttcgacggcgccgccagcgtgcaggagctgatgctgaccggcaaccagctggagaccgtgcacggcagagtgttcagaggcctgagcggcctgaagaccctgatgctgagaagcaacctgatcggctgcgtgagcaacgacaccttcgccggcctgagcagcgtgagactgctgagcctgtacgacaacagaatcaccaccatcacccccggcgccttcaccaccctggtgagcctgagcaccatcaacctgctgagcaaccccttcaactgcaactgccacctggcctggctgggcaagtggctgagaaagagaagaatcgtgagcggcaaccccagatgccagaagcccttcttcctgaaggagatccccatccaggacgtggccatccaggacttcacctgcgacggcaacgaggagagcagctgccagctgagccccagatgccccgagcagtgcacctgcatggagaccgtggtgagatgcagcaacaagggcctgagagccctgcccagaggcatgcccaaggacgtgaccgagctgtacctggagggcaaccacctgaccgccgtgcccagagagctgagcgccctgagacacctgaccctgatcgacctgagcaacaacagcatcagcatgctgaccaactacaccttcagcaacatgagccacctgagcaccctgatcctgagctacaacagactgagatgcatccccgtgcacgccttcaacggcctgagaagcctgagagtgctgaccctgcacggcaacgacatcagcagcgtgcccgagggcagcttcaacgacctgaccagcctgagccacctggccctgggcaccaaccccctgcactgcgactgcagcctgagatggctgagcgagtgggtgaaggccggctacaaggagcccggcatcgccagatgcagcagccccgagcccatggccgacagactgctgctgaccacccccacccacagattccagtgcaagggccccgtggacatcaacatcgtggccaagtgcaacgcctgcctgagcagcccctgcaagaacaacggcacctgcacccaggaccccgtggagctgtacagatgcgcctgcccctacagctacaagggcaaggactgcaccgtgcccatcaacacctgcatccagaacccctgccagcacggcggcacctgccacctgagcgacagccacaaggacggcttcagctgcagctgccccctgggcttcgagggccagagatgcgagatcaaccccgacgactgcgaggacaacgactgcgagaacaacgccacctgcgtggacggcatcaacaactacgtgtgcatctgcccccccaactacaccggcgagctgtgcgacgaggtgatcgaccactgcgtgcccgagctgaacctgtgccagcacgaggccaagtgcatccccctggacaagggcttcagctgcgagtgcgtgcccggctacagcggcaagctgtgcgagaccgacaacgacgactgcgtggcccacaagtgcagacacggcgcccagtgcgtggacaccatcaacggctacacctgcacctgcccccagggcttcagcggccccttctgcgagcaccccccccccatggtgctgctgcagaccagcccctgcgaccagtacgagtgccagaacggcgcccagtgcatcgtggtgcagcaggagcccacctgcagatgcccccccggcttcgccggccccagatgcgagaagctgatcaccgtgaacttcgtgggcaaggacagctacgtggagctggccagcgccaaggtgagaccccaggccaacatcagcctgcaggtggccaccgacaaggacaacggcatcctgctgtacaagggcgacaacgaccccctggccctggagctgtaccagggccacgtgagactggtgtacgacagcctgagcagcccccccaccaccgtgtacagcgtggagaccgtgaacgacggccagttccacagcgtggagctggtgaccctgaaccagaccctgaacctggtggtggacaagggcacccccaagagcctgggcaagctgcagaagcagcccgccgtgggcatcaacagccccctgtacctgggcggcatccccaccagcaccggcctgagcgccctgagacagggcaccgacagacccctgggcggcttccacggctgcatccacgaggtgagaatcaacaacgagctgcaggacttcaaggccctgcccccccagagcctgggcgtgagccccggctgcaagagctgcaccgtgtgcaagcacggcctgtgcagaagcgtggagaaggacagcgtggtgtgcgagtgcagacccggctggaccggccccctgtgcgaccaggaggccagagacccctgcctgggccacagatgccaccacggcaagtgcgtggccaccggcaccagctacatgtgcaagtgcgccgagggctacggcggcgacctgtgcgacaacaagaacgacagcgccaacgcctgcagcgccttcaagtgccaccacggccagtgccacatcagcgaccagggcgagccctactgcctgtgccagcccggcttcagcggcgagcactgccagcaggagaacccctgcctgggccaggtggtgagagaggtgatcagaagacagaagggctacgccagctgcgccaccgccagcaaggtgcccatcatggagtgcagaggcggctgcggcccccagtgctgccagcccaccagaagcaagagaagaaagtacgtgttccagtgcaccgacggcagcagcttcgtggaggaggtggagagacacctggagtgcggctgcctggcctgcagctag

SEQ ID NO: 134779 - protein, 31 aa, Artificial Sequence
  derived and/or modified sequence
MGINTRELFLNFTIVLITVILMWLLVRSYQY

SEQ ID NO: 134780 - DNA, 96 bp, Artificial Sequence
  derived and/or modified sequence
atgggcattaatacgagagagctgtttctgaactttaccatcgtgctcattacggtcattctgatgtggcttctggttcgatcttatcagtattag

SEQ ID NO: 134781 - DNA, 96 bp, Artificial Sequence
  derived and/or modified sequence
atgggtatcaacactcgggagctcttcctgaatttcacaattgtactgatcaccgtcattctgatgtggctgctggtgaggagttaccagtactag

SEQ ID NO: 134782 - DNA, 96 bp, Artificial Sequence
  derived and/or modified sequence
atgggcataaatactcgcgagctcttcctcaactttacaattgttctcattactgtaattctgatgtggctgctcgttcgtagctaccagtactag

SEQ ID NO: 134783 - DNA, 96 bp, Artificial Sequence
  derived and/or modified sequence
atgggcatcaacacccgggagctgttcctgaacttcaccatcgtgctgatcaccgtcatcctgatgtggctgctggtgcgcagctaccagtactag

SEQ ID NO: 134784 - DNA, 96 bp, Artificial Sequence
  derived and/or modified sequence
atgggcatcaacacccgggagctgttcctgaacttcaccatcgtgttgataaccgtgatccttatgtggttacttgtgcgctcatatcagtattag

SEQ ID NO: 134785 - DNA, 96 bp, Artificial Sequence
  derived and/or modified sequence
atgggcatcaacacccgggagctgttcctgaacttcaccatcgtgctgataactgtgatcctcatgtggctcctcgtgcggagctaccagtactag

SEQ ID NO: 134786 - DNA, 96 bp, Artificial Sequence
  derived and/or modified sequence
atgggcatcaacacccgggagctgttcctgaacttcaccatcgtgctaatcaccgtgatattgatgtggctgctggtgaggagttaccagtactag

SEQ ID NO: 134787 - DNA, 96 bp, Artificial Sequence
  derived and/or modified sequence
atgggtatcaacacaagggagttgtttctgaacttcactattgtgttgatcacagtgatcttgatgtggcttcttgtcagaagttatcaatactag

SEQ ID NO: 134788 - DNA, 96 bp, Artificial Sequence
  derived and/or modified sequence
atgggtatcaacactagagaactgttcctgaattttaccattgtgctgatcacagttattctgatgtggctcctggtgcgctcctaccagtattag

SEQ ID NO: 134789 - DNA, 96 bp, Artificial Sequence
  derived and/or modified sequence
atgggtatcaacactagggagctcttcttaaattttaccatcgtgttgatcaccgtgatactgatgtggcttttagtgcgatcttaccaatattag

SEQ ID NO: 134790 - DNA, 722 bp, Artificial Sequence
  derived and/or modified sequence
agtccagacagcctgggaggggagaaggagttggagctcaagttggagacagcgaggagaaacctgccatagccagggtgtgtctttgatcctcttcaggaggtgaggagaagccagaggtccttggtgtgccctcagaaatctgcctgcagttctcaccaagccgctgtgaaaatggggataaacacccgggagctgtttctcaacttcactattgtcttgattacggttattcttatgtggctccttgtgaggtcctatcagtactgagaggccatgccatggtcctgggattgactgagatgctccggagctgcctgctctatgccctgagaccccactgctgtcattgtcacaggatgccattctccatccgagggcacctgtgacctgcactcacaatatctgctatgctgtagtgctaggattgattatgtgttctccaaagatgctgctcccaagggctgccaagtgtttgccagggaacggtagatttattccccaactcttaactgaaaatgtgttagacaagccacaaagttaaaattaaactggattcatgatgatgtaggattgttacaagcccctgatctgtctcaccacacatcccttcaacccacacggtctgcaaccaaactctaattcaacctgccagaaggaatgttagaggaagtctttgtcagcccttatagctatcatgtgaataaagttaagtcaacttc

SEQ ID NO: 134791 - DNA, 436 bp, Artificial Sequence
  derived and/or modified sequence
ctgtctgctgctgaggcctgcagagattaatataaacggcaggaggtgaggagaagccagaggtccttggtgtgccctcagaaatctgcctgcagttctcaccaagccgctgtgaaaatggggataaacacccgggagctgtttctcaacttcactattgtcttgattacggttattcttatgtggctccttgtgaggtcctatcagtactgagaggccatgccatggtcctgggattgactgagatgctccggagctgcctgctctatgccctgagaccccactgctgtcattgtcacaggatgccattctccatccgagggcacctgtgacctgcactcacaatatctgctatgctgtagtgctaggattgattatgtgttctccaaagatgctgctcccaagggctgccaagtgtttgccagggaacggtaga

SEQ ID NO: 134792 - DNA, 906 bp, Artificial Sequence
  derived and/or modified sequence
attttcttgctcttgagctctggcacttctctgctgctgtctgctgctgaggcctgcagagattaatataaacggcagcctcgaaccttcggagggtgttcctttgagatgtttcatcagtgacatcacagtgattgccagcttccacggactactttaggcgctgcccagagtccaggagtccagacagcctgggaggggagaaggagttggagctcaagttggagacagcgaggagaaacctgccatagccagggtgtgtctttgatcctcttcaggaggtgaggagaagccagaggtccttggtgtgccctcagaaatctgcctgcagttctcaccaagccgctgtgaaaatggggataaacacccgggagctgtttctcaacttcactattgtcttgattacggttattcttatgtggctccttgtgaggtcctatcagtactgagaggccatgccatggtcctgggattgactgagatgctccggagctgcctgctctatgccctgagaccccactgctgtcattgtcacaggatgccattctccatccgagggcacctgtgacctgcactcacaatatctgctatgctgtagtgctaggattgattatgtgttctccaaagatgctgctcccaagggctgccaagtgtttgccagggaacggtagatttattccccaactcttaactgaaaatgtgttagacaagccacaaagttaaaattaaactggattcatgatgatgtaggattgttacaagcccctgatctgtctcaccacacatcccttcaacccacacggtctgcaaccaaactctaattcaacctgccagaaggaatgttagaggaagtctttgtcagcccttatagctatcatgtgaataaagttaagtcaacttcaaaaa

SEQ ID NO: 134793 - DNA, 96 bp, Artificial Sequence
  derived and/or modified sequence
atgggcatcaacaccagagagctgttcctgaacttcaccatcgtgctgatcaccgtgatcctgatgtggctgctggtgagaagctaccagtactag

SEQ ID NO: 134794 - protein, 107 aa, Artificial Sequence
  derived and/or modified sequence
SGKSFKAGVCPPKKSAQCLRYKKPECQSDWQCPGKKRCCPDTCGIKCLDPVDTPNPTRRKPGKCPVTYGQCLMLNPPNFCEMDGQCKRDLKCCMGMCGKSCVSPVKA

SEQ ID NO: 134795 - protein, 132 aa, Artificial Sequence
  derived and/or modified sequence
MKSSGLFPFLVLLALGTLAPWAVEGSGKSFKAGVCPPKKSAQCLRYKKPECQSDWQCPGKKRCCPDTCGIKCLDPVDTPNPTRRKPGKCPVTYGQCLMLNPPNFCEMDGQCKRDLKCCMGMCGKSCVSPVKA

SEQ ID NO: 134796 - DNA, 399 bp, Artificial Sequence
  derived and/or modified sequence
atgaagtcttccgggctgttcccattcctggtgttgctggccctgggaaccctggccccatgggccgtggaggggagtggcaaaagctttaaggcaggagtgtgtcctcctaaaaaaagcgcccagtgtctgcggtataaaaaaccagagtgccagtcagactggcaatgtcccggaaaaaaaaggtgctgccctgatacttgcgggattaagtgcttagaccccgtcgatacacctaatcccacccggagaaaacccggaaagtgtcccgtgacctatggacaatgtcttatgctgaatcctccaaatttctgcgaaatggatggccagtgtaaaagagacctgaagtgttgtatgggcatgtgcggcaaatcctgcgtctctcctgtaaaagcttag

SEQ ID NO: 134797 - DNA, 399 bp, Artificial Sequence
  derived and/or modified sequence
atgaaatcgagtggattattcccatttcttgtactcttggctctcgggacactggctccctgggctgtcgagggatccggaaagtcatttaaagccggagtctgcccccctaagaagtccgctcagtgtcttcgatataaaaagcctgagtgccagtcagattggcagtgtccagggaaaaagagatgctgtcccgatacttgtggcatcaagtgcctggacccagttgatactcctaaccctacgcgacgcaaacctggaaaatgtcccgttacttacggacagtgcctgatgttaaaccctccaaacttctgcgagatggatggccagtgcaagcgggacctgaaatgctgcatgggcatgtgtggcaaatcttgcgtgagcccagttaaggcttag

SEQ ID NO: 134798 - DNA, 399 bp, Artificial Sequence
  derived and/or modified sequence
atgaagtcttccggtctctttccgttcctcgtcctgcttgccctcggtaccctggccccatgggcggtcgaaggttccggcaaatccttcaaggcgggagtttgcccgccgaagaagtcagcacaatgcctcagatacaaaaagcccgagtgccagtccgattggcagtgccctggcaaaaagcgttgttgccctgatacctgtggaattaagtgcctggaccctgttgacacacccaatccaactagaagaaagcccggcaagtgccctgtgacatacggtcagtgtttaatgttgaacccacctaacttctgcgagatggacggtcaatgcaaacgcgatcttaaatgctgtatgggcatgtgcggaaaatcttgtgtctctcccgttaaagcctag

SEQ ID NO: 134799 - DNA, 399 bp, Artificial Sequence
  derived and/or modified sequence
atgaagagcagcggcctgttccccttcctggtgctgctggccctgggcaccctggccccctgggccgtggagggcagcggcaagagcttcaaggccggcgtgtgcccccccaagaagagcgcccagtgcctgagatacaagaagcccgagtgccagagcgactggcagtgccccggcaagaagagatgctgccccgacacctgcggcatcaagtgcctggaccccgtggacacccccaaccccaccagaagaaagcccggcaagtgccccgtgacctacggccagtgcctgatgctgaacccccccaacttctgcgagatggacggccagtgcaagagagacctgaagtgctgcatgggcatgtgcggcaagagctgcgtgagccccgtgaaggcctag

SEQ ID NO: 134800 - DNA, 596 bp, Artificial Sequence
  derived and/or modified sequence
agagtcactcctgccttcaccatgaagtccagcggcctcttccccttcctggtgctgcttgccctgggaactctggcaccttgggctgtggaaggctctggaaagtccttcaaagctggagtctgtcctcctaagaaatctgcccagtgccttagatacaagaaacctgagtgccagagtgactggcagtgtccagggaagaagagatgttgtcctgacacttgtggcatcaaatgcctggatcctgttgacaccccaaacccaacaaggaggaagcctgggaagtgcccagtgacttatggccaatgtttgatgcttaacccccccaatttctgtgagatggatggccagtgcaagcgtgacttgaagtgttgcatgggcatgtgtgggaaatcctgcgtttcccctgtgaaagcttgattcctgccatatggaggaggctctggagtcctgctctgtgtggtccaggtcctttccaccctgagacttggctccaccactgatatcctcctttggggaaaggcttggcacacagcaggctttcaagaagtgccagttgatcaatgaataaataaacgagcctatttctctttgca

SEQ ID NO: 134801 - DNA, 399 bp, Artificial Sequence
  derived and/or modified sequence
atgaaaagttctggccttttccccttcctggtactcctagccctgggaactctagccccatgggcagtggaagggagtggaaaatcattcaaagcaggggtgtgcccacctaaaaagtccgcccaatgtctcaggtacaaaaagccagaatgccagtctgactggcagtgtccggggaagaagaggtgttgcccagatacttgtgggattaagtgcctcgatccggtggacactcccaatccaacaagacggaagcccggcaagtgccctgtcacctacggccagtgcctgatgctcaacccccccaatttctgcgagatggacggacagtgtaaacgtgatctgaaatgctgtatggggatgtgtgggaaatcatgtgtgtcccctgtgaaagcttag

SEQ ID NO: 134802 - DNA, 399 bp, Artificial Sequence
  derived and/or modified sequence
atgaagagcagcggcctcttccccttcctggtgctgctggccctgggcaccctggccccctgggccgtggagggcagcggcaagagcttcaaggccggcgtgtgcccccccaagaagagcgcccagtgcctgcgctacaagaagccagagtgccagagcgactggcagtgccctgggaagaagcgctgctgcccagacacctgtggcatcaagtgcctggaccctgtggacacccccaaccccaccaggaggaagccaggcaagtgccctgtgacctacggccagtgcctgatgctgaacccccccaacttctgtgagatggatggccagtgcaagagggacctgaagtgctgcatgggcatgtgtgggaagagctgtgtgtcccctgtgaaggcctag

SEQ ID NO: 134803 - DNA, 399 bp, Artificial Sequence
  derived and/or modified sequence
atgaagagcagcggcctgttccccttcctggtgctgctggccctgggcacgctcgcaccttgggcagtagaaggatctggcaagtcattcaaagctggtgtgtgcccccctaaaaaaagtgcgcagtgtctcagatataagaaacctgaatgccaatcagactggcagtgccctgggaagaaacgctgctgtcctgatacttgcggtattaaatgtctggatcccgttgacacaccaaatccaacccgacgcaaaccaggaaagtgtcctgtgacttacggtcagtgtctgatgcttaacccacctaacttctgcgaaatggatggccaatgcaagcgcgatctgaagtgttgtatggggatgtgcggcaaaagctgtgtgagtcccgttaaggcatag

SEQ ID NO: 134804 - RNA, 399 nt, Artificial Sequence
  derived and/or modified sequence
augaaaucgaguggauuauucccauuucuuguacucuuggcucucgggacacuggcucccugggcugucgagggauccggaaagucauuuaaagccggagucugccccccuaagaaguccgcucagugucuucgauauaaaaagccugagugccagucagauuggcaguguccagggaaaaagagaugcugucccgauacuuguggcaucaagugccuggacccaguugauacuccuaacccuacgcgacgcaaaccuggaaaaugucccguuacuuacggacagugccugauguuaaacccuccaaacuucugcgagauggauggccagugcaagcgggaccugaaaugcugcaugggcauguguggcaaaucuugcgugagcccaguuaaggcuuag

SEQ ID NO: 134805 - RNA, 399 nt, Artificial Sequence
  derived and/or modified sequence
augaagucuuccggucucuuuccguuccucguccugcuugcccucgguacccuggccccaugggcggucgaagguuccggcaaauccuucaaggcgggaguuugcccgccgaagaagucagcacaaugccucagauacaaaaagcccgagugccaguccgauuggcagugcccuggcaaaaagcguuguugcccugauaccuguggaauuaagugccuggacccuguugacacacccaauccaacuagaagaaagcccggcaagugcccugugacauacggucaguguuuaauguugaacccaccuaacuucugcgagauggacggucaaugcaaacgcgaucuuaaaugcuguaugggcaugugcggaaaaucuugugucucucccguuaaagccuag

SEQ ID NO: 134806 - protein, 268 aa, Artificial Sequence
  derived and/or modified sequence
MPRSFLVKKHFNASKKPNYSELDTHTVIISPYLYESYSMPVIPQPEILSSGAYSPITVWTTAAPFHAQLPNGLSPLSGYSSSLGRVSPPPPSDTSSKDHSGSESPISDEEERLQSKLSDPHAIEAEKFQCNLCNKTYSTFSGLAKHKQLHCDAQSRKSFSCKYCDKEYVSLGALKMHIRTHTLPCVCKICGKAFSRPWLLQGHIRTHTGEKPFSCPHCNRAFADRSNLRAHLQTHSDVKKYQCKNCSKTFSRMSLLHKHEESGCCVAH

SEQ ID NO: 134807 - DNA, 2101 bp, Artificial Sequence
  derived and/or modified sequence
agttcgtaaaggagccgggtgacttcagaggcgccggcccgtccgtctgccgcacctgagcacggcccctgcccgagcctggcccgccgcgatgctgtagggaccgccgtgtcctcccgccggaccgttatccgcgccgggcgcccgccagacccgctggcaagatgccgcgctccttcctggtcaagaagcatttcaacgcctccaaaaagccaaactacagcgaactggacacacatacagtgattatttccccgtatctctatgagagttactccatgcctgtcataccacaaccagagatcctcagctcaggagcatacagccccatcactgtgtggactaccgctgctccattccacgcccagctacccaatggcctctctcctctttccggatactcctcatctttggggcgagtgagtccccctcctccatctgacacctcctccaaggaccacagtggctcagaaagccccattagtgatgaagaggaaagactacagtccaagctttcagacccccatgccattgaagctgaaaagtttcagtgcaatttatgcaataagacctattcaactttttctgggctggccaaacataagcagctgcactgcgatgcccagtctagaaaatctttcagctgtaaatactgtgacaaggaatatgtgagcctgggcgccctgaagatgcatattcggacccacacattaccttgtgtttgcaagatctgcggcaaggcgttttccagaccctggttgcttcaaggacacattagaactcacacgggggagaagcctttttcttgccctcactgcaacagagcatttgcagacaggtcaaatctgagggctcatctgcagacccattctgatgtaaagaaataccagtgcaaaaactgctccaaaaccttctccagaatgtctctcctgcacaaacatgaggaatctggctgctgtgtagcacactgagtgacgcaatcaatgtttactcgaacagaatgcatttcttcactccgaagccaaatgacaaataaagtccaaaggcattttctcctgtgctgaccaaccaaataatatgtatagacacacacacatatgcacacacacacacacacacccacagagagagagctgcaagagcatggaattcatgtgtttaaagataatcctttccatgtgaagtttaaaattactatatatttgctgatggctagattgagagaataaaagacagtaacctttctcttcaaagataaaatgaaaagcacattgcatcttttcttcctaaaaaaatgcaaagatttacattgctgccaaatcatttcaactgaaaagaacagtattgctttgtaatagagtctgtaataggatttcccataggaagagatctgccagacgcgaactcaggtgccttaaaaagtattccaagtttactccattacatgtcggttgtctggttgccattgttgaactaaagcctttttttgattacctgtagtgctttaaagtatatttttaaaagggaggaaaaaaataacaagaacaaaacacaggagaatgtattaaaagtatttttgttttgttttgtttttgccaattaacagtatgtgccttgggggaggagggaaagattagctttgaacattcctggcgcatgctccattgtcttactattttaaaacattttaataatttttgaaaattaattaaagatgggaataagtgcaaaagaggattcttacaaattcattaatgtacttaaactatttcaaatgcataccacaaatgcaataatacaataccccttccaagtgcctttttaaattgtatagttgatgagtcaatgtaaatttgtgtttatttttatatgattgaatgagttctgtatgaaactgagatgttgtctatagctatgtctataaacaacctgaagacttgtgaaatcaatgtttcttttttaaaaaacaattttcaagttttttttacaataaacagttttgatttaaaatctcgtttgtatactattttcagagactttacttgcttcatgattagtaccaaaccactgtacaaagaattgtttgttaacaagaaaaaaa

SEQ ID NO: 134808 - DNA, 807 bp, Artificial Sequence
  derived and/or modified sequence
atgcccagaagcttcctggtgaagaagcacttcaacgccagcaagaagcccaactacagcgagctggacacccacaccgtgatcatcagcccctacctgtacgagagctacagcatgcccgtgatcccccagcccgagatcctgagcagcggcgcctacagccccatcaccgtgtggaccaccgccgcccccttccacgcccagctgcccaacggcctgagccccctgagcggctacagcagcagcctgggcagagtgagcccccccccccccagcgacaccagcagcaaggaccacagcggcagcgagagccccatcagcgacgaggaggagagactgcagagcaagctgagcgacccccacgccatcgaggccgagaagttccagtgcaacctgtgcaacaagacctacagcaccttcagcggcctggccaagcacaagcagctgcactgcgacgcccagagcagaaagagcttcagctgcaagtactgcgacaaggagtacgtgagcctgggcgccctgaagatgcacatcagaacccacaccctgccctgcgtgtgcaagatctgcggcaaggccttcagcagaccctggctgctgcagggccacatcagaacccacaccggcgagaagcccttcagctgcccccactgcaacagagccttcgccgacagaagcaacctgagagcccacctgcagacccacagcgacgtgaagaagtaccagtgcaagaactgcagcaagaccttcagcagaatgagcctgctgcacaagcacgaggagagcggctgctgcgtggcccactag

SEQ ID NO: 134809 - DNA, 807 bp, Artificial Sequence
  derived and/or modified sequence
atgccgcgctcctttctcgtgaaaaagcacttcaatgcctcaaaaaagcccaactattctgagctggacacccacaccgtcataataagtccgtacctgtatgaatcctatagcatgccggtcattccccagccagaaattctcagctccggtgcttacagcccaattacagtgtggaccaccgctgccccctttcacgcgcagctgccgaacgggctgagtccactcagcggttatagtagctctttaggaagggtcagccccccacctcctagcgacacctccagcaaagatcatagcgggagcgagtcaccgataagcgacgaagaagagaggttacaatcaaagctctctgacccgcatgccatcgaagccgaaaaattccagtgcaacctgtgcaataaaacatactccacattctcaggcctggccaagcacaaacaattacactgtgacgctcagtcccgaaaatcgttcagctgcaagtattgtgataaagagtacgtgagtctgggagcgctgaagatgcatattcgcacccacacactcccttgcgtttgtaaaatttgcgggaaggcctttagcaggccctggctgctgcagggacatatccgtacccacacaggtgaaaagccattttcctgcccacactgcaacagagcctttgctgatcgttctaaccttagggcccacttgcagacgcatagtgatgtgaagaaataccaatgcaaaaactgcagcaaaacattcagccgcatgagcctacttcataaacacgaagagtcgggctgttgtgtggctcattag

SEQ ID NO: 134810 - DNA, 807 bp, Artificial Sequence
  derived and/or modified sequence
atgccaagatcctttcttgtcaagaagcactttaatgcgtccaaaaagccgaactatagtgaactagacacccacactgttataatttctccttacttgtacgagtcgtactctatgcctgtcattccgcagcccgagatcctgtcctccggagcctactctcctataacggtttggacaactgcagcgccttttcacgcccagctccccaacggattatcacctttaagcgggtatagctcgtccttaggcagggtgtcccccccacctccttccgacaccagctccaaagaccactctggctccgaatcccctatctccgatgaggaggaaagactccagtccaaactgagcgatcctcacgccatcgaagccgagaaatttcagtgtaatctgtgcaacaagacctacagtacttttagcgggttggccaaacacaaacagcttcactgtgacgcgcagtcaagaaagtcatttagctgtaagtactgcgacaaggagtacgtgtccctgggcgccctgaagatgcatataagaactcacactctcccgtgtgtttgcaagatctgcggcaaggcttttagtaggccatggttgctgcaggggcacatccgtacgcacacgggcgaaaaacctttctcatgcccccactgcaaccgggcttttgcggatcgaagcaacctcagggcccatctgcaaacccactcggacgtcaagaaataccagtgcaagaactgctccaagacgttctctcggatgtccctcttgcacaaacatgaggagtctggctgctgtgttgcccactag

SEQ ID NO: 134811 - DNA, 807 bp, Artificial Sequence
  derived and/or modified sequence
atgcccaggagcttcctggtgaagaagcacttcaatgccagcaagaagcccaactacagcgagctggacacccacacagtcatcatcagcccctacctgtatgagagctacagcatgcctgtgatcccccagcctgagatcctgagcagcggggcctacagccccatcaccgtgtggaccacagctgcccccttccacgcccagctgcccaacggcctgagccccctgagcggctacagcagcagcctgggccgggtgagccccccaccacccagcgacaccagcagcaaggaccacagcggcagcgagagccccatcagtgatgaggaggagcggctgcagagcaagctgagtgacccccacgccattgaagctgagaagttccagtgcaacctgtgcaacaagacctacagcaccttcagcggcctggccaagcacaagcagctgcactgtgatgcccagagcaggaagagcttcagctgcaagtactgtgacaaggagtatgtgtccctgggcgccctgaagatgcacatccgcacccacaccctgccctgtgtgtgcaagatctgtgggaaggccttcagccggccctggctgctgcagggccacatccgcacccacactggagagaagcccttcagctgcccccactgcaacagagcctttgctgacaggagcaacctgcgggcccacctgcagacccacagtgatgtgaagaagtaccagtgcaagaactgcagcaagaccttcagcaggatgagcctgctgcacaagcatgaggagagcggctgctgcgtggcccactag

SEQ ID NO: 134812 - DNA, 807 bp, Artificial Sequence
  derived and/or modified sequence
atgccccggagcttcctggtgaagaagcacttcaacgccagcaagaagcctaactatagcgaactcgatactcacactgtcataatatcaccatacctgtacgagtcatattccatgcctgtaatccctcagcctgaaattctgtccagtggtgcctacagtcccattactgtgtggacaacggcagccccattccatgcacaactacccaatggactgtcacccctgagtggctactcatcatctctgggaagagtaagccccccgcctccttcagatacatccagcaaggaccattccgggtccgagtcaccaatttctgatgaggaagagaggctgcagtccaaactctcggatcctcacgctatcgaagctgaaaagttccaatgcaatctctgtaacaagacctattcgacgtttagcgggctggcaaagcataaacagctgcactgcgacgcccaatctaggaagagcttttcttgcaagtattgcgataaagagtacgtgtcactgggggccttaaagatgcatatacggacacacacgttgccatgcgtatgcaaaatttgtgggaaggcatttagtaggccatggctgttgcagggacatattaggacccacacgggcgaaaagccttttagctgcccacattgcaatagggcttttgccgatcgatcaaatctccgagcccatctgcaaactcattctgatgtgaaaaagtatcagtgtaagaactgtagcaagactttcagcagaatgtccctgctacataagcatgaggaatccgggtgttgcgtcgcccactag

SEQ ID NO: 134813 - DNA, 807 bp, Artificial Sequence
  derived and/or modified sequence
atgccccggagcttcctggtgaagaagcacttcaacgccagcaagaaacccaactactctgaactagatacgcacacggttatcatctcaccttatttgtacgagtcttattcgatgcctgttatcccgcagcctgaaatactgtctagcggagcgtatagtcctatcaccgtgtggacgaccgcagcccccttccacgcccagcttccgaacggactctcaccactgagcggctacagctcctccctgggacgcgtttcgccccccccaccaagcgacacaagctctaaagatcacagcggctccgaatctcccatctctgacgaggaagaacggctgcagtccaagctaagcgacccacacgctatcgaagccgaaaaatttcagtgtaacctctgcaataagacctatagtacctttagcggactagcaaaacataagcagctgcattgcgacgcgcagtctcgaaagtcattttcttgcaagtattgcgataaggaatatgtgagcctgggcgctctaaaaatgcatattagaacccacacactgccatgcgtatgtaagatctgtgggaaagctttttcccgaccatggctgcttcaagggcacattcgtacacacacaggggagaagcctttttcatgcccccactgcaatcgagcctttgcggaccggagtaatctcagagctcatctccagacccatagcgacgtaaagaagtaccagtgcaagaattgctccaagacattcagtagaatgtcacttctgcataaacatgaggaatctggttgttgcgtagcgcattag

SEQ ID NO: 134814 - DNA, 807 bp, Artificial Sequence
  derived and/or modified sequence
atgcctaggagtttcctggtaaagaaacacttcaacgcgtccaagaagcctaactatagtgagctggacacacacactgtcataatttccccttacctttatgaaagctactccatgcccgtcatcccccaaccagaaattctttcctctggggcttactctcctatcaccgtgtggacgacggcagcccctttccacgcacaattgcctaacggattgtccccactgagtggatatagcagctccctgggcagggtgagccctccccctcccagcgatactagcagcaaagaccacagtggatccgaaagccccatctctgacgaagaggaacgtctccagtccaagttaagtgatccccatgcgattgaggccgaaaagttccaatgcaacttgtgcaacaagacttatagcactttctccgggctggcaaagcataagcagttgcactgcgatgcccagagccgcaagagcttctcttgcaagtactgtgataaagaatacgtctcactgggcgctcttaaaatgcatattcgtacacataccttaccctgcgtgtgtaaaatttgcggtaaggctttttcacggccttggttgttgcagggacacattaggacccacactggggagaaacctttctcatgtccccattgcaatcgagcatttgccgaccgttctaacctccgggcacacctacaaactcactctgatgtcaagaagtatcaatgtaaaaattgctctaaaaccttctcacggatgagcctgctccataagcacgaggagagcggatgctgcgtggctcactag

SEQ ID NO: 134815 - DNA, 807 bp, Artificial Sequence
  derived and/or modified sequence
atgccacggtcgttcctggtaaaaaaacacttcaatgccagtaaaaagcctaactatagtgagttggacacccatactgttattatcagcccatatctttatgagtcctattccatgcccgtaatcccacaaccggagatcctgtcttctggtgcgtactccccaatcacggtatggactacagcagcacctttccatgcccagctccctaacgggctcagccctttatcaggctatagcagctccctggggagagtctctcctcctcccccttcggacacatcaagcaaagaccacagtggctctgagtcgcctatctccgacgaggaagagcgactgcagagcaaactgtcagatcctcatgccatagaggcggaaaaatttcaatgcaacttatgtaataagacttatagcacattttctgggctggctaagcacaaacagctgcactgcgacgcacagtccaggaagtccttctcatgcaaatactgtgacaaggagtatgtgtctctgggagcactcaaaatgcacattcgaacccatacgcttccttgcgtttgcaagatctgcggcaaggctttttcaaggccctggttgcttcagggtcatataagaactcatactggcgagaagcctttctcttgcccccactgtaatcgtgcgttcgcagatcgatccaacttgcgggctcacctgcagactcattcggatgtaaaaaaataccaatgtaaaaattgttcaaaaacattttctcgaatgtccctgttgcataagcacgaagagtccggctgttgtgtggctcattag

SEQ ID NO: 134816 - DNA, 807 bp, Artificial Sequence
  derived and/or modified sequence
atgcctcgtagctttcttgtcaaaaaacactttaatgcctctaagaagccgaattattccgaactggatacccacactgtgatcatcagcccatatctgtacgagtcctactcaatgcccgtcatcccccagcctgaaattttatcctccggcgcctatagccctattactgtgtggaccacggccgccccatttcacgctcaacttccaaacggtcttagcccgctctctggatactcctccagcctgggaagagtgtctccccctcctccgagcgatacctctagtaaggaccactctggctctgaaagccccattagcgacgaagaagaacgactccaatccaagctcagcgaccctcacgccatcgaagcagagaaatttcagtgcaacctatgcaataaaacctactcgacattctccggtctcgccaaacataaacaactccattgcgacgcccagagccggaaatctttttcttgcaaatattgtgacaaggagtacgtcagtttgggagcacttaagatgcacattcgtacacacacactaccatgcgtctgcaagatttgtggaaaggcctttagccggccctggctgctacagggccacatcagaacccatacaggagagaagccgttttcttgtcctcattgcaacagagcatttgccgatcggtctaatctgagagctcatttacagacccactcagacgtaaagaaataccagtgtaagaactgtagtaaaaccttctcccggatgtcacttcttcataaacatgaggaaagcggctgctgcgtcgcccattag

SEQ ID NO: 134817 - DNA, 807 bp, Artificial Sequence
  derived and/or modified sequence
atgccacgaagctttctggtgaaaaaacattttaacgctagcaaaaaacctaattattctgagctcgatacccacaccgtcatcatttccccttacctgtatgagtcctacagtatgcctgtgatacctcagcccgaaatcctgtcctccggagcctactcacccatcactgtctggaccacggccgcacctttccacgcccaactcccaaacggtctgagcccactctcaggatactcatcttcacttgggcgagtgtccccccccccccccagcgatacttcttccaaggaccactccggctctgaaagccccattagcgacgaagaagaacgactccaatccaagctcagcgaccctcacgccatcgaagcagagaaatttcagtgcaacctatgcaataaaacctactcgacattctccggtctcgccaaacataaacaactccattgcgacgcccagagccggaaatctttttcttgcaaatattgtgacaaggagtacgtcagtttgggagcacttaagatgcacattcgtacacacacactaccatgcgtctgcaagatttgtggaaaggcctttagccggccctggctgctacagggccatatcagaactcatactggcgaaaaacccttttcttgtccccattgtaatcgggcatttgcagataggtctaatttgagagcccatttacagacccactctgacgtgaagaagtatcagtgtaagaactgctcaaaaaccttctctcggatgtcactcctccacaaacatgaagagagtggttgttgtgttgcacactag

SEQ ID NO: 134818 - DNA, 2088 bp, Artificial Sequence
  derived and/or modified sequence
agttcgtaaaggagccgggtgacttcagaggcgccggcccgtccgtctgccgcacctgagcacggcccctgcccgagcctggcccgccgcgatgctgtagggaccgccgtgtcctcccgccggaccgttatccgcgccgggcgcccgccagacccgctggcaagatgccgcgctccttcctggtcaagaagcatttcaacgcctccaaaaagccaaactacagcgaactggacacacatacagtgattatttccccgtatctctatgagagttactccatgcctgtcataccacaaccagagatcctcagctcaggagcatacagccccatcactgtgtggactaccgctgctccattccacgcccagctacccaatggcctctctcctctttccggatactcctcatctttggggcgagtgagtccccctcctccatctgacacctcctccaaggaccacagtggctcagaaagccccattagtgatgaagaggaaagactacagtccaagctttcagacccccatgccattgaagctgaaaagtttcagtgcaatttatgcaataagacctattcaactttttctgggctggccaaacataagcagctgcactgcgatgcccagtctagaaaatctttcagctgtaaatactgtgacaaggaatatgtgagcctgggcgccctgaagatgcatattcggacccacacattaccttgtgtttgcaagatctgcggcaaggcgttttccagaccctggttgcttcaaggacacattagaactcacacgggggagaagcctttttcttgccctcactgcaacagagcatttgcagacaggtcaaatctgagggctcatctgcagacccattctgatgtaaagaaataccagtgcaaaaactgctccaaaaccttctccagaatgtctctcctgcacaaacatgaggaatctggctgctgtgtagcacactgagtgacgcaatcaatgtttactcgaacagaatgcatttcttcactccgaagccaaatgacaaataaagtccaaaggcattttctcctgtgctgaccaaccaaataatatgtatagacacacacacatatgcacacacacacacacacacccacagagagagagctgcaagagcatggaattcatgtgtttaaagataatcctttccatgtgaagtttaaaattactatatatttgctgatggctagattgagagaataaaagacagtaacctttctcttcaaagataaaatgaaaagcacattgcatcttttcttcctaaaaaaatgcaaagatttacattgctgccaaatcatttcaactgaaaagaacagtattgctttgtaatagagtctgtaataggatttcccataggaagagatctgccagacgcgaactcaggtgccttaaaaagtattccaagtttactccattacatgtcggttgtctggttgccattgttgaactaaagcctttttttgattacctgtagtgctttaaagtatatttttaaaagggaggaaaaaaataacaagaacaaaacacaggagaatgtattaaaagtatttttgttttgttttgtttttgccaattaacagtatgtgccttgggggaggagggaaagattagctttgaacattcctggcgcatgctccattgtcttactattttaaaacattttaataatttttgaaaattaattaaagatgggaataagtgcaaaagaggattcttacaaattcattaatgtacttaaactatttcaaatgcataccacaaatgcaataatacaataccccttccaagtgcctttttaaattgtatagttgatgagtcaatgtaaatttgtgtttatttttatatgattgaatgagttctgtatgaaactgagatgttgtctatagctatgtctataaacaacctgaagacttgtgaaatcaatgtttcttttttaaaaaacaattttcaagttttttttacaataaacagttttgatttaaaatctcgtttgtatactattttcagagactttacttgcttcatgattagtaccaaaccactgtacaaagaattgtttgtt

SEQ ID NO: 134819 - DNA, 2204 bp, Artificial Sequence
  derived and/or modified sequence
tctggaagccaggcgggcagggcagagaccccggctcctgcgcccctcctagctcccagagagcgtggatcgcgggcggggctcaccgagcgagctgtcccagagggaggagctgaaatctgaacctctcagctgtgattggatctttcttgcaaaagagaggaaaaaaaaaccctcccagccaaaacgggctcagttcgtaaaggagccgggtgacttcagaggcgccggcccgtccgtctgccgcacctgagcacggcccctgcccgagcctggcccgccgcgatgctgtagggaccgccgtgtcctcccgccggaccgttatccgcgccgggcgcccgccagacccgctggcaagatgccgcgctccttcctggtcaagaagcatttcaacgcctccaaaaagccaaactacagcgaactggacacacatacagtgattatttccccgtatctctatgagagttactccatgcctgtcataccacaaccagagatcctcagctcaggagcatacagccccatcactgtgtggactaccgctgctccattccacgcccagctacccaatggcctctctcctctttccggatactcctcatctttggggcgagtgagtccccctcctccatctgacacctcctccaaggaccacagtggctcagaaagccccattagtgatgaagaggaaagactacagtccaagctttcagacccccatgccattgaagctgaaaagtttcagtgcaatttatgcaataagacctattcaactttttctgggctggccaaacataagcagctgcactgcgatgcccagtctagaaaatctttcagctgtaaatactgtgacaaggaatatgtgagcctgggcgccctgaagatgcatattcggacccacacattaccttgtgtttgcaagatctgcggcaaggcgttttccagaccctggttgcttcaaggacacattagaactcacacgggggagaagcctttttcttgccctcactgcaacagagcatttgcagacaggtcaaatctgagggctcatctgcagacccattctgatgtaaagaaataccagtgcaaaaactgctccaaaaccttctccagaatgtctctcctgcacaaacatgaggaatctggctgctgtgtagcacactgagtgacgcaatcaatgtttactcgaacagaatgcatttcttcactccgaagccaaatgacaaataaagtccaaaggcattttctcctgtgctgaccaaccaaataatatgtatagacacacacacatatgcacacacacacacacacacccacagagagagagctgcaagagcatggaattcatgtgtttaaagataatcctttccatgtgaagtttaaaattactatatatttgctgatggctagattgagagaataaaagacagtaacctttctcttcaaagataaaatgaaaagcacattgcatcttttcttcctaaaaaaatgcaaagatttacattgctgccaaatcatttcaactgaaaagaacagtattgctttgtaatagagtctgtaataggatttcccataggaagagatctgccagacgcgaactcaggtgccttaaaaagtattccaagtttactccattacatgtcggttgtctggttgccattgttgaactaaagcctttttttgattacctgtagtgctttaaagtatatttttaaaagggaggaaaaaaataacaagaacaaaacacaggagaatgtattaaaagtatttttgttttgttttgtttttgccaattaacagtatgtgccttgggggaggagggaaagattagctttgaacattcctggcgcatgctccattgtcttactattttaaaacattttaataatttttgaaaattaattaaagatgggaataagtgcaaaagaggattcttacaaattcattaatgtacttaaactatttcaaatgcataccacaaatgcaataatacaataccccttccaagtgcctttttaaattgtatagttgatgagtcaatgtaaatttgtgtttatttttatatgattgaatgagttctgtatgaaactgagatgttgtctatagctatgtctataaacaacctgaagacttgtgaaatcaatgtttcttttttaaaaaacaattttcaagttttttttacaataaacagttttgatttaaaa

SEQ ID NO: 134820 - RNA, 807 nt, Artificial Sequence
  derived and/or modified sequence
augccucguagcuuucuugucaaaaaacacuuuaaugccucuaagaagccgaauuauuccgaacuggauacccacacugugaucaucagcccauaucuguacgaguccuacucaaugcccgucaucccccagccugaaauuuuauccuccggcgccuauagcccuauuacuguguggaccacggccgccccauuucacgcucaacuuccaaacggucuuagcccgcucucuggauacuccuccagccugggaagagugucucccccuccuccgagcgauaccucuaguaaggaccacucuggcucugaaagccccauuagcgacgaagaagaacgacuccaauccaagcucagcgacccucacgccaucgaagcagagaaauuucagugcaaccuaugcaauaaaaccuacucgacauucuccggucucgccaaacauaaacaacuccauugcgacgcccagagccggaaaucuuuuucuugcaaauauugugacaaggaguacgucaguuugggagcacuuaagaugcacauucguacacacacacuaccaugcgucugcaagauuuguggaaaggccuuuagccggcccuggcugcuacagggccacaucagaacccauacaggagagaagccguuuucuuguccucauugcaacagagcauuugccgaucggucuaaucugagagcucauuuacagacccacucagacguaaagaaauaccaguguaagaacuguaguaaaaccuucucccggaugucacuucuucauaaacaugaggaaagcggcugcugcgucgcccauuag

SEQ ID NO: 134821 - RNA, 807 nt, Artificial Sequence
  derived and/or modified sequence
augccacgaagcuuucuggugaaaaaacauuuuaacgcuagcaaaaaaccuaauuauucugagcucgauacccacaccgucaucauuuccccuuaccuguaugaguccuacaguaugccugugauaccucagcccgaaauccuguccuccggagccuacucacccaucacugucuggaccacggccgcaccuuuccacgcccaacucccaaacggucugagcccacucucaggauacucaucuucacuugggcgaguguccccccccccccccagcgauacuucuuccaaggaccacuccggcucugaaagccccauuagcgacgaagaagaacgacuccaauccaagcucagcgacccucacgccaucgaagcagagaaauuucagugcaaccuaugcaauaaaaccuacucgacauucuccggucucgccaaacauaaacaacuccauugcgacgcccagagccggaaaucuuuuucuugcaaauauugugacaaggaguacgucaguuugggagcacuuaagaugcacauucguacacacacacuaccaugcgucugcaagauuuguggaaaggccuuuagccggcccuggcugcuacagggccauaucagaacucauacuggcgaaaaacccuuuucuuguccccauuguaaucgggcauuugcagauaggucuaauuugagagcccauuuacagacccacucugacgugaagaaguaucaguguaagaacugcucaaaaaccuucucucggaugucacuccuccacaaacaugaagagagugguuguuguguugcacacuag

SEQ ID NO: 134822 - protein, 1590 aa, Artificial Sequence
  derived and/or modified sequence
MSTPTDPGAMPHPGPSPGPGPSPGPILGPSPGPGPSPGSVHSMMGPSPGPPSVSHPMPTMGSTDFPQEGMHQMHKPIDGIHDKGIVEDIHCGSMKGTGMRPPHPGMGPPQSPMDQHSQGYMSPHPSPLGAPEHVSSPMSGGGPTPPQMPPSQPGALIPGDPQAMSQPNRGPSPFSPVQLHQLRAQILAYKMLARGQPLPETLQLAVQGKRTLPGLQQQQQQQQQQQQQQQQQQQQQQQPQQQPPQPQTQQQQQPALVNYNRPSGPGPELSGPSTPQKLPVPAPGGRPSPAPPAAAQPPAAAVPGPSVPQPAPGQPSPVLQLQQKQSRISPIQKPQGLDPVEILQEREYRLQARIAHRIQELENLPGSLPPDLRTKATVELKALRLLNFQRQLRQEVVACMRRDTTLETALNSKAYKRSKRQTLREARMTEKLEKQQKIEQERKRRQKHQEYLNSILQHAKDFKEYHRSVAGKIQKLSKAVATWHANTEREQKKETERIEKERMRRLMAEDEEGYRKLIDQKKDRRLAYLLQQTDEYVANLTNLVWEHKQAQAAKEKKKRRRRKKKAEENAEGGESALGPDGEPIDESSQMSDLPVKVTHTETGKVLFGPEAPKASQLDAWLEMNPGYEVAPRSDSEESDSDYEEEDEEEESSRQETEEKILLDPNSEEVSEKDAKQIIETAKQDVDDEYSMQYSARGSQSYYTVAHAISERVEKQSALLINGTLKHYQLQGLEWMVSLYNNNLNGILADEMGLGKTIQTIALITYLMEHKRLNGPYLIIVPLSTLSNWTYEFDKWAPSVVKISYKGTPAMRRSLVPQLRSGKFNVLLTTYEYIIKDKHILAKIRWKYMIVDEGHRMKNHHCKLTQVLNTHYVAPRRILLTGTPLQNKLPELWALLNFLLPTIFKSCSTFEQWFNAPFAMTGERVDLNEEETILIIRRLHKVLRPFLLRRLKKEVESQLPEKVEYVIKCDMSALQKILYRHMQAKGILLTDGSEKDKKGKGGAKTLMNTIMQLRKICNHPYMFQHIEESFAEHLGYSNGVINGAELYRASGKFELLDRILPKLRATNHRVLLFCQMTSLMTIMEDYFAFRNFLYLRLDGTTKSEDRAALLKKFNEPGSQYFIFLLSTRAGGLGLNLQAADTVVIFDSDWNPHQDLQAQDRAHRIGQQNEVRVLRLCTVNSVEEKILAAAKYKLNVDQKVIQAGMFDQKSSSHERRAFLQAILEHEEENEEEDEVPDDETLNQMIARREEEFDLFMRMDMDRRREDARNPKRKPRLMEEDELPSWIIKDDAEVERLTCEEEEEKIFGRGSRQRRDVDYSDALTEKQWLRAIEDGNLEEMEEEVRLKKRKRRRNVDKDPAKEDVEKAKKRRGRPPAEKLSPNPPKLTKQMNAIIDTVINYKDRCNVEKVPSNSQLEIEGNSSGRQLSEVFIQLPSRKELPEYYELIRKPVDFKKIKERIRNHKYRSLGDLEKDVMLLCHNAQTFNLEGSQIYEDSIVLQSVFKSARQKIAKEEESEDESNEEEEEEDEEESESEAKSVKVKIKLNKKDDKGRDKGKGKKRPNRGKAKPVVSDFDSDEEQDEREQSEGSGTDDE

SEQ ID NO: 134823 - protein, 254 aa, Artificial Sequence
  derived and/or modified sequence
MEEEVRLKKRKRRRNVDKDPAKEDVEKAKKRRGRPPAEKLSPNPPKLTKQMNAIIDTVINYKDRCNVEKVPSNSQLEIEGNSSGRQLSEVFIQLPSRKELPEYYELIRKPVDFKKIKERIRNHKYRSLGDLEKDVMLLCHNAQTFNLEGSQIYEDSIVLQSVFKSARQKIAKEEESEDESNEEEEEEDEEESESEAKSVKVKIKLNKKDDKGRDKGKGKKRPNRGKAKPVVSDFDSDEEQDEREQSEGSGTDDE

SEQ ID NO: 134824 - protein, 155 aa, Artificial Sequence
  derived and/or modified sequence
MSTPTDPGAMPHPGPSPGPGPSPGPILGPSPGPGPSPGSVHSMMGPSPGPPSVSHPMPTMGSTDFPQEGMHQMHKPIDGIHDKGIVEDIHCGSMKGTGMRPPHPGMGPPQSPMDQHSQGYMSPHPSPLGAPEHVSSPMSGGGPTPPQMPPSQPGA

SEQ ID NO: 134825 - protein, 171 aa, Artificial Sequence
  derived and/or modified sequence
MEEEVRLKKRKRRRNVDKDPAKEDVEKAKKRRGRPPAEKLSPNPPKLTKQMNAIIDTVINYKDRCNVEKVPSNSQLEIEGNSSGRQLSEVFIQLPSRKELPEYYELIRKPVDFKKIKERIRNHKYRSLGDLEKDVMLLCHNAQTFNLEGSQIYEDSIVLQSVFKSARQKIA

SEQ ID NO: 134826 - protein, 66 aa, Artificial Sequence
  derived and/or modified sequence
MSTPTDPGAMPHPGPSPGPGPSPGPILGPSPGPGPSPGSVHSMMGPSPGPPSVSHPMPTMGSTDFP

SEQ ID NO: 134827 - DNA, 5758 bp, Artificial Sequence
  derived and/or modified sequence
tttctgtactctgggtgactcagagagggaagagattcagccagcacactcctcgcgagcaagcattactctactgactggcagagacaggagaggtagatgtccacgcccacagaccctggtgcgatgccccacccagggccttcgccggggcctgggccttcccctgggccaattcttgggcctagtccaggaccaggaccatccccaggttccgtccacagcatgatggggccaagtcctggacctccaagtgtctcccatcctatgccgacgatggggtccacagacttcccacaggaaggcatgcatcaaatgcataagcccatcgatggtatacatgacaaggggattgtagaagacatccattgtggatccatgaagggcactggtatgcgaccacctcacccaggcatgggccctccccagagtccaatggatcaacacagccaaggttatatgtcaccacacccatctccattaggagccccagagcacgtctccagccctatgtctggaggaggcccaactccacctcagatgccaccaagccagccgggggccctcatcccaggtgatccgcaggccatgagccagcccaacagaggtccctcacctttcagtcctgtccagctgcatcagcttcgagctcagattttagcttataaaatgctggcccgaggccagcccctccccgaaacgctgcagcttgcagtccaggggaaaaggacgttgcctggcttgcagcaacaacagcagcagcaacagcagcagcagcagcagcagcagcagcagcagcagcagcaacagcagccgcagcagcagccgccgcaaccacagacgcagcaacaacagcagccggcccttgttaactacaacagaccatctggcccggggccggagctgagcggcccgagcaccccgcagaagctgccggtgcccgcgcccggcggccggccctcgcccgcgccccccgcagccgcgcagccgcccgcggccgcagtgcccgggccctcagtgccgcagccggccccggggcagccctcgcccgtcctccagctgcagcagaagcagagccgcatcagccccatccagaaaccgcaaggcctggaccccgtggaaattctgcaagagcgggaatacagacttcaggcccgcatagctcataggatacaagaactggaaaatctgcctggctctttgccaccagatttaagaaccaaagcaaccgtggaactaaaagcacttcggttactcaatttccagcgtcagctgagacaggaggtggtggcctgcatgcgcagggacacgaccctggagacggctctcaactccaaagcatacaaacggagcaagcgccagactctgagagaagctcgcatgaccgagaagctggagaagcagcagaagattgagcaggagaggaaacgccgtcagaaacaccaggaatacctgaacagtattttgcaacatgcaaaagattttaaggaatatcatcggtctgtggccggaaagatccagaagctctccaaagcagtggcaacttggcatgccaacactgaaagagagcagaagaaggagacagagcggattgaaaaggagagaatgcggcgactgatggctgaagatgaggagggttatagaaaactgattgatcaaaagaaagacaggcgtttagcttaccttttgcagcagaccgatgagtatgtagccaatctgaccaatctggtttgggagcacaagcaagcccaggcagccaaagagaagaagaagaggaggaggaggaagaagaaggctgaggagaatgcagagggtggggagtctgccctgggaccggatggagagcccatagatgagagcagccagatgagtgacctccctgtcaaagtgactcacacagaaaccggcaaggttctgttcggaccagaagcacccaaagcaagtcagctggacgcctggctggaaatgaatcctggttatgaagttgcccctagatctgacagtgaagagagtgattctgattatgaggaagaggatgaggaagaagagtccagtaggcaggaaaccgaagagaaaatactcctggatccaaatagcgaagaagtttctgagaaggatgctaagcagatcattgagacagctaagcaagacgtggatgatgaatacagcatgcagtacagtgccaggggctcccagtcctactacaccgtggctcatgccatctcggagagggtggagaaacagtctgccctcctaattaatgggaccctaaagcattaccagctccagggcctggaatggatggtttccctgtataataacaacttgaacggaatcttagccgatgaaatggggcttggaaagaccatacagaccattgcactcatcacttatctgatggagcacaaaagactcaatggcccctatctcatcattgttcccctttcgactctatctaactggacatatgaatttgacaaatgggctccttctgtggtgaagatttcttacaagggtactcctgccatgcgtcgctcccttgtcccccagctacggagtggcaaattcaatgtcctcttgactacttatgagtatattataaaagacaagcacattcttgcaaagattcggtggaaatacatgatagtggacgaaggccaccgaatgaagaatcaccactgcaagctgactcaggtcttgaacactcactatgtggcccccagaaggatcctcttgactgggaccccgctgcagaataagctccctgaactctgggccctcctcaacttcctcctcccaacaatttttaagagctgcagcacatttgaacaatggttcaatgctccatttgccatgactggtgaaagggtggacttaaatgaagaagaaactatattgatcatcaggcgtctacataaggtgttaagaccatttttactaaggagactgaagaaagaagttgaatcccagcttcccgaaaaagtggaatatgtgatcaagtgtgacatgtcagctctgcagaagattctgtatcgccatatgcaagccaaggggatccttctcacagatggttctgagaaagataagaaggggaaaggaggtgctaagacacttatgaacactattatgcagttgagaaaaatctgcaaccacccatatatgtttcagcacattgaggaatcctttgctgaacacctaggctattcaaatggggtcatcaatggggctgaactgtatcgggcctcagggaagtttgagctgcttgatcgtattctgccaaaattgagagcgactaatcaccgagtgctgcttttctgccagatgacatctctcatgaccatcatggaggattattttgcttttcggaacttcctttacctacgccttgatggcaccaccaagtctgaagatcgtgctgctttgctgaagaaattcaatgaacctggatcccagtatttcattttcttgctgagcacaagagctggtggcctgggcttaaatcttcaggcagctgatacagtggtcatctttgacagcgactggaatcctcatcaggatctgcaggcccaagaccgagctcaccgcatcgggcagcagaacgaggtccgggtactgaggctctgtaccgtgaacagcgtggaggaaaagatcctcgcggccgcaaaatacaagctgaacgtggatcagaaagtgatccaggcgggcatgtttgaccaaaagtcttcaagccacgagcggagggcattcctgcaggccatcttggagcatgaggaggaaaatgaggaagaagatgaagtaccggacgatgagactctgaaccaaatgattgctcgacgagaagaagaatttgacctttttatgcggatggacatggaccggcggagggaagatgcccggaacccgaaacggaagccccgtttaatggaggaggatgagctgccctcctggatcattaaggatgacgctgaagtagaaaggctcacctgtgaagaagaggaggagaaaatatttgggagggggtcccgccagcgccgtgacgtggactacagtgacgccctcacggagaagcagtggctaagggccatcgaagacggcaatttggaggaaatggaagaggaagtacggcttaagaagcgaaaaagacgaagaaatgtggataaagatcctgcaaaagaagatgtggaaaaagctaagaagagaagaggccgccctcccgctgagaaactgtcaccaaatccccccaaactgacaaagcagatgaacgctatcatcgatactgtgataaactacaaagataggtgtaacgtggagaaggtgcccagtaattctcagttggaaatagaaggaaacagttcagggcgacagctcagtgaagtcttcattcagttaccttcaaggaaagaattaccagaatactatgaattaattaggaagccagtggatttcaaaaaaataaaggaaaggattcgtaatcataagtaccggagcctaggcgacctggagaaggatgtcatgcttctctgtcacaacgctcagacgttcaacctggagggatcccagatctatgaagactccatcgtcttacagtcagtgtttaagagtgcccggcagaaaattgccaaagaggaagagagtgaggatgaaagcaatgaagaggaggaagaggaagatgaagaagagtcagagtccgaggcaaaatcagtcaaggtgaaaattaagctcaataaaaaagatgacaaaggccgggacaaagggaaaggcaagaaaaggccaaatcgaggaaaagccaaacctgtagtgagcgattttgacagcgatgaggagcaggatgaacgtgaacagtcagaaggaagtgggacggatgatgagtgatcagtatggacctttttccttggtagaactgaattccttcctcccctgtctcatttctacccagtgagttcatttgtcatataggcactgggttgtttctatatcatcatcgtctataaactagctttaggatagtgccagacaaacatatgatatcatggtgtaaaaaacacacacatacacaaatatttgtaacatattgtgaccaaatgggcctcaaagattcagattgaaacaaacaaaaagcttttgatggaaaatatgtgggtggatagtatatttctatgggtgggtctaatttggtaacggtttgattgtgcctggttttatcacctgttcagatgagaagatttttgtcttttgtagcactgataaccaggagaagccattaaaagccactggttattttatttttcatcaggcaattttcgaggtttttatttgttcggtattgtttttttacactgtggtacatataagcaactttaataggtgataaatgtacagtagttagatttcacctgcatatacatttttccattttatgctctatgatctgaacaaaagctttttgaattgtataagatttatgtctactgtaaacattgcttaatttttttgctcttgatttaaaaaaaagttttgttgaaagcgctattgaatattgcaatctatatagtgtattggatggcttcttttgtcaccctgatctcctatgttaccaatgtgtatcgtctccttctccctaaagtgtacttaatctttgctttctttgcacaatgtctttggttgcaagtcataagcctgaggcaaataaaattccagtaatttcgaagaatgtggtgttggtgctttcctaataaagaaataatttagcttgacaaaa

SEQ ID NO: 134828 - DNA, 4773 bp, Artificial Sequence
  derived and/or modified sequence
atgagcacccccaccgaccccggcgccatgccccaccccggccccagccccggccccggccccagccccggccccatcctgggccccagccccggccccggccccagccccggcagcgtgcacagcatgatgggccccagccccggcccccccagcgtgagccaccccatgcccaccatgggcagcaccgacttcccccaggagggcatgcaccagatgcacaagcccatcgacggcatccacgacaagggcatcgtggaggacatccactgcggcagcatgaagggcaccggcatgagacccccccaccccggcatgggccccccccagagccccatggaccagcacagccagggctacatgagcccccaccccagccccctgggcgcccccgagcacgtgagcagccccatgagcggcggcggccccacccccccccagatgccccccagccagcccggcgccctgatccccggcgacccccaggccatgagccagcccaacagaggccccagccccttcagccccgtgcagctgcaccagctgagagcccagatcctggcctacaagatgctggccagaggccagcccctgcccgagaccctgcagctggccgtgcagggcaagagaaccctgcccggcctgcagcagcagcagcagcagcagcagcagcagcagcagcagcagcagcagcagcagcagcagcagcagcagccccagcagcagcccccccagccccagacccagcagcagcagcagcccgccctggtgaactacaacagacccagcggccccggccccgagctgagcggccccagcaccccccagaagctgcccgtgcccgcccccggcggcagacccagccccgccccccccgccgccgcccagccccccgccgccgccgtgcccggccccagcgtgccccagcccgcccccggccagcccagccccgtgctgcagctgcagcagaagcagagcagaatcagccccatccagaagccccagggcctggaccccgtggagatcctgcaggagagagagtacagactgcaggccagaatcgcccacagaatccaggagctggagaacctgcccggcagcctgccccccgacctgagaaccaaggccaccgtggagctgaaggccctgagactgctgaacttccagagacagctgagacaggaggtggtggcctgcatgagaagagacaccaccctggagaccgccctgaacagcaaggcctacaagagaagcaagagacagaccctgagagaggccagaatgaccgagaagctggagaagcagcagaagatcgagcaggagagaaagagaagacagaagcaccaggagtacctgaacagcatcctgcagcacgccaaggacttcaaggagtaccacagaagcgtggccggcaagatccagaagctgagcaaggccgtggccacctggcacgccaacaccgagagagagcagaagaaggagaccgagagaatcgagaaggagagaatgagaagactgatggccgaggacgaggagggctacagaaagctgatcgaccagaagaaggacagaagactggcctacctgctgcagcagaccgacgagtacgtggccaacctgaccaacctggtgtgggagcacaagcaggcccaggccgccaaggagaagaagaagagaagaagaagaaagaagaaggccgaggagaacgccgagggcggcgagagcgccctgggccccgacggcgagcccatcgacgagagcagccagatgagcgacctgcccgtgaaggtgacccacaccgagaccggcaaggtgctgttcggccccgaggcccccaaggccagccagctggacgcctggctggagatgaaccccggctacgaggtggcccccagaagcgacagcgaggagagcgacagcgactacgaggaggaggacgaggaggaggagagcagcagacaggagaccgaggagaagatcctgctggaccccaacagcgaggaggtgagcgagaaggacgccaagcagatcatcgagaccgccaagcaggacgtggacgacgagtacagcatgcagtacagcgccagaggcagccagagctactacaccgtggcccacgccatcagcgagagagtggagaagcagagcgccctgctgatcaacggcaccctgaagcactaccagctgcagggcctggagtggatggtgagcctgtacaacaacaacctgaacggcatcctggccgacgagatgggcctgggcaagaccatccagaccatcgccctgatcacctacctgatggagcacaagagactgaacggcccctacctgatcatcgtgcccctgagcaccctgagcaactggacctacgagttcgacaagtgggcccccagcgtggtgaagatcagctacaagggcacccccgccatgagaagaagcctggtgccccagctgagaagcggcaagttcaacgtgctgctgaccacctacgagtacatcatcaaggacaagcacatcctggccaagatcagatggaagtacatgatcgtggacgagggccacagaatgaagaaccaccactgcaagctgacccaggtgctgaacacccactacgtggcccccagaagaatcctgctgaccggcacccccctgcagaacaagctgcccgagctgtgggccctgctgaacttcctgctgcccaccatcttcaagagctgcagcaccttcgagcagtggttcaacgcccccttcgccatgaccggcgagagagtggacctgaacgaggaggagaccatcctgatcatcagaagactgcacaaggtgctgagacccttcctgctgagaagactgaagaaggaggtggagagccagctgcccgagaaggtggagtacgtgatcaagtgcgacatgagcgccctgcagaagatcctgtacagacacatgcaggccaagggcatcctgctgaccgacggcagcgagaaggacaagaagggcaagggcggcgccaagaccctgatgaacaccatcatgcagctgagaaagatctgcaaccacccctacatgttccagcacatcgaggagagcttcgccgagcacctgggctacagcaacggcgtgatcaacggcgccgagctgtacagagccagcggcaagttcgagctgctggacagaatcctgcccaagctgagagccaccaaccacagagtgctgctgttctgccagatgaccagcctgatgaccatcatggaggactacttcgccttcagaaacttcctgtacctgagactggacggcaccaccaagagcgaggacagagccgccctgctgaagaagttcaacgagcccggcagccagtacttcatcttcctgctgagcaccagagccggcggcctgggcctgaacctgcaggccgccgacaccgtggtgatcttcgacagcgactggaacccccaccaggacctgcaggcccaggacagagcccacagaatcggccagcagaacgaggtgagagtgctgagactgtgcaccgtgaacagcgtggaggagaagatcctggccgccgccaagtacaagctgaacgtggaccagaaggtgatccaggccggcatgttcgaccagaagagcagcagccacgagagaagagccttcctgcaggccatcctggagcacgaggaggagaacgaggaggaggacgaggtgcccgacgacgagaccctgaaccagatgatcgccagaagagaggaggagttcgacctgttcatgagaatggacatggacagaagaagagaggacgccagaaaccccaagagaaagcccagactgatggaggaggacgagctgcccagctggatcatcaaggacgacgccgaggtggagagactgacctgcgaggaggaggaggagaagatcttcggcagaggcagcagacagagaagagacgtggactacagcgacgccctgaccgagaagcagtggctgagagccatcgaggacggcaacctggaggagatggaggaggaggtgagactgaagaagagaaagagaagaagaaacgtggacaaggaccccgccaaggaggacgtggagaaggccaagaagagaagaggcagaccccccgccgagaagctgagccccaacccccccaagctgaccaagcagatgaacgccatcatcgacaccgtgatcaactacaaggacagatgcaacgtggagaaggtgcccagcaacagccagctggagatcgagggcaacagcagcggcagacagctgagcgaggtgttcatccagctgcccagcagaaaggagctgcccgagtactacgagctgatcagaaagcccgtggacttcaagaagatcaaggagagaatcagaaaccacaagtacagaagcctgggcgacctggagaaggacgtgatgctgctgtgccacaacgcccagaccttcaacctggagggcagccagatctacgaggacagcatcgtgctgcagagcgtgttcaagagcgccagacagaagatcgccaaggaggaggagagcgaggacgagagcaacgaggaggaggaggaggaggacgaggaggagagcgagagcgaggccaagagcgtgaaggtgaagatcaagctgaacaagaaggacgacaagggcagagacaagggcaagggcaagaagagacccaacagaggcaaggccaagcccgtggtgagcgacttcgacagcgacgaggagcaggacgagagagagcagagcgagggcagcggcaccgacgacgagtag

SEQ ID NO: 134829 - DNA, 765 bp, Artificial Sequence
  derived and/or modified sequence
atggaggaggaggtgagactgaagaagagaaagagaagaagaaacgtggacaaggaccccgccaaggaggacgtggagaaggccaagaagagaagaggcagaccccccgccgagaagctgagccccaacccccccaagctgaccaagcagatgaacgccatcatcgacaccgtgatcaactacaaggacagatgcaacgtggagaaggtgcccagcaacagccagctggagatcgagggcaacagcagcggcagacagctgagcgaggtgttcatccagctgcccagcagaaaggagctgcccgagtactacgagctgatcagaaagcccgtggacttcaagaagatcaaggagagaatcagaaaccacaagtacagaagcctgggcgacctggagaaggacgtgatgctgctgtgccacaacgcccagaccttcaacctggagggcagccagatctacgaggacagcatcgtgctgcagagcgtgttcaagagcgccagacagaagatcgccaaggaggaggagagcgaggacgagagcaacgaggaggaggaggaggaggacgaggaggagagcgagagcgaggccaagagcgtgaaggtgaagatcaagctgaacaagaaggacgacaagggcagagacaagggcaagggcaagaagagacccaacagaggcaaggccaagcccgtggtgagcgacttcgacagcgacgaggagcaggacgagagagagcagagcgagggcagcggcaccgacgacgagtag

SEQ ID NO: 134830 - DNA, 516 bp, Artificial Sequence
  derived and/or modified sequence
atggaggaggaggtgagactgaagaagagaaagagaagaagaaacgtggacaaggaccccgccaaggaggacgtggagaaggccaagaagagaagaggcagaccccccgccgagaagctgagccccaacccccccaagctgaccaagcagatgaacgccatcatcgacaccgtgatcaactacaaggacagatgcaacgtggagaaggtgcccagcaacagccagctggagatcgagggcaacagcagcggcagacagctgagcgaggtgttcatccagctgcccagcagaaaggagctgcccgagtactacgagctgatcagaaagcccgtggacttcaagaagatcaaggagagaatcagaaaccacaagtacagaagcctgggcgacctggagaaggacgtgatgctgctgtgccacaacgcccagaccttcaacctggagggcagccagatctacgaggacagcatcgtgctgcagagcgtgttcaagagcgccagacagaagatcgcctag

SEQ ID NO: 134831 - DNA, 4773 bp, Artificial Sequence
  derived and/or modified sequence
atgagcacacccacagaccctggagctatgccacatccaggaccctctcccggtccagggccgtcccccgggcccatcttgggaccctccccaggccccggcccctcccctggcagcgtgcattctatgatgggaccttcccccggccccccctccgtatctcaccccatgcctactatgggatctacagatttcccacaagaaggcatgcaccagatgcacaaacctattgatggcatccacgacaagggcatcgttgaggacatacattgcggttcaatgaagggcaccggcatgaggccacctcatcccgggatgggaccaccccagtccccaatggaccagcacagccagggctacatgtcgccccatccgtcccccttgggcgctcctgagcacgtgagttcaccgatgagcggcggaggaccaactcccccccagatgcccccaagccagcctggggctctgattccaggggacccacaggcgatgtctcaacccaatagaggtccgtccccattttctcccgtgcagctgcaccagctgagagcacaaatactcgcttacaagatgttagcccgtggacagcccctcccggagacacttcaactcgcggtgcaggggaagaggacactccccggacttcagcaacagcagcagcagcagcagcagcagcagcagcagcagcagcaacagcagcagcagcaacaacaaccccaacagcaaccaccccagccccagacacaacagcagcagcagcctgccctggtaaactacaatcgcccctctggccctgggcctgagctcagcggtcccagcaccccacagaaactgccagtgcccgcacccggcgggcggccctcccccgcccccccagctgcagcccagcctcctgctgcagctgtgcccggcccctctgtgccacagccggctcctggacagccaagtccggtgctgcagctgcaacagaagcagtcacggatttctccgatccagaagcctcagggtcttgaccccgtggaaatcctccaagaacgcgaatataggctgcaagccaggatagctcacaggatccaggagctcgagaaccttcccggatcacttcctccagatctcagaaccaaggctaccgtagagctgaaagctttgagacttttgaatttccagagacagctccgtcaggaggtggtcgcctgcatgagaagagacactacactcgagacggccctaaacagcaaggcttacaagcgatccaaacgccagaccctcagagaagcacgaatgaccgagaaattggagaaacagcaaaagattgagcaggagcgaaaaagacgacagaaacaccaggagtatctgaacagtatacttcagcatgcgaaagattttaaggaataccataggagtgtagccgggaagattcagaagctgagcaaggcggtggcgacttggcatgctaatacggaacgtgagcaaaagaaggagaccgaaaggatcgagaaggagagaatgaggaggttgatggccgaagacgaggaggggtataggaagcttatcgaccagaagaaagacaggcgactcgcctatttactgcaacagacagacgaatacgtggccaatctgactaacctcgtgtgggagcacaagcaggcgcaggctgcgaaggaaaagaaaaagaggagacgtcgaaaaaaaaaagcagaggagaacgccgagggtggcgagtctgctctggggccggatggcgagcccattgatgaaagcagccagatgtcagacctgcccgttaaggtgactcatacagagaccggtaaggtgctgttcggtcccgaagcccccaaggcctcacagttggacgcttggctggagatgaaccccggctacgaggtggctcccagaagcgactcagaagagtccgatagcgactacgaggaagaagatgaagaggaggagtctagccgtcaagagacagaggaaaagatcctgcttgaccccaattccgaggaggtgtcagagaaggacgctaagcaaataatagaaacagcaaagcaagacgtagacgatgagtatagtatgcagtactctgccagaggatcccagtcctactataccgtggcccatgccatttctgaacgtgtggagaaacagtccgctcttctgatcaacggaacactgaaacattatcagctccagggcctggaatggatggtgagcctatataataacaatctgaacggaattctcgctgatgagatggggttaggcaagactattcagacaattgcactgattacctatctcatggagcacaagaggctcaatggaccctatttgattatcgtcccgctctcaacgctgtctaactggacttatgagttcgataagtgggctcccagtgttgtcaagatcagctacaagggcaccccagccatgcgaagaagccttgtgcctcagctgagaagtgggaagttcaacgtgttgcttacaacttatgagtatattattaaggacaagcatatcttggccaaaatacggtggaaatacatgattgtagacgaagggcacaggatgaaaaatcatcattgtaaactgactcaggtcctcaacacccactacgtcgctccccggagaattctgcttactggtacgcccctgcagaataaactccctgaactttgggccctgctgaacttcctccttcccactatctttaagagctgctcaacatttgagcagtggttcaacgcacctttcgcgatgaccggcgagcgggttgacctgaacgaggaagaaaccattttgataatccgccggctacacaaggtgctacggccgttcctcctcaggaggctcaagaaggaggtggaaagtcagctgccagaaaaggtggaatacgtgattaagtgtgatatgtcagcactgcagaagattctgtatcggcacatgcaggcaaagggaatccttctcacagatggctccgaaaaagataagaaagggaaggggggagctaagacactgatgaataccatcatgcaattaagaaaaatctgtaaccacccctacatgttccagcacatagaggagagcttcgcggagcatctcgggtattcaaatggagttatcaatggggccgaattatatagagccagcggaaagtttgaattgttagaccgcatcctgccaaaactcagggctacaaaccaccgcgttctattgttctgtcagatgactagcctgatgactatcatggaagattatttcgcattccgaaatttcttgtacctcagactggacggcaccacgaaatctgaggatagggcagctctgctcaagaaatttaatgagccagggtctcagtacttcattttcctcctaagcactcgcgcagggggtctgggcctgaacctacaggccgctgacactgtagtaatatttgattccgattggaacccgcaccaagacctccaggcgcaggaccgcgcccaccggatcggccagcagaacgaagtacgagtgctgcgtctgtgcacagtgaatagtgtggaagagaaaattctcgccgctgccaagtataagttgaacgtcgaccaaaaggtgatccaggcggggatgttcgaccagaaaagcagctcacacgagcgtagagctttcctccaggccattcttgagcatgaggaagagaatgaagaggaagatgaagtgcccgatgatgaaacgcttaatcagatgatagcccgtagggaagaagagttcgatctgttcatgaggatggatatggatcgaaggcgggaggacgctaggaatcccaagcgaaaaccacgactgatggaggaggacgagttaccatcatggattataaaggatgatgccgaggtcgagcgcctgacctgcgaagaagaggaggagaaaatctttgggcgggggtcccgacagcgtcgagatgtagactacagcgacgcactgacagagaagcagtggctccgggcaattgaagatgggaacctggaagagatggaggaggaagtgaggttaaagaagagaaaacgcaggagaaatgtcgataaggatcctgcgaaagaggatgtggagaaggctaagaaacgccgtggtcgaccgcctgccgaaaagctttcccccaatccacccaagcttacaaagcagatgaacgccattattgacaccgtgataaattacaaagaccggtgcaatgtggagaaggttcccagtaattcgcagctggagatagagggaaacagtagtgggagacagctcagtgaagtgttcatccaacttcctagcagaaaggaactgccggaatattatgaactcatccgcaagccggtagatttcaagaagatcaaggagcggatcagaaatcataagtacaggtccctcggcgatctcgagaaagacgtgatgcttctgtgccataatgcacagacatttaatctagaagggagccagatttacgaagattccatcgttctgcagtctgttttcaaaagtgcccgtcagaagatcgctaaggaggaagaaagcgaagacgaatccaacgaagaggaagaggaggaggacgaagaagaatctgagtcggaggccaagagcgttaaggtgaaaatcaagctgaataagaaagatgacaaaggacgcgataaaggcaagggcaagaagcgccccaatcgcggcaaagccaaaccggtggtctcagactttgacagcgacgaagagcaagatgagagggagcaatctgaaggttctggaactgatgacgaatag

SEQ ID NO: 134832 - DNA, 765 bp, Artificial Sequence
  derived and/or modified sequence
atggaggaagaagtcaggctgaagaagagaaagcgcagacgtaacgtggacaaggacccggctaaagaggacgtggaaaaagccaaaaagcggcgcggacggccacctgctgagaagctcagccccaaccctcccaagctgacaaagcagatgaacgcgatcattgacactgtgataaactacaaagaccgatgtaatgtggagaaggtaccgtccaatagtcagctggagattgagggtaactcatccgggcgacaactgagcgaggtttttatccaattaccttccagaaaggagctgcccgagtactacgaactgatcagaaagccggtcgacttcaagaagatcaaggaaaggatccgaaaccataagtaccgctccttgggcgaccttgaaaaggacgtaatgctcttgtgtcataatgcacagaccttcaacctcgaaggatcacaaatttacgaggattcgatagttctacagagtgtcttcaaatctgcacgccagaaaattgctaaagaggaagagagtgaagatgaatccaatgaagaagaagaagaggaggacgaggaggagagtgagtccgaggcaaagagtgttaaggtgaagatcaaactgaataaaaaggatgacaaagggcgagataagggaaagggaaagaaaaggccaaacaggggcaaagcaaagccagtcgtgagtgactttgattccgatgaagagcaggatgagagagagcaaagtgaaggctccgggaccgacgatgaatag

SEQ ID NO: 134833 - DNA, 4773 bp, Artificial Sequence
  derived and/or modified sequence
atgagtacccccactgacccgggcgcgatgcctcaccctggaccttccccaggccccggcccgtcacccgggccaattctgggcccttcaccaggacctggaccgagcccaggctcagtacactccatgatgggaccatccccaggtccaccttctgtcagtcatccgatgcctacaatgggtagcacggactttccccaggaagggatgcatcaaatgcacaagccgatagatggtattcatgacaagggaatagtggaagatattcactgtggctccatgaaaggcactgggatgcgcccccctcacccgggtatgggcccccctcagtcacccatggatcaacacagtcaaggttacatgtccccccacccttcaccactgggcgcccccgagcacgtgtcgtctccaatgtctggtggaggccctacaccccctcaaatgccgccctcacaacctggcgcactgatccctggcgaccctcaggccatgagccaaccgaaccgcgggccatctcctttcagtcccgttcagctccaccaactgagagcccaaatcctggcttataaaatgcttgctcgtggccagccactccctgaaactttacaactggccgttcagggcaagagaaccttgcccggacttcaacagcaacagcaacagcaacagcagcagcagcagcagcagcaacagcaacagcaacagcagcagcaaccccagcagcaaccgccccaacctcagacccagcagcagcagcaacccgctctggtgaactacaatcgaccatcaggtcctggtcctgagctctccggaccatctactcctcagaagttaccggttccagcccccgggggaaggcctagccctgccccccccgccgctgcgcaaccccccgcagctgccgttccaggaccctcagtaccacagcccgccccgggtcagcccagcccggtgctccagctgcaacagaaacagtcaaggataagtcccattcaaaaaccccagggcttagatcccgttgagattctccaagaaagagaatatagactgcaagcccgaatcgcccaccggattcaagagcttgagaacttgcccggcagtctccccccggacctgcggacaaaagcgacagtggaactgaaggcacttcggctgctcaactttcagaggcagctcaggcaggaggtggtggcttgcatgagaagagatacaaccctagagaccgctcttaacagcaaagcatacaaacgctctaagcggcagacactgagggaggcaagaatgactgagaaactggaaaaacagcagaagattgaacaagaaaggaaaagaagacagaagcaccaggagtacttaaacagcattctgcagcatgccaaggatttcaaagaatatcataggtctgtggcgggaaagattcagaagcttagcaaagcagtcgctacatggcacgctaacactgagcgagagcagaaaaaggaaacagagcgaatcgagaaagaacgaatgcgacggttgatggctgaagacgaagaggggtaccgcaaactgatagaccaaaaaaaggatagacgcttagcatatctcctgcagcagaccgatgagtacgtggcaaatctcacaaatttggtgtgggaacacaagcaagcgcaggccgccaaggaaaagaagaagagacggcggcggaaaaaaaaagctgaggaaaacgccgagggaggagagtctgccctgggacctgatggcgagcccattgatgaaagtagccagatgtctgatctcccagtcaaagtcacacataccgagacggggaaggtgctgttcgggccagaagccccaaaggcctcacagctggacgcttggttagagatgaaccccggttatgaggtggcacctagatcggattcggaagaaagtgattccgattacgaggaggaggatgaggaggaggagtcatccagacaagaaactgaagagaaaattctgctggatcctaatagcgaggaagtgtccgaaaaggacgccaaacagatcattgagaccgctaaacaggacgtcgacgacgaatacagcatgcaatacagcgcccggggttctcaatcttactacaccgttgcccacgctatctctgaaagagtggagaaacagagtgctctgctcattaacggcaccctgaagcactaccaactccaaggactggaatggatggtttcactctacaacaacaatctgaacgggatcctggctgacgaaatggggctcggaaaaaccattcaaactattgccttgattacctacctgatggaacataagaggctcaatggcccatatctgatcatcgttccattgtctaccctgagcaactggacgtatgagttcgacaagtgggccccatctgtcgtgaagatttcatacaagggcacccctgccatgcggcggagtcttgtaccgcagctgagatccggcaagttcaatgtcctgctgaccacctacgagtatatcatcaaagacaaacacatattagctaaaataagatggaagtacatgatcgttgatgaaggacatcgcatgaagaaccaccattgtaagctcacgcaggtcctcaatacacactacgtagccccgagacggattttactcacgggcacccccctgcagaacaaactgccagaactgtgggctctgctgaatttcctgttgcccaccatctttaagtcatgcagtacattcgagcagtggttcaatgctccattcgctatgaccggggaacgggttgacttaaatgaggaagaaacaattcttattattcgaaggctccacaaggtgctccggccttttctgcttagacgactcaagaaagaggtggagtcgcagctgcctgagaaagtggagtatgtaatcaaatgcgatatgtctgcgctgcagaagatcctttatcgtcatatgcaggctaaggggatcctgttaacagatggtagcgagaaggacaagaaaggcaaaggaggggcaaagactcttatgaacactatcatgcagctgcgtaaaatctgcaaccacccgtatatgttccagcacatagaagagtcattcgccgaacacctgggctactctaacggggtaattaacggcgcagagctatatcgcgcatcaggtaaattcgaattgctggaccggattttgccaaaattgagggccaccaatcacagggtactgctcttttgtcagatgacctccctgatgaccatcatggaggattactttgcgttccgaaattttctttatctccggctcgatggtacaacaaagtccgaagatagagcagccttgctcaagaagtttaatgaaccaggctcccagtatttcatattccttctgtctaccagggcaggcggactaggattaaatctgcaggctgcggataccgtcgttatattcgactctgactggaaccctcatcaggatctgcaggcacaagatagagcccatcgcattggacagcagaacgaggtgagggtgcttcgattgtgtacagtgaattccgtagaggagaagatccttgctgccgcaaaatacaagttgaacgtagaccaaaaagtgatacaggccggcatgtttgatcagaagtctagctcccacgaaagaagagcgttcctgcaggctatcttggagcatgaagaagagaacgaggaggaggatgaggtaccagacgacgaaacactgaatcaaatgatcgcccgcagagaggaggagtttgatctgttcatgcggatggacatggaccgccgcagagaagacgctcgcaaccccaaacggaagccccgactgatggaggaagatgaattaccttcctggattattaaggacgatgcagaggtggaacgcctgacatgcgaggaagaggaagaaaaaatctttggccgagggtccagacagaggcgagatgtggactattccgatgcccttacggaaaaacagtggcttcgggcgattgaagacggaaacctggaagagatggaagaggaagttcgccttaaaaagcgtaaacgcaggagaaacgtcgataaagatccagccaaggaagatgttgagaaggctaagaagaggcggggacgccctcccgccgagaaactgtcacctaacccccctaaattgacaaaacagatgaatgcgattatcgacacagttatcaattacaaggaccgatgcaatgttgagaaggtgcctagtaatagtcagctggaaatagaaggaaattctagcgggaggcagctgagtgaggtgtttatccagttgccgtccagaaaggagctgcccgaatactacgagctcatcagaaagccagttgattttaagaagatcaaggaacgtatcaggaaccacaagtaccgttctctcggagaccttgaaaaagatgtcatgctgctgtgccataatgctcagacctttaaccttgaggggagccagatatacgaagacagtatcgtgctgcagagcgtattcaagagcgccagacaaaagatcgccaaggaggaggaatccgaggacgaatcgaatgaagaagaagaggaagaagacgaagaagagagcgagtctgaagctaaatccgtgaaggttaagattaagctgaacaaaaaggatgacaagggacgcgataaaggaaaggggaagaagcgcccaaatagggggaaggcaaagcctgtggtgtccgattttgacagtgatgaggagcaggacgaacgggagcagtcggaggggagcggtaccgatgacgaatag

SEQ ID NO: 134834 - DNA, 516 bp, Artificial Sequence
  derived and/or modified sequence
atggaggaagaagttcgacttaagaaaaggaaaagaaggagaaacgtcgataaagaccctgctaaagaagacgtggaaaaagccaaaaagcggcggggccgcccaccagctgagaaactcagcccaaatccacctaagctcactaaacagatgaacgccatcatagatacagtaataaactacaaggatcggtgtaatgtcgagaaagtcccttctaactctcaactcgaaattgaggggaactcgagcgggagacagttgagcgaggtgttcatacagcttccaagtcgaaaggagcttcctgagtactatgaacttattagaaagcccgtggatttcaagaaaatcaaggaacggattagaaatcataaatatcggtccttgggcgacctggagaaggacgtcatgctgctgtgtcataacgctcagactttcaatctggaaggcagccaaatctacgaggacagcattgtgctgcagtccgtctttaagtccgcccggcaaaaaattgcatag

SEQ ID NO: 134835 - DNA, 4773 bp, Artificial Sequence
  derived and/or modified sequence
atgagcacccccacagatcctggggccatgccccaccctggccccagccctggccctggccccagccctggccccatcctgggccccagccctggccctggccccagccctggctctgtgcacagcatgatgggccccagccctggcccccccagcgtgagccaccccatgcccaccatgggcagcacagacttcccccaggagggcatgcaccagatgcacaagcccattgatggcatccatgacaagggcatcgtggaggacatccactgcggctccatgaagggcaccggcatgaggcctccccaccctggcatgggccccccccagagccccatggaccagcacagccagggctacatgagcccccaccccagccccctgggcgcccctgagcacgtgagcagccccatgtctgggggcggccccaccccaccccagatgccacccagccagcccggggccctgatccctggggacccccaggccatgagccagcccaacagaggccccagccccttcagccctgtgcagctgcaccagctgcgggcccagatcctggcctacaagatgctggcccggggccagcccctgcctgagaccctgcagctggccgtgcagggcaagaggaccctgcccggcctgcagcagcagcagcagcagcagcagcagcagcagcagcagcagcagcagcagcagcagcagcagcagcagccccagcagcagcccccccagccccagacccagcagcagcagcagcctgccctggtgaactacaaccggcccagcggccctggccctgagctgagcggccccagcaccccccagaagctgcctgtgcctgcccctgggggccggcccagccctgcccctcctgctgctgcccagcccccagctgctgctgtgcccggccccagcgtgccccagcctgcccctggccagcccagccctgtgctgcagctgcagcagaagcagagccgcatcagccccatccagaagccccagggcctggaccctgtggagatcctgcaggagcgggagtaccgcctgcaggcccgcatcgcccaccgcatccaggagctggagaacctgcccggcagcctgcccccagacctgcggaccaaggccaccgtggagctgaaggccctgcggctgctgaacttccagaggcagctgcggcaggaggtggtggcctgcatgagaagagacaccaccctggagacagccctgaacagcaaggcctacaagaggagcaagaggcagaccctgcgggaggccaggatgacagagaagctggagaagcagcagaagattgagcaggagaggaagaggcggcagaagcaccaggagtacctgaacagcatcctgcagcacgccaaggacttcaaggagtaccacaggtctgtggccggcaagatccagaagctgagcaaggctgtggccacctggcacgccaacacagagcgggagcagaagaaggagacagagcgcatcgagaaggagaggatgaggcggctgatggctgaagatgaggagggctacaggaagctgattgaccagaagaaggaccggcggctggcctacctgctgcagcagacagatgaatatgtggccaacctgaccaacctggtgtgggagcacaagcaggcccaggccgccaaggagaagaagaagagaagaagaaggaagaagaaggccgaggagaatgctgagggcggggagagcgccctgggcccagatggagagcccattgatgagagcagccagatgtctgacctgcctgtgaaggtgacccacacagagaccgggaaggtgctgtttggacctgaggcccccaaggccagccagctggatgcctggctggagatgaaccctggctatgaggtggcccccaggagtgacagcgaggagagtgacagcgactatgaggaggaggatgaggaggaggagagcagccggcaggagacagaggagaagatcctgctggaccccaacagcgaggaggtgtctgagaaggatgccaagcagatcatcgagacagccaagcaggatgtggatgatgagtacagcatgcagtacagcgcccggggcagccagagctactacacagtggcccacgccatcagcgagcgggtggagaagcagagcgccctgctgatcaatggcaccctgaagcactaccagctgcagggcctggagtggatggtgtccctgtacaacaacaacctgaatggcatcctggctgatgagatgggcctgggcaagaccatccagaccatcgccctgatcacctacctgatggagcacaagaggctgaatggcccctacctgatcatcgtgcccctgagcaccctgagcaactggacctatgaatttgacaagtgggcccccagcgtggtgaagatctcctacaagggcaccccagccatgagaagaagcctggtgccccagctgcggagcggcaagttcaacgtgctgctgaccacctatgagtacatcatcaaggacaagcacatcctggccaagatccgctggaagtacatgattgtggatgagggccacaggatgaagaaccaccactgcaagctgacccaggtgctgaacacccactacgtggccccccggcgcatcctgctgaccggcacccccctgcagaacaagctgcctgagctgtgggccctgctgaacttcctgctgcccaccatcttcaagagctgcagcacctttgagcagtggttcaatgccccctttgccatgaccggggagcgggtggacctgaatgaggaggagaccatcctgatcatccggcggctgcacaaggtgctgcggcccttcctgctgcggcggctgaagaaggaggtggagagccagctgcctgagaaggtggagtatgtgatcaagtgtgacatgtctgccctgcagaagatcctgtaccgccacatgcaggccaagggcatcctgctgacagatggcagcgagaaggacaagaagggcaaaggaggagccaagaccctgatgaacaccatcatgcagctgaggaagatctgcaaccacccctacatgttccagcacatcgaggagagctttgctgagcacctgggctacagcaatggagtcatcaatggagctgagctgtaccgggccagcggcaagtttgagctgctggaccgcatcctgcccaagctgcgggccaccaaccaccgggtgctgctcttctgccagatgaccagcctgatgaccatcatggaggactactttgccttcaggaacttcctgtacctgcggctggatggcaccaccaagtcagaagatcgggccgccctgctgaagaagttcaatgaacctggcagccagtacttcatcttcctgctgagcacccgggccggcggcctgggcctgaacctgcaggccgctgacacagtggtgatctttgacagcgactggaacccccaccaggacctgcaggcccaggaccgggcccacagaattggccagcagaatgaggtgcgggtgctgcggctgtgcaccgtgaacagcgtggaggagaagatcctggccgccgccaagtacaagctgaatgtggaccagaaggtgatccaggccggcatgtttgaccagaagagcagcagccatgaaagaagagccttcctgcaggccatcctggagcacgaggaggagaatgaggaggaggatgaggtgcctgatgatgagaccctgaaccagatgattgcccggcgggaggaggagtttgacctcttcatgaggatggacatggacagaagaagagaagatgccaggaaccccaagaggaagccccggctgatggaggaggatgagctgcccagctggatcatcaaggatgatgctgaggtggagcggctgacctgtgaggaggaggaggagaagatcttcggccggggcagccggcagaggagagatgtggactacagtgatgccctgacagagaagcagtggctgcgggccattgaagatggcaacctggaggagatggaggaggaggtgcggctgaagaagaggaagagaagaagaaatgtggacaaggaccctgccaaggaggatgtggagaaggccaagaagagaagaggccggcccccagctgagaagctgagccccaacccccccaagctgaccaagcagatgaatgccatcatcgacaccgtcatcaactacaaggaccgctgcaatgtggagaaggtgcccagcaacagccagctggagattgagggcaacagcagcggccggcagctgtctgaggtgttcatccagctgcccagcaggaaggagctgcctgagtactatgagctgatcaggaagcctgtggacttcaagaagatcaaggagcgcatccggaaccacaagtaccgcagcctgggggacctggagaaggatgtgatgctgctgtgccacaatgcccagaccttcaacctggagggcagccagatctatgaggacagcatcgtgctgcagagcgtcttcaagagcgcccggcagaagatcgccaaggaggaggagagtgaagatgagagcaatgaggaggaggaggaggaggatgaggaggagagcgagagcgaggccaagtctgtgaaggtgaagatcaagctgaacaagaaggatgacaagggccgggacaagggcaagggcaagaagaggcccaacagaggcaaggccaagcctgtggtgtctgactttgacagtgatgaggagcaggatgagcgggagcagagcgagggcagcggcacagatgatgaatag

SEQ ID NO: 134836 - DNA, 765 bp, Artificial Sequence
  derived and/or modified sequence
atggaggaggaggtgcggctgaagaagaggaagagaagaagaaatgtggacaaggaccctgccaaggaggatgtggagaaggccaagaagagaagaggccggcccccagctgagaagctgagccccaacccccccaagctgaccaagcagatgaatgccatcatcgacaccgtcatcaactacaaggaccgctgcaatgtggagaaggtgcccagcaacagccagctggagattgagggcaacagcagcggccggcagctgtctgaggtgttcatccagctgcccagcaggaaggagctgcctgagtactatgagctgatcaggaagcctgtggacttcaagaagatcaaggagcgcatccggaaccacaagtaccgcagcctgggggacctggagaaggatgtgatgctgctgtgccacaatgcccagaccttcaacctggagggcagccagatctatgaggacagcatcgtgctgcagagcgtcttcaagagcgcccggcagaagatcgccaaggaggaggagagtgaagatgagagcaatgaggaggaggaggaggaggatgaggaggagagcgagagcgaggccaagtctgtgaaggtgaagatcaagctgaacaagaaggatgacaagggccgggacaagggcaagggcaagaagaggcccaacagaggcaaggccaagcctgtggtgtctgactttgacagtgatgaggagcaggatgagcgggagcagagcgagggcagcggcacagatgatgaatag

SEQ ID NO: 134837 - DNA, 516 bp, Artificial Sequence
  derived and/or modified sequence
atggaggaggaggtgcggctgaagaagaggaagagaagaagaaatgtggacaaggaccctgccaaggaggatgtggagaaggccaagaagagaagaggccggcccccagctgagaagctgagccccaacccccccaagctgaccaagcagatgaatgccatcatcgacaccgtcatcaactacaaggaccgctgcaatgtggagaaggtgcccagcaacagccagctggagattgagggcaacagcagcggccggcagctgtctgaggtgttcatccagctgcccagcaggaaggagctgcctgagtactatgagctgatcaggaagcctgtggacttcaagaagatcaaggagcgcatccggaaccacaagtaccgcagcctgggggacctggagaaggatgtgatgctgctgtgccacaatgcccagaccttcaacctggagggcagccagatctatgaggacagcatcgtgctgcagagcgtcttcaagagcgcccggcagaagatcgcctag

SEQ ID NO: 134838 - DNA, 4773 bp, Artificial Sequence
  derived and/or modified sequence
atgagcacccccaccgaccccggcgccatgccccaccccggcccctctcccggccctggcccgtctcccggacctatccttggaccgagcccaggcccggggccatcccctggcagtgtccatagcatgatgggccccagtcccggacccccgtcggtttcacatcctatgccaactatgggttcaaccgacttcccacaggagggtatgcatcagatgcacaagcccattgatgggattcatgataagggcattgtcgaggatattcactgcgggtccatgaaaggcactggtatgcggcccccccacccagggatggggcctcctcaaagtcctatggaccaacactcccagggctacatgagccctcatccgtcgcctctgggggccccagagcacgtgagcagcccgatgtcaggcgggggtcctaccccgcctcaaatgccacctagtcagcctggggcattgattcccggcgatccccaagctatgtcccagcctaacaggggcccgtctcccttcagtcctgtccagctgcatcagcttcgagctcagatcctcgcctacaaaatgctggctaggggtcagccacttcccgagacactgcagctggcggtacagggaaagcgtaccctcccagggttacagcagcagcagcaacagcaacaacaacagcagcagcagcagcaacagcagcagcagcagcagcaacagcctcagcagcaaccccctcagcctcagacccaacagcaacaacagccagctctggtgaactataatcggcctagcggacctggacctgaactctctgggcctagtacaccccagaaacttccagtgcctgccccaggagggaggcctagtcctgccccaccggccgctgcgcagccccctgccgccgcggtaccgggtccatcagtgccgcagcctgctccagggcaaccgagccccgtgctccaactgcaacagaagcagtctcggataagccccatccagaagccccagggactcgatcctgttgaaatcttacaggagagggagtataggctgcaggcaaggatagcgcacagaatccaggagttagaaaatctccccggtagcctaccaccagacttaaggacaaaagcaacggttgaattaaaagcgctcaggcttctaaatttccaacggcagctgcgacaggaagttgtcgcctgcatgagaagagacactactctggaaacggctctgaattcaaaggcctacaagaggagtaagcggcagaccctcagggaggctcgtatgaccgagaagctcgagaagcagcagaagattgaacaggaacgaaagagaagacagaagcaccaggagtacttgaacagcattctgcagcatgcaaaagattttaaggaataccacaggtctgtcgccggcaaaattcaaaagttaagtaaggccgtggcaacttggcatgctaacactgaaagggaacagaaaaaggagaccgagagaattgagaaggaacggatgaggcgccttatggccgaggatgaagagggctacaggaaactgatagaccaaaagaaagaccgccggctggcttatctcctgcaacagaccgacgagtacgtcgctaatttaaccaatcttgtttgggagcacaaacaggcccaggcagcaaaagaaaaaaagaagcggcgcaggcggaaaaagaaggcagaggaaaacgccgaggggggagaatccgcccttggaccagacggcgagcccattgacgaatcaagccagatgtcagatcttccagtcaaagtgacacataccgaaacaggaaaggtgctttttgggcccgaggcgccaaaggcttctcaattagacgcctggctcgagatgaatcccggatatgaagtcgcgcctcggtccgattctgaggaatcggactctgactatgaggaagaagacgaagaagaggagagctcaaggcaggagacggaagagaaaatcctcttggatcctaacagtgaggaggtatcagaaaaggatgccaaacaaatcatcgaaaccgccaagcaagacgtggatgacgaatactcaatgcagtattccgcccgcggatcacaaagctactacaccgtggcacacgctatttccgaacgggtcgagaaacagagcgctctcctgattaacgggacactgaaacattatcaactccaggggctcgaatggatggtcagcctatacaacaataacctgaacggcatcctcgccgacgaaatggggctcggaaaaactatccagacgatcgctttgatcacgtatctgatggaacataaaagacttaatggaccctacttaatcattgtccctctgagcacactttcaaattggacttacgagttcgacaagtgggctcctagcgtggtgaaaatttcttacaagggcacccccgccatgcgccgatccctggttccacaactcagatccggaaaattcaatgtgctcctgactacttatgagtacattataaaggacaaacacattctggccaagattagatggaagtatatgatagtggacgaagggcacaggatgaagaaccatcactgtaagctcacccaggtgctgaatacacattacgtcgcgccgcgccgtattctgctgacgggaaccccacttcagaataaactccccgagttatgggccttgctcaattttctgcttcctacaatttttaagagctgttcaacttttgagcagtggttcaacgccccattcgcaatgacaggggagcgcgtggacctcaacgaggaagaaacaattctcataattcgccggctgcataaggtgctgagacctttcctgctccgacggcttaaaaaggaagtggagtcccagcttcccgagaaagtggagtacgttattaagtgcgatatgtctgccttgcaaaagattctgtatcggcacatgcaggcaaagggcatactgctaactgacggcagcgaaaaggacaaaaagggaaaagggggcgctaaaacgttgatgaatactatcatgcagctgaggaaaatctgtaaccacccgtacatgttccagcatatcgaggaatccttcgccgagcaccttggatactccaatggagtgatcaatggggcagagctctaccgggcctctggcaaattcgaactgctcgacaggattctgcccaagttgagagcaacaaatcaccgcgtgctgctgttttgtcaaatgaccagcctgatgactatcatggaggactacttcgccttcaggaacttcctgtatctgagactggacggcactaccaagtccgaagatcgtgcggctctgctgaaaaagtttaacgaacctggcagccagtacttcatcttcctgctttctactagggctgggggcctaggactgaatttacaagctgccgacacagtggtaatatttgattccgattggaatccacatcaggacctgcaggcccaggacagggcccatcgaataggtcagcagaacgaggtacgcgttctgcggctgtgtaccgtaaattcagtggaggagaaaatcctagccgccgcgaagtataagctgaacgtcgatcagaaagtgattcaggcgggaatgttcgatcagaagtccagtagtcacgaaagacgagcgttcctgcaggctatcttggaacatgaggaggagaacgaagaagaggacgaggttcctgacgatgaaactttgaatcaaatgatcgcacggcgggaagaagagtttgatctctttatgaggatggatatggatagaaggagagaggacgcccggaacccaaaacgaaagcccaggctgatggaagaagacgagcttccttcatggattattaaagacgatgccgaggtggagcgtctgacatgcgaggaagaggaggagaaaatttttggcagaggatccaggcagagacgcgacgtcgactactctgatgccctcacggagaagcagtggctgcgcgcaatcgaagacggaaaccttgaagagatggaggaagaggtgcgcctcaaaaaacgcaagcgcaggaggaacgtggataaggatcccgcaaaagaggatgttgagaaggctaagaagaggaggggccgcccaccagcggagaagttaagccctaacccccccaagctgactaaacagatgaacgccattattgataccgtcataaactataaggatcggtgtaacgtggaaaaagtaccgtctaatagccagctggagatcgaaggcaacagttcgggaaggcagttgtctgaagtatttattcagctaccaagccgtaaagagttgccagaatactacgaactaatccggaagcctgtggatttcaaaaagattaaagaacgcattcgcaaccacaagtacagaagtttgggggatctcgaaaaagatgtgatgctgctgtgtcacaatgcccagacattcaacttagagggatcgcaaatctatgaggacagcatcgtgctgcaaagtgtatttaagagcgcccggcagaagatcgccaaggaagaggaatccgaagatgaaagcaatgaagaggaggaggaagaggatgaagaggagtccgaatcggaagcaaaatctgtgaaggttaaaatcaaattaaacaaaaaagacgacaagggccgcgataagggcaaaggcaagaaaaggcctaatagagggaaggcaaagccggtcgtaagcgactttgattccgatgaggagcaggacgaaagagagcagagtgagggctcaggaaccgatgacgagtag

SEQ ID NO: 134839 - DNA, 765 bp, Artificial Sequence
  derived and/or modified sequence
atggaggaggaggtgcggctgaagaagcggaagcggcggcggaacgttgataaagatcccgccaaagaagacgtggagaaggccaaaaagcgtagggggagacctcccgcagagaagctgagtcccaatccccccaaattaacaaagcagatgaatgccataattgacaccgtgattaactataaggaccgatgtaatgtggagaaagtgcccagcaacagtcagctcgagatcgaaggcaacagttcaggacgtcagctgagcgaggtgtttatccaactcccgtctagaaaggagctgcctgaatattatgagctcatccgcaaaccagtggactttaaaaaaattaaagagagaatcagaaaccacaagtacaggtctcttggcgatcttgagaaggatgtcatgctgctatgtcacaatgcccagacgtttaatttagaaggctcgcagatttacgaagattccattgtgctgcagagcgtgttcaagtctgctagacagaaaatcgccaaagaggaggagagcgaggacgagtctaatgaggaagaggaggaggaggacgaggaggaatcagaatcagaagccaagtccgtcaaggtgaagatcaaactgaataaaaaggacgataaggggagggataaaggcaaagggaaaaagaggccaaataggggaaaggcaaagcccgtcgtatccgatttcgattcagacgaggaacaggacgagcgtgaacaatcagagggatccggtactgatgatgagtag

SEQ ID NO: 134840 - DNA, 4773 bp, Artificial Sequence
  derived and/or modified sequence
atgagcacccccaccgaccccggcgccatgccccaccccggcccctcacctgggccgggccccagtcctggaccaattctgggcccatcgcccgggccaggtccttccccaggctccgtgcactctatgatgggcccctcacctggaccaccctcagtgtcccatcccatgcctacgatgggttccactgattttccacaagaagggatgcaccagatgcataaaccaatcgatggtatacacgataagggaattgtagaagatatacactgcggctcgatgaaagggactggcatgcgccccccacatcctggcatggggcctccgcagtcccctatggatcagcattcccagggctacatgtctccacacccctctcctctgggtgcacctgaacacgtaagttcacctatgagtggcggtggccctacacccccccaaatgccacccagtcagcctggggcattgattcctggagatccccaggcaatgtctcaaccaaacaggggcccctcgcctttctcacccgtacaattgcaccagctgcgggctcagatactcgcctacaagatgctggcccgaggccagccattgccagagacccttcagctggctgtccagggcaaacgcaccctaccaggtttgcagcagcaacagcaacaacaacaacagcaacaacagcagcagcagcagcaacagcagcagcagcagcagccccaacagcagccaccacagcctcaaactcaacaacagcagcagcccgctctggttaactacaacagaccatctggccctggtccggaactttccggaccttcaacaccacagaaactaccagttcccgctccagggggacgccctagccctgccccacccgccgctgctcagccgccggctgcagccgttccagggccctctgtgccacagcccgcgcccgggcaaccctcacccgtcctgcaattacaacagaaacagagtcgcatctcgcccatacagaagccgcaggggcttgaccctgtggagattctccaagaacgagaatatcgccttcaagccaggatcgcacaccggatacaggagcttgagaatctgcccggctccttaccccctgatctgcggaccaaagcgactgttgagctcaaggctcttcggctactgaattttcagagacagctgagacaggaggtagtcgcctgcatgcggcgggacaccaccctggaaaccgcgttgaattcaaaagcttacaagcgctccaaacggcaaactctgcgtgaggcacgtatgacagagaaactggaaaagcaacagaagattgagcaggaacgaaagcgaaggcagaaacaccaagagtacctgaattccatcctacagcacgcaaaggatttcaaggaataccaccgctctgtggccgggaaaattcaaaaactaagcaaggccgtggccacgtggcacgccaataccgaaagggaacagaagaaagagaccgaacgtatcgagaaagaacgaatgcgacggctaatggccgaggatgaagaaggatataggaagctgattgaccaaaagaaggataggcgccttgcctacttgcttcagcaaactgatgaatatgtggcaaaccttaccaatctggtctgggaacacaaacaagctcaggctgctaaggaaaagaagaagcgtaggagacggaagaaaaaggccgaagagaacgcagaaggtggggagagcgcccttgggcctgacggggagccaatcgatgaaagctcccagatgtctgatctgcccgtgaaagtgactcacacagagacgggaaaagttctgtttggacctgaagcccctaaggccagccaattagacgcctggttggaaatgaatccaggctatgaggtagcaccaaggagtgatagtgaagagtcagacagtgattacgaggaagaagacgaggaggaggagagcagtcgtcaagaaaccgaggaaaagattctgctcgatccaaatagtgaggaagtctccgaaaaggatgccaagcagattattgaaactgccaagcaggatgttgatgacgagtatagcatgcagtattctgctcgaggctcccagagttattacactgtggcccacgctatctccgagcgcgtcgagaagcaatccgccctgcttattaacggaaccctaaaacattatcagctgcagggcctggagtggatggtatcattatacaacaacaacttaaatggaatccttgccgacgaaatgggcctggggaagacaatacagacgatcgccttgattacttatcttatggaacacaagaggttaaacggcccttacctgatcatagtgccactgagcaccctaagcaattggacctacgagttcgacaagtgggcaccatctgtggtgaaaattagctataagggcacacccgccatgaggagatccttggtcccccaactgcggtcgggcaagttcaacgtgctattgaccacttacgaatatatcataaaggataagcacattctggccaagatccgatggaagtatatgattgttgacgaggggcatcggatgaaaaatcaccactgcaagctgactcaagttctgaatacacactatgtcgcccccaggcgtatacttctgacgggcactccattacagaacaagctgccagagctctgggctcttctgaattttctactgccaactatatttaagtcctgttccacctttgaacagtggtttaacgcaccctttgccatgacaggtgaacgagtcgatttaaacgaggaagaaacaatcctgatcatacgacgacttcacaaggtcctgcggccttttctgctcagaaggctaaagaaggaggtggaatcacagttgccagaaaaggttgaatacgtcattaaatgcgacatgtccgccctgcagaaaattctgtacagacacatgcaagccaaaggtattctcctgaccgacggttcagagaaagataaaaaagggaagggcggtgcaaagactctcatgaacacaattatgcagctccgtaaaatatgtaatcacccttatatgttccaacacatcgaggagagttttgccgaacatctcggctattcaaacggggtgattaacggggcagagctctatcgagcgtcaggaaaattcgagctgctcgatcgaattctgcctaagttgcgggccaccaaccatcgggtgctactgttttgtcaaatgacatctttaatgactatcatggaagactattttgcgttccggaactttctgtacctgagactggatgggaccacaaaaagcgaggacagagccgcactgcttaagaaatttaatgagcctggctcccagtacttcattttcctattaagcacaagagcagggggactgggcctaaacctgcaggctgccgacacagtggtgatcttcgattccgactggaatccccaccaagatctgcaggcccaggaccgggcgcatagaattggccagcagaacgaggtgagagtgctgagactatgtaccgtgaacagcgttgaagaaaagatcctcgccgcagccaaatacaaactgaatgtggatcaaaaagttatacaagctgggatgtttgatcagaagagcagctcacacgagcgccgcgcctttctccaggctattctggaacacgaggaggaaaacgaggaagaagatgaggtgcccgatgatgagactctgaaccaaatgatcgccaggcgggaggaggaattcgaccttttcatgaggatggacatggaccggcggagagaagatgcccgtaatccgaaacggaaaccaaggctaatggaagaggatgagcttccttcatggataatcaaggatgacgccgaagtggaaagattaacttgtgaagaggaggaagagaaaatatttgggcgtggatctaggcaaagaagagacgtagactactcagacgccctaacagagaagcagtggctgcgcgccatcgaggatggaaacctggaagagatggaagaagaagtgagactcaagaaacgcaagcggagacgtaatgtggacaaagaccctgctaaggaagatgtggagaaagcgaagaaacgtcggggccgccccccagccgagaagctgagcccgaacccccccaaacttaccaagcagatgaacgctatcattgacacggtaattaattataaggaccgctgcaacgtcgaaaaggttccctccaattctcagttagagatagaggggaattccagtgggcgtcagctgagtgaggtgtttatccagctgccctctcggaaggagttgccggagtactatgaattgataaggaagcccgttgacttcaaaaagattaaagaaagaattcgcaaccacaagtatcggagcctgggggacctggaaaaggacgtgatgcttctctgtcataacgcacagacattcaatcttgagggctcccagatttatgaggatagcattgtgcttcagtccgtgtttaagtctgcccgtcagaaaattgctaaggaagaggagagtgaggatgagagcaatgaagaggaggaggaggaagacgaggaagaatccgagtctgaagcgaaatcagtcaaagtaaagattaagttgaacaagaaggacgacaaaggcagggataagggcaagggtaagaaaaggcctaaccgtggaaaagctaaaccggtggtcagcgatttcgacagcgacgaggaacaggacgagagagagcagtctgaagggtctgggactgacgatgaatag

SEQ ID NO: 134841 - DNA, 516 bp, Artificial Sequence
  derived and/or modified sequence
atggaggaggaggtgcggctgaagaagcggaagcggcggcggaacgtggataaagatcctgctaaggaagatgtggagaaagccaagaagcgccgcggtcgtcccccggccgaaaaactttcacccaacccccctaagctgactaagcagatgaacgccatcattgacactgtgataaattacaaggatcggtgtaacgtcgagaaggttccaagcaacagccagttggaaatcgagggtaattcttccggcaggcagctatctgaggttttcatccagctgcccagccggaaagagcttcccgagtattacgagctcattcgaaaaccagtagactttaagaagattaaggaaagaatccgaaatcacaaatacagatcccttggagaccttgagaaagatgtgatgttgctgtgtcataatgcccagaccttcaatctagaggggtctcagatatatgaggatagtattgtgctacagagtgttttcaagtctgctcgtcagaaaattgcgtag

SEQ ID NO: 134842 - DNA, 4773 bp, Artificial Sequence
  derived and/or modified sequence
atgagtacccctaccgacccaggagccatgccccaccccggaccttcccctggacccggtccttcgccaggtccgatcctcggcccttctcctgggccaggtccctctccaggctcagtgcactccatgatggggccatcacccggaccaccttccgtgtcccacccaatgcccacaatgggatcaacagatttcccacaggagggcatgcaccaaatgcacaagccgattgatggtatccacgacaaaggtattgtcgaagatattcattgtggttcaatgaagggtacagggatgagacctccacacccaggtatgggccctccccagtcccctatggatcagcactcccagggctacatgagccctcatccttcacccctgggggcacctgagcatgtcagttcccctatgtccggcggtgggcctacaccaccgcagatgcccccatcacaacccggagcgctgattcccggagatccccaggccatgagtcaaccaaaccgtgggccatcacctttttcccctgtgcagttgcaccagctacgcgcacagattctggcctataaaatgctagctagaggtcagcctctccccgaaacccttcagctcgcggtgcaaggaaagagaacccttcccggactacagcagcagcagcagcagcagcagcagcaacagcaacaacagcaacagcagcagcagcagcagcaacaaccccagcaacagcctcctcagccccaaacacagcaacagcagcagccagccctggtgaactacaaccggccatcaggccctgggcctgagctgagtgggccatctactccccagaagcttcctgtgccagctccaggtgggagacctagccccgcaccacccgctgccgctcagccaccggcagcagctgtacccggtccatcagtgccacagcctgcacctggccagccatccccagtgctgcagctgcagcagaagcagtccagaatctcaccaatccagaagccccagggtctggatccggtggaaatcttgcaggaacgcgagtataggcttcaagcccgtatcgctcacagaatacaggagctggagaatctccccggatctctcccgccagatctgcggactaaagctactgtcgagctgaaagccttgcggctgcttaactttcaacggcagcttagacaggaagtggtagcctgtatgaggcgagacaccaccctggagacagcactgaattccaaagcctacaagaggtcaaagaggcagacacttcgggaagctcgaatgaccgagaagcttgagaagcaacagaagatcgaacaagaacggaaacgacggcagaaacaccaagaatatttaaacagtatcttacaacacgccaaagatttcaaggaatatcatcggtccgttgcaggaaagatacaaaaactcagcaaggccgtggctacttggcacgcaaatactgagcgcgaacaaaaaaaagagactgaacggattgaaaaggagaggatgcggaggctgatggcagaagacgaagaaggttacagaaaactgatcgatcaaaagaaggaccgcagactggcgtacctactacagcagaccgatgagtacgtggctaacttgacaaacctcgtttgggaacataagcaagcgcaggctgccaaagaaaaaaagaagcgtcgccgtaggaaaaagaaagctgaggagaatgccgagggcggagaatcagccctggggcctgatggcgaacctatagacgagtcctctcaaatgtcagacctcccagttaaagtcacacataccgagactggcaaggtactgttcggaccagaggctccgaaggcctcacaactggatgcctggcttgaaatgaatccaggctacgaggtggctcccaggagtgattccgaggagtcagattccgattacgaggaggaggacgaggaggaggaaagtagcagacaggaaactgaagaaaagatcctgctggaccccaactccgaagaggttagtgagaaggatgctaagcagattattgagaccgctaagcaggatgtcgatgatgaatactcaatgcagtactctgccagaggaagtcagagctattacacagtggcccatgccatcagtgaacgggtggagaaacagtcagccctactgatcaacggcaccctgaaacactaccagttgcaaggcctcgagtggatggtgagcttgtacaacaataaccttaacggaatcctcgccgatgaaatgggcctcggcaaaaccattcaaaccatcgccctcattacctatctgatggaacacaaaaggttaaacggtccatatcttattatcgtaccactcagcactttgagcaattggacatacgaatttgataaatgggctcccagcgttgtgaagatcagttataagggcaccccagccatgaggaggtccttggtgccccaactcaggtccggcaaatttaacgtgctcctgacaacgtacgagtacattatcaaagacaagcatatcctggctaagatcaggtggaagtacatgattgttgacgaggggcacagaatgaagaatcatcactgcaagttaacccaggtgctaaatacccattatgtagcgccacgaaggatactcttgacaggtacacctctgcagaataagctgccagagctttgggcccttctcaactttctgctaccaaccattttcaagtcttgcagtacttttgaacagtggttcaacgctccatttgcaatgacaggagagcgggtggacctgaatgaagaggagacgatcctgatcattcgccgtcttcataaggtgctacggccttttctgctgcggagacttaaaaaggaggttgaaagccagctccctgagaaggtcgagtacgtgatcaagtgcgatatgagcgccttacagaaaatactttaccggcacatgcaggcaaaaggaattctgcttacagacggctccgagaaggataaaaaggggaagggcggtgcaaagactctcatgaatacaataatgcagctgaggaaaatctgtaatcatccttacatgtttcagcatatcgaggagtcctttgccgagcatctggggtatagcaatggggtgataaatggcgctgaactgtatagggctagcggaaagtttgaattattggacagaatacttccaaaactgagagctacaaaccacagggtcctgctgttttgtcagatgacatcactgatgacaattatggaagactatttcgctttcagaaactttctctacctgcgcttggacggcacgaccaagagcgaggacagagccgcacttctcaaaaagttcaatgaaccagggtcccagtacttcatattcttgttgagtacgagagcaggcggactcggtctgaatctgcaagcagccgacacagtcgtgatattcgattcagattggaacccccatcaagaccttcaggctcaagacagggcccaccgaattggacagcagaatgaagtgagggtccttcggttatgtacagtgaatagcgtggaagagaagattcttgccgctgcaaaatataaactcaacgtggaccagaaggtcattcaagcaggcatgtttgaccagaagtcctcctcacatgaacgcagggcctttttgcaggcaattctcgagcatgaggaagagaatgaggaggaggacgaagtgcctgatgatgaaaccctcaatcaaatgatagcaaggcgtgaggaggaattcgatttgttcatgcgcatggacatggaccgtcgccgagaggatgcgaggaatcccaagagaaagccacgcctaatggaggaagacgagctgccttcatggatcattaaggatgacgctgaagtggaacggctgacctgcgaggaggaggaagagaagatcttcgggagaggttctaggcagaggcgagacgttgactacagcgatgcacttacagagaaacagtggctgagggccattgaggatggtaatcttgaagagatggaggaagaggtgagattgaagaagagaaagagaaggagaaatgtcgataaggatcctgctaaggaagacgttgaaaaggccaagaagcggaggggcaggccacccgcagagaagctttcacctaacccgcctaaacttaccaaacaaatgaacgctattattgacacagttatcaactataaggataggtgcaatgtggagaaggtgcccagtaattcacagttagaaattgaagggaactcatccggacgacagctgagcgaggtgtttattcagcttcccagccgcaaagagctccctgagtactacgaactgatacggaagcctgtagatttcaaaaaaattaaggaacgtatcaggaatcacaaatacagaagcctgggggacctggagaaggatgtgatgctgttatgccacaacgcccagacattcaatctagaagggagccaaatctacgaggatagcatcgttttacagtcggtgttcaagtctgctcgccagaagatcgccaaggaggaagagtcggaagatgaatcgaatgaggaggaggaagaagaggacgaagaggaatcagaatccgaagctaagtcagttaaggttaagatcaaattgaacaagaaagacgacaagggtagagacaaaggaaaaggcaagaagcgacctaatcggggtaaggccaagcccgttgtaagcgattttgattctgatgaggagcaagatgagcgcgaacagtccgagggctctggcacagatgacgagtag

SEQ ID NO: 134843 - DNA, 765 bp, Artificial Sequence
  derived and/or modified sequence
atggaggaggaggttcgactcaagaaaaggaagcgacgcaggaatgtcgacaaagaccccgcaaaggaggatgtggagaaggccaaaaagaggcggggacgcccacctgcagaaaagctttcgcctaaccctcctaagctgactaagcaaatgaatgccatcatcgacaccgtgatcaattataaagaccgctgcaatgtagagaaggtccccagtaacagtcaattggagatagagggaaactctagcgggagacagctttccgaagtctttattcaactgccatctagaaaggaactccccgagtactatgaattaatcaggaaaccagtggacttcaagaaaattaaagaacgtatcagaaaccacaagtatcggagtttaggcgacttggaaaaagatgtgatgttgctatgccacaatgcccagacgttcaatttagaaggttcccaaatctacgaagacagcatcgtcctccagagcgtgttcaaatccgctcgtcaaaagatcgccaaggaagaggagagcgaagacgagtctaacgaggaggaagaggaagaggacgaagaggagtccgagtcagaggctaagagcgtcaaagtgaagataaagttgaacaagaaagatgacaaagggagggataaaggaaaggggaaaaagcgcccaaatcggggtaaagccaagccagttgttagcgactttgattctgacgaagagcaggatgagcgcgagcaaagtgagggctctggcacagacgacgagtag

SEQ ID NO: 134844 - DNA, 4773 bp, Artificial Sequence
  derived and/or modified sequence
atgtccacaccaacagatcctggcgcaatgccccaccctggtccgtcccctggtcctggacccagccctgggcctatcttgggtccatcccctggcccaggaccttctcccggttcagttcatagtatgatgggacctagcccagggcctcccagcgtgtcacatccgatgccaacaatgggctcaaccgattttcctcaggagggaatgcaccagatgcataagcccatcgacgggatccatgataaaggcatcgtggaggatattcactgtggatcaatgaaaggaactggtatgcggcctccacaccctggcatgggcccaccgcagtctccaatggatcaacacagtcagggatacatgtcccctcacccgtcccccctgggcgctccagaacatgtcagctcacctatgtcaggaggaggtcctacccctccacagatgcctccttcgcagcctggcgctcttattccaggcgatcctcaggccatgtctcagccaaatcggggaccttcccctttttctcccgtccagttgcaccaactcagggctcagattcttgcatacaaaatgctagccaggggacaacccttgcccgagacgttgcagttggccgtgcaaggtaagcggacacttcccggtcttcaacaacaacagcagcagcagcagcagcagcagcagcaacaacagcaacaacagcagcaacagcagcagccccagcaacagccgccacagcctcagacccaacagcagcagcaacctgcactggtgaactacaacagaccatccggtccaggacctgagctgtcggggccttctacccctcagaagctaccagtgccagctcccggtggccgtccgtcacccgcacccccagcggcagcacagccgccagctgctgccgtcccaggcccatctgtcccccagccggcacccggacagccctccccggtactccagctgcaacagaagcagagtagaattagtcccatccagaagccacagggactggatcccgtagagatcttgcaagaaagagaatacaggctgcaggccagaatagcgcatcgcatacaggaactcgagaatctgccgggatctctgccaccggacctacgcaccaaagctactgtcgagctgaaggccctgaggctcttgaactttcaaagacagttgcgtcaggaggtagtggcctgcatgagacgcgatactacgctggaaaccgcgcttaactctaaagcctacaagaggtcaaaacggcagacgttgagggaagcccgaatgaccgagaagctggaaaagcagcagaagattgagcaggagcgtaagcggaggcaaaagcatcaggagtacttaaatagtatcttgcagcatgccaaggactttaaggaatatcaccgtagcgtggcaggtaaaatccagaaactgtccaaggccgtcgcgacatggcatgcgaatacagaacgggagcagaaaaaagaaacggaacgcattgaaaaggagcgcatgcgcagactgatggccgaagatgaggaggggtatcggaagctgatagaccaaaaaaaggaccggagactggcatatcttctgcagcaaaccgacgagtacgtagctaacctgactaatctcgtctgggaacacaaacaagcccaagcggctaaggagaagaaaaaacgcagacgtagaaaaaagaaagctgaggagaatgccgagggtggcgaatctgctctcggccctgacggcgaaccgatcgatgaatcaagtcagatgtcagatctgcccgtgaaagtgactcacacagagaccggaaaagtcctctttggacctgaagccccaaaagcaagccaacttgacgcatggctggaaatgaacccaggttacgaggtggcgcctcggagtgacagcgaagaatcagatagtgactacgaagaagaagatgaggaagaagaaagctcaagacaagagacagaagagaaaatactgctcgaccctaattccgaagaagtgagcgaaaaagacgccaagcagatcattgaaaccgccaagcaggatgtggatgatgagtactctatgcaatatagtgctcgaggaagtcagagctactacacagtagcccatgcgattagcgagagagtcgaaaaacagtcagcactgctcataaatggcacgcttaagcattatcagctgcagggtctggagtggatggttagtctgtacaacaacaatcttaatggtatcctagccgacgaaatggggttagggaagaccattcagactattgccctgattacctatctgatggagcataaaagattaaatggcccttacctcatcattgtgcccctgtccactctcagcaactggacatacgagttcgataaatgggctccctccgtggtcaagatcagttataaaggtaccccagcaatgagaaggagtttagtgccgcagctcagatcagggaaatttaatgtccttttaactacctacgagtacattatcaaagataagcacatactggcaaaaatacgctggaaatacatgattgtggatgaaggccacagaatgaagaatcaccattgtaaactcactcaagtgctcaacacccactacgttgcccctaggagaattttgttgactggcacgccactgcagaataaacttcccgagctgtgggcactactgaactttctcctgcccacaatcttcaagtcttgtagtaccttcgagcaatggtttaacgccccttttgctatgaccggagagagggtggacctgaacgaggaggaaactatactgataatccgcaggctgcacaaagtccttcgaccttttctcttaagacgtctcaagaaagaagttgagtcacagctcccagaaaaagtggaatacgtcattaagtgtgacatgtccgcactccagaagatcctgtaccgccatatgcaggcgaaggggattcttttgacagacggttccgagaaggataagaaggggaagggtggcgcaaaaacccttatgaacactatcatgcaactacgcaagatctgtaatcacccttacatgttccagcacatcgaggaatcttttgccgaacatctcggctacagtaatggcgtcatcaacggcgctgagctctaccgggcatctggaaagttcgagctgctggatcgaattttgccaaagctgagggcgacaaatcaccgggtgctcctgttctgccagatgaccagtctgatgaccattatggaggattatttcgcctttcgcaatttcctgtacttgcgcctcgacgggaccactaaatctgaagacagggctgctttactgaagaagtttaacgaacctggctcccaatacttcattttcctgctcagcacccgggctgggggactgggtttgaacctgcaggctgccgacactgtggtgatatttgatagcgattggaatcctcaccaggacctgcaggcacaggacagagcacaccggatcggtcaacagaatgaagtgcgggttctccgcctgtgtacagtaaattcagtagaagagaagattctcgcagctgccaaatacaaattgaacgtggaccagaaggtgatccaagccggaatgtttgaccagaagtcttcatcgcacgagcggagggcattcctgcaagctatactcgaacatgaggaggaaaatgaggaggaggatgaggtaccggacgatgaaactttaaatcaaatgattgcccgacgggaggaggagttcgatctcttcatgagaatggatatggacagaagaagagaagatgccagaaatcctaagcgtaaaccccgtctcatggaggaggatgagctcccgagctggatcattaaagatgatgccgaggtagagagactgacttgcgaagaggaagaggagaaaattttcggtcgtggcagtaggcaacgcagggatgtggactattctgacgcacttaccgagaagcagtggcttagggctatcgaggacggcaacttggaggaaatggaagaggaagtccgcctcaaaaagcggaagcgaagaaggaatgtggacaaggaccccgcaaaggaggacgtcgagaaagctaagaaaagacgtggcaggccccctgcagagaagcttagccctaatcctcccaaactaaccaaacagatgaatgcgatcattgacacggtaatcaattacaaggacaggtgcaacgtggagaaagtgccaagtaacagccaactggagattgaaggaaatagcagtggccgtcagttgagtgaggtgtttatccagctgccttctcgcaaggagctgcccgagtactacgagttaatccgaaagcccgtggatttcaagaagatcaaagaaagaatccggaaccataaataccggtccctgggtgacttggagaaggacgtgatgcttctttgccataatgcgcagacatttaacttagaggggagccagatttatgaggatagtatcgtccttcagagcgtttttaaaagtgccagacagaagatcgcaaaggaagaggaaagcgaggacgaatccaacgaggaggaggaagaggaagatgaagaagagtctgagtctgaagcaaagtctgtgaaggttaaaatcaagctcaataagaaagacgataaggggcgagacaaaggaaagggaaagaaaagacctaaccggggtaaggccaagcccgtagtttctgattttgattctgatgaggaacaggatgaacgggagcagtcagaagggagcgggaccgacgacgagtag

SEQ ID NO: 134845 - DNA, 516 bp, Artificial Sequence
  derived and/or modified sequence
atggaggaagaggtcagattaaagaaaagaaaacgccgaaggaacgtcgacaaggatcccgctaaagaagatgtggagaaagctaaaaagcgccgaggtagacccccagccgagaaactgtcgcccaaccccccaaagcttactaaacagatgaatgctatcattgatactgtgatcaactacaaggacagatgtaacgtcgaaaaggtgcctagtaattcccaactcgagattgagggtaacagcagtggaaggcagctttccgaggtatttattcagttgccatctaggaaagagctccccgaatactacgaactgatccgaaagcccgtggatttcaagaaaatcaaagagagaataagaaaccataagtatcgcagcctgggggatcttgaaaaagacgtcatgctgctgtgtcataacgcacagactttcaacctcgaggggagccagatctacgaggacagcatcgtactgcagtcggtgttcaaatctgctcggcaaaaaattgcctag

SEQ ID NO: 134846 - DNA, 5757 bp, Artificial Sequence
  derived and/or modified sequence
tttctgtactctgggtgactcagagagggaagagattcagccagcacactcctcgcgagcaagcattactctactgactggcagagacaggagaggtagatgtccacgcccacagaccctggtgcgatgccccacccagggccttcgccggggcctgggccttcccctgggccaattcttgggcctagtccaggaccaggaccatccccaggttccgtccacagcatgatggggccaagtcctggacctccaagtgtctcccatcctatgccgacgatggggtccacagacttcccacaggaaggcatgcatcaaatgcataagcccatcgatggtatacatgacaaggggattgtagaagacatccattgtggatccatgaagggcactggtatgcgaccacctcacccaggcatgggccctccccagagtccaatggatcaacacagccaaggttatatgtcaccacacccatctccattaggagccccagagcacgtctccagccctatgtctggaggaggcccaactccacctcagatgccaccaagccagccgggggccctcatcccaggtgatccgcaggccatgagccagcccaacagaggtccctcacctttcagtcctgtccagctgcatcagcttcgagctcagattttagcttataaaatgctggcccgaggccagcccctccccgaaacgctgcagcttgcagtccaggggaaaaggacgttgcctggcttgcagcaacaacagcagcagcaacagcagcagcagcagcagcagcagcagcagcagcagcagcaacagcagccgcagcagcagccgccgcaaccacagacgcagcaacaacagcagccggcccttgttaactacaacagaccatctggcccggggccggagctgagcggcccgagcaccccgcagaagctgccggtgcccgcgcccggcggccggccctcgcccgcgccccccgcagccgcgcagccgcccgcggccgcagtgcccgggccctcagtgccgcagccggccccggggcagccctcgcccgtcctccagctgcagcagaagcagagccgcatcagccccatccagaaaccgcaaggcctggaccccgtggaaattctgcaagagcgggaatacagacttcaggcccgcatagctcataggatacaagaactggaaaatctgcctggctctttgccaccagatttaagaaccaaagcaaccgtggaactaaaagcacttcggttactcaatttccagcgtcagctgagacaggaggtggtggcctgcatgcgcagggacacgaccctggagacggctctcaactccaaagcatacaaacggagcaagcgccagactctgagagaagctcgcatgaccgagaagctggagaagcagcagaagattgagcaggagaggaaacgccgtcagaaacaccaggaatacctgaacagtattttgcaacatgcaaaagattttaaggaatatcatcggtctgtggccggaaagatccagaagctctccaaagcagtggcaacttggcatgccaacactgaaagagagcagaagaaggagacagagcggattgaaaaggagagaatgcggcgactgatggctgaagatgaggagggttatagaaaactgattgatcaaaagaaagacaggcgtttagcttaccttttgcagcagaccgatgagtatgtagccaatctgaccaatctggtttgggagcacaagcaagcccaggcagccaaagagaagaagaagaggaggaggaggaagaagaaggctgaggagaatgcagagggtggggagtctgccctgggaccggatggagagcccatagatgagagcagccagatgagtgacctccctgtcaaagtgactcacacagaaaccggcaaggttctgttcggaccagaagcacccaaagcaagtcagctggacgcctggctggaaatgaatcctggttatgaagttgcccctagatctgacagtgaagagagtgattctgattatgaggaagaggatgaggaagaagagtccagtaggcaggaaaccgaagagaaaatactcctggatccaaatagcgaagaagtttctgagaaggatgctaagcagatcattgagacagctaagcaagacgtggatgatgaatacagcatgcagtacagtgccaggggctcccagtcctactacaccgtggctcatgccatctcggagagggtggagaaacagtctgccctcctaattaatgggaccctaaagcattaccagctccagggcctggaatggatggtttccctgtataataacaacttgaacggaatcttagccgatgaaatggggcttggaaagaccatacagaccattgcactcatcacttatctgatggagcacaaaagactcaatggcccctatctcatcattgttcccctttcgactctatctaactggacatatgaatttgacaaatgggctccttctgtggtgaagatttcttacaagggtactcctgccatgcgtcgctcccttgtcccccagctacggagtggcaaattcaatgtcctcttgactacttatgagtatattataaaagacaagcacattcttgcaaagattcggtggaaatacatgatagtggacgaaggccaccgaatgaagaatcaccactgcaagctgactcaggtcttgaacactcactatgtggcccccagaaggatcctcttgactgggaccccgctgcagaataagctccctgaactctgggccctcctcaacttcctcctcccaacaatttttaagagctgcagcacatttgaacaatggttcaatgctccatttgccatgactggtgaaagggtggacttaaatgaagaagaaactatattgatcatcaggcgtctacataaggtgttaagaccatttttactaaggagactgaagaaagaagttgaatcccagcttcccgaaaaagtggaatatgtgatcaagtgtgacatgtcagctctgcagaagattctgtatcgccatatgcaagccaaggggatccttctcacagatggttctgagaaagataagaaggggaaaggaggtgctaagacacttatgaacactattatgcagttgagaaaaatctgcaaccacccatatatgtttcagcacattgaggaatcctttgctgaacacctaggctattcaaatggggtcatcaatggggctgaactgtatcgggcctcagggaagtttgagctgcttgatcgtattctgccaaaattgagagcgactaatcaccgagtgctgcttttctgccagatgacatctctcatgaccatcatggaggattattttgcttttcggaacttcctttacctacgccttgatggcaccaccaagtctgaagatcgtgctgctttgctgaagaaattcaatgaacctggatcccagtatttcattttcttgctgagcacaagagctggtggcctgggcttaaatcttcaggcagctgatacagtggtcatctttgacagcgactggaatcctcatcaggatctgcaggcccaagaccgagctcaccgcatcgggcagcagaacgaggtccgggtactgaggctctgtaccgtgaacagcgtggaggaaaagatcctcgcggccgcaaaatacaagctgaacgtggatcagaaagtgatccaggcgggcatgtttgaccaaaagtcttcaagccacgagcggagggcattcctgcaggccatcttggagcatgaggaggaaaatgaggaagaagatgaagtaccggacgatgagactctgaaccaaatgattgctcgacgagaagaagaatttgacctttttatgcggatggacatggaccggcggagggaagatgcccggaacccgaaacggaagccccgtttaatggaggaggatgagctgccctcctggatcattaaggatgacgctgaagtagaaaggctcacctgtgaagaagaggaggagaaaatatttgggagggggtcccgccagcgccgtgacgtggactacagtgacgccctcacggagaagcagtggctaagggccatcgaagacggcaatttggaggaaatggaagaggaagtacggcttaagaagcgaaaaagacgaagaaatgtggataaagatcctgcaaaagaagatgtggaaaaagctaagaagagaagaggccgccctcccgctgagaaactgtcaccaaatccccccaaactgacaaagcagatgaacgctatcatcgatactgtgataaactacaaagataggtgtaacgtggagaaggtgcccagtaattctcagttggaaatagaaggaaacagttcagggcgacagctcagtgaagtcttcattcagttaccttcaaggaaagaattaccagaatactatgaattaattaggaagccagtggatttcaaaaaaataaaggaaaggattcgtaatcataagtaccggagcctaggcgacctggagaaggatgtcatgcttctctgtcacaacgctcagacgttcaacctggagggatcccagatctatgaagactccatcgtcttacagtcagtgtttaagagtgcccggcagaaaattgccaaagaggaagagagtgaggatgaaagcaatgaagaggaggaagaggaagatgaagaagagtcagagtccgaggcaaaatcagtcaaggtgaaaattaagctcaataaaaaagatgacaaaggccgggacaaagggaaaggcaagaaaaggccaaatcgaggaaaagccaaacctgtagtgagcgattttgacagcgatgaggagcaggatgaacgtgaacagtcagaaggaagtgggacggatgatgagtgatcagtatggacctttttccttggtagaactgaattccttcctcccctgtctcatttctacccagtgagttcatttgtcatataggcactgggttgtttctatatcatcatcgtctataaactagctttaggatagtgccagacaaacatatgatatcatggtgtaaaaaacacacacatacacaaatatttgtaacatattgtgaccaaatgggcctcaaagattcagattgaaacaaacaaaaagcttttgatggaaaatatgtgggtggatagtatatttctatgggtgggtctaatttggtaacggtttgattgtgcctggttttatcacctgttcagatgagaagatttttgtcttttgtagcactgataaccaggagaagccattaaaagccactggttattttatttttcatcaggcaattttcgaggtttttatttgttcggtattgtttttttacactgtggtacatataagcaactttaataggtgataaatgtacagtagttagatttcacctgcatatacatttttccattttatgctctatgatctgaacaaaagctttttgaattgtataagatttatgtctactgtaaacattgcttaatttttttgctcttgatttaaaaaaaagttttgttgaaagcgctattgaatattgcaatctatatagtgtattggatggcttcttttgtcaccctgatctcctatgttaccaatgtgtatcgtctccttctccctaaagtgtacttaatctttgctttctttgcacaatgtctttggttgcaagtcataagcctgaggcaaataaaattccagtaatttcgaagaatgtggtgttggtgctttcctaataaagaaataatttagcttgacaaa

SEQ ID NO: 134847 - DNA, 947 bp, Artificial Sequence
  derived and/or modified sequence
agcatgggagccgtctgtatgttgaattagggctcgcactcttgcgcaacacgtcaccagtcggaaactgggggtttgcttctgtgatttatttcattattgtgctgtgctgctggctctggtttaaagcaagcgtttgcaggccatcgaagacggcaatttggaggaaatggaagaggaagtacggcttaagaagcgaaaaagacgaagaaatgtggataaagatcctgcaaaagaagatgtggaaaaagctaagaagagaagaggccgccctcccgctgagaaactgtcaccaaatccccccaaactgacaaagcagatgaacgctatcatcgatactgtgataaactacaaagataggtgtaacgtggagaaggtgcccagtaattctcagttggaaatagaaggaaacagttcagggcgacagctcagtgaagtcttcattcagttaccttcaaggaaagaattaccagaatactatgaattaattaggaagccagtggatttcaaaaaaataaaggaaaggattcgtaatcataagtaccggagcctaggcgacctggagaaggatgtcatgcttctctgtcacaacgctcagacgttcaacctggagggatcccagatctatgaagactccatcgtcttacagtcagtgtttaagagtgcccggcagaaaattgccaaagaggaagagagtgaggatgaaagcaatgaagaggaggaagaggaagatgaagaagagtcagagtccgaggcaaaatcagtcaaggtgaaaattaagctcaataaaaaagatgacaaaggccgggacaaagggaaaggcaagaaaaggccaaatcgaggaaaagccaaacctgtagtgagcgattttgacagcgatgaggagcaggatgaacgtgaacagtcagaaggaagtgggacggatgatgagtgatcagtatggacct

SEQ ID NO: 134848 - DNA, 5867 bp, Artificial Sequence
  derived and/or modified sequence
tcagaagaaagccccgagatcacagagacccggcgagatcacagagacccggcctgaaggaacgtggaaagaccaatgtacctgttttgaccggttgcctggagcaagaagttccagttggggagaattttcagaagataaagtcggagattgtggaaagacttgacttgcagcattactctactgactggcagagacaggagaggtagatgtccacgcccacagaccctggtgcgatgccccacccagggccttcgccggggcctgggccttcccctgggccaattcttgggcctagtccaggaccaggaccatccccaggttccgtccacagcatgatggggccaagtcctggacctccaagtgtctcccatcctatgccgacgatggggtccacagacttcccacaggaaggcatgcatcaaatgcataagcccatcgatggtatacatgacaaggggattgtagaagacatccattgtggatccatgaagggcactggtatgcgaccacctcacccaggcatgggccctccccagagtccaatggatcaacacagccaaggttatatgtcaccacacccatctccattaggagccccagagcacgtctccagccctatgtctggaggaggcccaactccacctcagatgccaccaagccagccgggggccctcatcccaggtgatccgcaggccatgagccagcccaacagaggtccctcacctttcagtcctgtccagctgcatcagcttcgagctcagattttagcttataaaatgctggcccgaggccagcccctccccgaaacgctgcagcttgcagtccaggggaaaaggacgttgcctggcttgcagcaacaacagcagcagcaacagcagcagcagcagcagcagcagcagcagcagcagcagcaacagcagccgcagcagcagccgccgcaaccacagacgcagcaacaacagcagccggcccttgttaactacaacagaccatctggcccggggccggagctgagcggcccgagcaccccgcagaagctgccggtgcccgcgcccggcggccggccctcgcccgcgccccccgcagccgcgcagccgcccgcggccgcagtgcccgggccctcagtgccgcagccggccccggggcagccctcgcccgtcctccagctgcagcagaagcagagccgcatcagccccatccagaaaccgcaaggcctggaccccgtggaaattctgcaagagcgggaatacagacttcaggcccgcatagctcataggatacaagaactggaaaatctgcctggctctttgccaccagatttaagaaccaaagcaaccgtggaactaaaagcacttcggttactcaatttccagcgtcagctgagacaggaggtggtggcctgcatgcgcagggacacgaccctggagacggctctcaactccaaagcatacaaacggagcaagcgccagactctgagagaagctcgcatgaccgagaagctggagaagcagcagaagattgagcaggagaggaaacgccgtcagaaacaccaggaatacctgaacagtattttgcaacatgcaaaagattttaaggaatatcatcggtctgtggccggaaagatccagaagctctccaaagcagtggcaacttggcatgccaacactgaaagagagcagaagaaggagacagagcggattgaaaaggagagaatgcggcgactgatggctgaagatgaggagggttatagaaaactgattgatcaaaagaaagacaggcgtttagcttaccttttgcagcagaccgatgagtatgtagccaatctgaccaatctggtttgggagcacaagcaagcccaggcagccaaagagaagaagaagaggaggaggaggaagaagaaggctgaggagaatgcagagggtggggagtctgccctgggaccggatggagagcccatagatgagagcagccagatgagtgacctccctgtcaaagtgactcacacagaaaccggcaaggttctgttcggaccagaagcacccaaagcaagtcagctggacgcctggctggaaatgaatcctggttatgaagttgcccctagatctgacagtgaagagagtgattctgattatgaggaagaggatgaggaagaagagtccagtaggcaggaaaccgaagagaaaatactcctggatccaaatagcgaagaagtttctgagaaggatgctaagcagatcattgagacagctaagcaagacgtggatgatgaatacagcatgcagtacagtgccaggggctcccagtcctactacaccgtggctcatgccatctcggagagggtggagaaacagtctgccctcctaattaatgggaccctaaagcattaccagctccagggcctggaatggatggtttccctgtataataacaacttgaacggaatcttagccgatgaaatggggcttggaaagaccatacagaccattgcactcatcacttatctgatggagcacaaaagactcaatggcccctatctcatcattgttcccctttcgactctatctaactggacatatgaatttgacaaatgggctccttctgtggtgaagatttcttacaagggtactcctgccatgcgtcgctcccttgtcccccagctacggagtggcaaattcaatgtcctcttgactacttatgagtatattataaaagacaagcacattcttgcaaagattcggtggaaatacatgatagtggacgaaggccaccgaatgaagaatcaccactgcaagctgactcaggtcttgaacactcactatgtggcccccagaaggatcctcttgactgggaccccgctgcagaataagctccctgaactctgggccctcctcaacttcctcctcccaacaatttttaagagctgcagcacatttgaacaatggttcaatgctccatttgccatgactggtgaaagggtggacttaaatgaagaagaaactatattgatcatcaggcgtctacataaggtgttaagaccatttttactaaggagactgaagaaagaagttgaatcccagcttcccgaaaaagtggaatatgtgatcaagtgtgacatgtcagctctgcagaagattctgtatcgccatatgcaagccaaggggatccttctcacagatggttctgagaaagataagaaggggaaaggaggtgctaagacacttatgaacactattatgcagttgagaaaaatctgcaaccacccatatatgtttcagcacattgaggaatcctttgctgaacacctaggctattcaaatggggtcatcaatggggctgaactgtatcgggcctcagggaagtttgagctgcttgatcgtattctgccaaaattgagagcgactaatcaccgagtgctgcttttctgccagatgacatctctcatgaccatcatggaggattattttgcttttcggaacttcctttacctacgccttgatggcaccaccaagtctgaagatcgtgctgctttgctgaagaaattcaatgaacctggatcccagtatttcattttcttgctgagcacaagagctggtggcctgggcttaaatcttcaggcagctgatacagtggtcatctttgacagcgactggaatcctcatcaggatctgcaggcccaagaccgagctcaccgcatcgggcagcagaacgaggtccgggtactgaggctctgtaccgtgaacagcgtggaggaaaagatcctcgcggccgcaaaatacaagctgaacgtggatcagaaagtgatccaggcgggcatgtttgaccaaaagtcttcaagccacgagcggagggcattcctgcaggccatcttggagcatgaggaggaaaatgaggaagaagatgaagtaccggacgatgagactctgaaccaaatgattgctcgacgagaagaagaatttgacctttttatgcggatggacatggaccggcggagggaagatgcccggaacccgaaacggaagccccgtttaatggaggaggatgagctgccctcctggatcattaaggatgacgctgaagtagaaaggctcacctgtgaagaagaggaggagaaaatatttgggagggggtcccgccagcgccgtgacgtggactacagtgacgccctcacggagaagcagtggctaagggccatcgaagacggcaatttggaggaaatggaagaggaagtacggcttaagaagcgaaaaagacgaagaaatgtggataaagatcctgcaaaagaagatgtggaaaaagctaagaagagaagaggccgccctcccgctgagaaactgtcaccaaatccccccaaactgacaaagcagatgaacgctatcatcgatactgtgataaactacaaagataggtgtaacgtggagaaggtgcccagtaattctcagttggaaatagaaggaaacagttcagggcgacagctcagtgaagtcttcattcagttaccttcaaggaaagaattaccagaatactatgaattaattaggaagccagtggatttcaaaaaaataaaggaaaggattcgtaatcataagtaccggagcctaggcgacctggagaaggatgtcatgcttctctgtcacaacgctcagacgttcaacctggagggatcccagatctatgaagactccatcgtcttacagtcagtgtttaagagtgcccggcagaaaattgccaaagaggaagagagtgaggatgaaagcaatgaagaggaggaagaggaagatgaagaagagtcagagtccgaggcaaaatcagtcaaggtgaaaattaagctcaataaaaaagatgacaaaggccgggacaaagggaaaggcaagaaaaggccaaatcgaggaaaagccaaacctgtagtgagcgattttgacagcgatgaggagcaggatgaacgtgaacagtcagaaggaagtgggacggatgatgagtgatcagtatggacctttttccttggtagaactgaattccttcctcccctgtctcatttctacccagtgagttcatttgtcatataggcactgggttgtttctatatcatcatcgtctataaactagctttaggatagtgccagacaaacatatgatatcatggtgtaaaaaacacacacatacacaaatatttgtaacatattgtgaccaaatgggcctcaaagattcagattgaaacaaacaaaaagcttttgatggaaaatatgtgggtggatagtatatttctatgggtgggtctaatttggtaacggtttgattgtgcctggttttatcacctgttcagatgagaagatttttgtcttttgtagcactgataaccaggagaagccattaaaagccactggttattttatttttcatcaggcaattttcgaggtttttatttgttcggtattgtttttttacactgtggtacatataagcaactttaataggtgataaatgtacagtagttagatttcacctgcatatacatttttccattttatgctctatgatctgaacaaaagctttttgaattgtataagatttatgtctactgtaaacattgcttaatttttttgctcttgatttaaaaaaaagttttgttgaaagcgctattgaatattgcaatctatatagtgtattggatggcttcttttgtcaccctgatctcctatgttaccaatgtgtatcgtctccttctccctaaagtgtacttaatctttgctttctttgcacaatgtctttggttgcaagtcataagcctgaggcaaataaaattccagtaatttcgaagaatgtggtgttggtgctttcctaataaagaaataatttagcttgacaaa

SEQ ID NO: 134849 - DNA, 750 bp, Artificial Sequence
  derived and/or modified sequence
cttggagaggcggaggtggaaacgatgcgcaggagttggcttggggctttttgtttgcgtgtccctgtttacctattcataatcatggatcccctctgctttgtgatactgtgaaccacgcataacagcaattctttacaccaccgggttgagaagaaggcgcctgaggctgactttctggacctgccgtcacgcagtaaagatgtggttggccatcgaagacggcaatttggaggaaatggaagaggaagtacggcttaagaagcgaaaaagacgaagaaatgtggataaagatcctgcaaaagaagatgtggaaaaagctaagaagagaagaggccgccctcccgctgagaaactgtcaccaaatccccccaaactgacaaagcagatgaacgctatcatcgatactgtgataaactacaaagataggtgtaacgtggagaaggtgcccagtaattctcagttggaaatagaaggaaacagttcagggcgacagctcagtgaagtcttcattcagttaccttcaaggaaagaattaccagaatactatgaattaattaggaagccagtggatttcaaaaaaataaaggaaaggattcgtaatcataagtaccggagcctaggcgacctggagaaggatgtcatgcttctctgtcacaacgctcagacgttcaacctggagggatcccagatctatgaagactccatcgtcttacagtcagtgtttaagagtgcccggcagaaaattgc

SEQ ID NO: 134850 - protein, 1009 aa, Artificial Sequence
  derived and/or modified sequence
MSWMFKRDPVWKYLQTVQYGVHGNFPRLSYPTFFPRFEFQDVIPPDDFLTSDEEVDSVLFGSLRGHVVGLRYYTGVVNNNEMVALQRDPNNPYDKNAIKVNNVNGNQVGHLKKELAGALAYIMDNKLAQIEGVVPFGANNAFTMPLHMTFWGKEENRKAVSDQLKKHGFKLGPAPKTLGFNLESGWGSGRAGPSYSMPVHAAVQMTTEQLKTEFDKLFEDLKEDDKTHEMEPAEAIETPLLPHQKQALAWMVSRENSKELPPFWEQRNDLYYNTITNFSEKDRPENVHGGILADDMGLGKTLTAIAVILTNFHDGRPLPIERVKKNLLKKEYNVNDDSMKLGGNNTSEKADGLSKDASRCSEQPSISDIKEKSKFRMSELSSSRPKRRKTAVQYIESSDSEEIETSELPQKMKGKLKNVQSETKGRAKAGSSKVIEDVAFACALTSSVPTTKKKMLKKGACAVEGSKKTDVEERPRTTLIICPLSVLSNWIDQFGQHIKSDVHLNFYVYYGPDRIREPALLSKQDIVLTTYNILTHDYGTKGDSPLHSIRWLRVILDEGHAIRNPNAQQTKAVLDLESERRWVLTGTPIQNSLKDLWSLLSFLKLKPFIDREWWHRTIQRPVTMGDEGGLRRLQSLIKNITLRRTKTSKIKGKPVLELPERKVFIQHITLSDEERKIYQSVKNEGRATIGRYFNEGTVLAHYADVLGLLLRLRQICCHTYLLTNAVSSNGPSGNDTPEELRKKLIRKMKLILSSGSDEECAICLDSLTVPVITHCAHVFCKPCICQVIQNEQPHAKCPLCRNDIHEDNLLECPPEELARDSEKKSDMEWTSSSKINALMHALTDLRKKNPNIKSLVVSQFTTFLSLIEIPLKASGFVFTRLDGSMAQKKRVESIQCFQNTEAGSPTIMLLSLKAGGVGLNLSAASRVFLMDPAWNPAAEDQCFDRCHRLGQKQEVIITKFIVKDSVEENMLKIQNKKRELAAGAFGTKKPNADEMKQAKINEIRTLIDL

SEQ ID NO: 134851 - protein, 457 aa, Artificial Sequence
  derived and/or modified sequence
MFKRDPVWKYLQTVQYGVHGNFPRLSYPTFFPRFEFQDVIPPDDFLTSDEEVDSVLFGSLRGHVVGLRYYTGVVNNNEMVALQRDPNNPYDKNAIKVNNVNGNQVGHLKKELAGALAYIMDNKLAQIEGVVPFGANNAFTMPLHMTFWGKEENRKAVSDQLKKHGFKLGPAPKTLGFNLESGWGSGRAGPSYSMPVHAAVQMTTEQLKTEFDKLFEDLKEDDKTHEMEPAEAIETPLLPHQKQALAWMVSRENSKELPPFWEQRNDLYYNTITNFSEKDRPENVHGGILADDMGLGKTLTAIAVILTNFHDGRPLPIERVKKNLLKKEYNVNDDSMKLGGNNTSEKADGLSKDASRCSEQPSISDIKEKSKFRMSELSSSRPKRRKTAVQYIESSDSEEIETSELPQKMKGKLKNVQSETKGRAKAGSSKVIEDVAFACALTSSVPTTKKKMLKKVK

SEQ ID NO: 134852 - DNA, 5351 bp, Artificial Sequence
  derived and/or modified sequence
acagagcgacgctggtctcccagattgttgcagaaggagacggcgtcgacgtctgactggactcgcggcgacttacctttcagtcgtgcgctcctgatccggcgctcggaatttgtccccggcttcagggctgcggggcctggaaggaggcgtatcgaggcggctcgaaaacgatccaggggagccgaggcgctcctcttgtcatcccactcagcgccatgtcctggatgttcaagagggatccagtttggaagtacttgcagactgtccagtatggagttcatggaaattttccacgcctctcatatccaactttctttccacgttttgaattccaagatgttatccctccagatgactttctaactagtgatgaagaagtagattccgttttatttggaagtttgagaggtcatgtggttggactacgctattacacgggagtagttaataataatgaaatggttgcattacaacgagatcctaataacccttatgataagaatgcaattaaagtaaacaatgtgaatggaaatcaagttggccatttaaagaaagagcttgcaggtgctttggcctatatcatggacaacaaattggcacaaattgaaggggtagttccttttggtgcaaacaatgcttttaccatgcctctgcatatgactttttggggaaaagaagaaaatagaaaagcggtttcagatcagttgaagaaacatggatttaaattgggtcctgcaccaaaaactttaggattcaatttggaaagtggttggggctctggaagagctggaccaagctatagtatgccagtgcatgctgcagtacagatgacaactgaacagcttaaaacagaatttgacaaattgtttgaagatttaaaagaagatgataaaacccatgaaatggaaccagctgaggctattgaaacaccactgcttccacatcaaaaacaagctctagcttggatggtgtcacgggaaaatagcaaagaacttccaccattctgggaacagcgaaatgacttatactataacacaataacaaatttttctgagaaggaccgaccagaaaatgtccatggaggaattttagctgatgatatgggtttgggtaaaactcttacggccattgcagtaatccttaccaacttccatgatggcagacctcttcctattgaaagagttaaaaagaatctactgaagaaggaatataatgttaacgatgactctatgaaacttggaggaaacaataccagtgaaaaggcagatggactaagcaaagacgcatctagatgtagtgaacaacccagtatttcagatatcaaggagaagagtaagtttcgcatgtcagaattgtctagctcccgccccaaaagaagaaaaactgctgtccagtacatagaaagcagtgattcagaggaaattgaaacaagtgaattgccgcagaaaatgaaaggcaaactgaaaaatgtacagtctgaaactaaaggcagggcgaaagcaggatcttctaaggttatagaagatgtggcatttgcatgtgcattaacttcatctgttcctacaacaaaaaagaaaatgttgaaaaagggagcttgtgcagtggaggggtcaaagaaaactgatgttgaggagagaccaagaacaacactgatcatctgtccgctttctgtgttaagcaactggattgaccagtttggacaacatataaaatcagatgtacacttgaatttttatgtttattatggtcctgatcgtattagagaaccggccttactttcaaaacaggatattgttttgactacgtataatattttaactcatgactatggaactaaaggagatagtccattacatagcataaggtggctaagagtgatcctggatgaaggacatgccatacgaaatccaaatgctcagcagacaaaagctgtacttgacttagaatcagaaagaagatgggttttgacaggtactccaatccagaattctttaaaggacttgtggtctcttctttcctttttaaaacttaaaccatttattgatagagaatggtggcatagaacaatacagcgtcctgtcacaatgggagatgaaggaggacttaggcgtttacagtccctaattaaaaatattacacttagaagaacaaagacaagcaaaattaaaggaaaacctgttttggagttaccagaacgtaaagtatttattcagcacattacactttcagatgaagagagaaagatttatcagtctgtgaaaaatgaaggcagagccactattggaaggtattttaatgaagggactgtcctggcacattatgcagatgtcctgggtcttttgcttagactgcggcaaatttgttgccatacttaccttcttacaaatgcagtgtcttccaatggcccctcaggaaatgatacacctgaagaactgagaaagaagttaataaggaagatgaagttaattctgagctcaggttcagatgaggaatgtgcaatttgcctggattctttaacagttcctgtgataacacattgtgcacatgtattttgtaaaccctgtatttgccaagtcattcagaatgagcagccacatgctaaatgccctttatgcagaaatgatatacatgaagataatttattagaatgtcctccagaagaattagcacgtgacagtgagaaaaagtctgatatggaatggacatccagttcaaagattaatgcgctaatgcacgcattgactgacttaagaaagaagaatcccaacataaaaagtttggttgtttctcagtttacaacattcctgtctttaatagaaataccacttaaagcctctggatttgtgtttactcgtttggatggttccatggcccaaaagaaaagagttgaatcaattcagtgttttcaaaacactgaagcaggatctccaactataatgcttctgtccttaaaagcaggtggagttggtttgaatctgtctgcagcttctcgagtgtttttaatggatccagcctggaatcctgctgctgaagatcagtgctttgacagatgccatagacttggtcagaagcaagaagttatcatcacaaaattcattgtaaaggactctgttgaagaaaatatgctgaaaatacaaaacaaaaagagagaacttgcagcaggagcctttggaactaaaaaaccaaatgctgacgaaatgaaacaagccaaaattaatgaaatcagaacattaattgacttataatttgtgggattttagtaaggtcagtttgattggatacttaagttttagaaatgagaaaaatacagagttttagaaatgagatctagagaacacgtcttctaaaaggggcatattttatattagtgaagaggtattactgacacaatttcttctatatatgaacctatttttaatgaaacttcaaatagcaataagttccgttatatactgtggcctgaaataatttgagaaaaaaggttactttgttattcagcttttcataatatctatgctgagtattttcacgtatcttccaagtactcagctttttcgtatttcaaataaggtcagaccttttatacttttgaccaaatagttattttctatgttggacacttagttatttaccaaagcctccgatttgtgatgcagtgtttgtagtccttgtaaacaatatatacagactatacaagaattaattttattgggctttcaaaaaccatatttgcattccagaaccaaatcttaaatgagaccaaagtccaggttagcacaggtttttatttttcctacagctacattgagatatagttcacataaatgacttggagttttatgttcatgaaaaaattagggattatgttaagagtactattttttccattttagttaagtagtactacactcattgtttaaatgtaacttgctgtgtctgaggtataaatatagtctgtgggagtgagaggcaaaccagtcctacccaatttgatttgaatattttaaattatggaactgctaaatagatatttctataaatagataatttttatttatgtagctttttttggaagtaactttataaatttttataattcagaagactactatatgtgagaggcgtgatatctggatggaagttgggctggatgatctccaaagtcgtttcaactcttaaagacatcttaatcctgaatgtaaacaattgttatgtgtttagaatcagaatttgattttgaacttgagtaattcatccttacagctatctgtagaattagtcatcttttttcttttcttttttttttacttttttgttaataagcaaacttatttgctgcagaatttgggttgactcctgagcatatttaaaacaaagaagctagaaatttagcagtcagattaggtaggtggttttatttcaaagggaaactttaatccaaagaaagattaattactctaacaaacaagagaagcttcatgtttgatgatacagatttaagaatacctgagacttaagagtgttggaagtcatttgatagaaagatgagatcggagacaatgttgtgttatagggcacacattgaaggtatatgccaaatctctcaccagataagtccttttctccctgtgccgttttcttgctcaaagggaacagtgaattagccagctagaatcttcctggtccctttttgaggcagtagcaggtaaggaaagggctgattttcatcaaaaccaagacctttctgcagggatgatagtggaataataatgtgggattagcccgctagcattaggagcagttgggaagttacctggtagatcaagcattacacacaaaaaatcaagttgatcagagtatgggttctccatatagcaatacttcagtgagattaagtataaacagtttttggcaaaaaacaacacagtctactctttctgcttacaaagacaaagccttacaaactcactatgaaggtaaagggaggacagcttgcttctttgcccagacatttacaaagttgtttttaaaacacactcataagtaagtttggcaagttgtttaaaaaatgtctctttgttttgtacagttctgttagatgttgttatattttaaaagtttaatttaaaaaatttaatttgtccttcctaagaaggataaatatataaaaaagccactggaatgaaaacttcctatatgctatgctgttgtcttattattatatagaaaaataactttagaaaaatattgaagacattgtattaccacttgtgattcaaacaattttgtggttaaaactggattttaaatttaaaaatcaataaaaatttcaaatgtttattaccttc

SEQ ID NO: 134853 - DNA, 3030 bp, Artificial Sequence
  derived and/or modified sequence
atgagctggatgtttaagcgtgaccccgtctggaagtacctccaaaccgtgcaatacggagtgcacgggaacttccctcgcctttcttatccaactttcttcccacgatttgaattccaagacgtgatcccgcccgacgacttcttgacaagcgatgaagaagtggactctgtgcttttcggttcgctccgcgggcatgtggttggcttgcgatactataccggtgtcgtgaataataacgagatggtggctctccaaagagatcccaacaacccatatgacaagaacgccatcaaagtgaacaacgtcaatggtaatcaggtgggccatttgaaaaaggaactggccggtgcactggcctacatcatggataacaaactggcacagattgaaggggtagtgcccttcggggctaacaacgccttcaccatgcctttgcatatgacgttctggggaaaagaagaaaaccgaaaggcagtgagcgatcaactgaagaagcacggctttaaactcggccctgcccccaagaccctgggattcaatcttgagagcggatggggctccggccgagctggaccctcctactctatgcccgtccatgctgccgtgcagatgaccaccgagcaactcaaaaccgaattcgataagttgttcgaggatctaaaagaggacgacaaaacgcacgaaatggaaccggcggaggcaattgaaaccccactcctcccacaccagaagcaagcactggcctggatggtttctagagagaacagtaaggaattgcccccgttctgggaacagcgcaatgacctgtattataatactataaccaacttttcagagaaagaccgcccggagaacgtccacgggggcatacttgccgatgatatgggactggggaaaactttgactgcaatcgctgtgatccttacgaacttccacgatggccggcccctcccaatcgagcgggtgaaaaaaaatctgttgaagaaagagtataacgttaacgacgattccatgaaacttggagggaacaacactagcgagaaagcggacggcctaagcaaagacgcttccagatgtagcgaacagcctagtatatctgatattaaggaaaaatctaaattccgaatgagcgagttaagcagcagccggcccaagaggcggaagacagcggttcagtacatcgagtcctccgacagtgaggagattgagacctccgaacttccccagaaaatgaaaggaaagctcaaaaatgtgcagagtgagactaaggggagagcaaaggctgggagcagcaaagtaattgaggatgtcgctttcgcttgtgccctaacttctagtgtgcctaccacgaagaagaagatgctcaagaagggtgcctgtgctgtggaggggagcaaaaagacagacgtcgaagaacggcctcggaccactctcatcatctgcccacttagcgtgttatccaactggattgaccagttcgggcaacacatcaagagcgacgtccacctcaacttttatgtctactacggccctgatcgaatcagagaacctgccctactctccaaacaagatattgtcctgaccacttataacatccttacccacgactatggcaccaaaggagattcaccattgcacagcattcggtggcttcgagttatacttgacgaagggcatgcaatccggaatccaaacgcccagcagacaaaagcagtgctggatctggaatcagaaagacgctgggtcctgaccggcaccccgatccagaattccctcaaagatctctggtctctcctgtccttcctcaagcttaaacccttcattgaccgcgaatggtggcaccggacaatccagcggccggtgaccatgggtgacgaaggaggacttcggcgcctgcagtccctgatcaagaacattacgcttcgaagaactaaaactagcaagattaagggaaaacctgtgctggagttacccgagcgtaaggtattcattcagcacattacactttctgacgaggagcggaagatctatcagtcagtgaaaaacgagggcagggctactatcgggagatatttcaatgaaggcacagtgcttgcccattacgcagatgttctaggactactgttgcgtctgcgccaaatctgttgccacacctacttgctcaccaatgccgtttcgagcaatggtccgtctggcaacgacacacccgaggaactccgaaagaaactgatacggaaaatgaagctgattctctctagcggatcagatgaggaatgtgccatctgcctggacagtctgacagtgcccgttatcacccattgtgctcatgtgttctgcaagccttgcatctgtcaggtgattcagaatgaacagcctcacgctaaatgtccattgtgcaggaatgacatccacgaagataatctgctagagtgtcctcctgaagaactggcccgcgatagcgaaaaaaagagcgacatggagtggacaagctctagcaaaataaacgctctgatgcatgcattaactgacctgcggaagaaaaaccctaatatcaagagcctggttgtctcccagtttaccaccttcttgagcttgattgaaataccactgaaagcaagcgggttcgtgtttacgaggctggatggttccatggcccagaagaaaagagtcgagagtatacagtgttttcaaaacacagaagccggcagtcctaccatcatgctgctgtccctcaaggcagggggggtgggactaaacctaagtgccgcctcgagggtgtttcttatggatcccgcctggaacccagctgctgaagaccagtgttttgatcggtgccatcggctgggccagaaacaggaggtaattatcaccaaattcatcgtcaaggatagtgtcgaagagaatatgctgaaaatccagaacaaaaaacgtgagctagctgcaggtgccttcgggacaaagaagcctaatgccgacgaaatgaagcaggccaaaattaatgaaatcagaaccctcatcgatttgtag

SEQ ID NO: 134854 - DNA, 3030 bp, Artificial Sequence
  derived and/or modified sequence
atgagctggatgtttaaaagagatccagtctggaaatatttgcagactgtgcaatacggagtgcatgggaactttccccgcctgagttacccaacctttttcccccgtttcgagttccaggatgtgattccgcctgacgattttctgaccagcgacgaagaggtagactccgtgctgtttggctccctgcgcggtcatgtggttggactaagatactatacgggggtcgtgaacaataacgagatggtggcgctccagagagatccgaataacccatacgataaaaatgccattaaggtcaacaatgtcaatggtaaccaagtgggccatttgaagaaagaactggcaggcgccctggcatacatcatggataacaaacttgcacagattgagggagtggtcccattcggagcaaataacgcctttacaatgccgctccacatgacgttttggggtaaagaagaaaaccgcaaggccgtctcagaccagctgaaaaagcatgggtttaagcttggtccggctccgaagaccctaggattcaatctggagagcggttgggggagcggaagggccgggccaagctacagcatgcctgtgcatgctgctgttcagatgacgactgaacagctcaaaactgaatttgataagctgttcgaagacctgaaggaggatgacaagacacacgagatggagccggctgaggcgatcgaaacccccctcctgccccaccagaaacaggcactggcctggatggtgagtcgggagaattcaaaggaactgccccctttctgggagcagcgcaatgatctatattacaataccatcactaactttagcgaaaaggacagaccagaaaacgttcacggggggatcctggcagacgacatggggctgggaaaaacccttaccgccattgccgtcatcctgaccaatttccacgacgggcgcccattgccgatcgaaagagttaaaaaaaacctactcaaaaaggaatataatgtcaacgatgactccatgaaactggggggcaataatacttcagaaaaggctgacggactgtccaaggatgcctcccggtgttcagagcagccctctatcagcgacatcaaggagaaatcaaaattcaggatgtctgagctgtccagtagccgccctaagcgccgcaaaacagctgtgcagtatatagagtcctcggacagcgaagaaatagaaaccagcgagctgcctcagaagatgaagggaaaactgaaaaacgtccagtcagagacaaaaggcagggccaaagctggatcttccaaagttatcgaagacgtcgccttcgcttgtgcacttacgtcctctgtccccacaaccaaaaagaagatgctgaaaaagggagcttgcgctgttgaaggctccaagaaaacggatgttgaggagagaccgcgcaccaccttgattatatgcccactgagcgtgttgagcaactggatcgatcagttcggccagcacataaagtccgacgtccatctgaatttctacgtgtactatggacctgaccgcatcagggagcccgcgctgctgtccaagcaggatattgtgcttacgacctataacattttaactcacgactacgggactaaaggggactctccgctccactctatacgatggttacgggtcattcttgatgagggacacgcaattcggaaccccaatgcacagcagactaaggcagttctggatctcgaaagcgagcgtcgctgggtgctcactgggactcctattcaaaacagcttgaaggatctttggagtctgctgtcattcctgaaattaaagcccttcatcgaccgcgagtggtggcacaggacaatccagaggcctgtgacgatgggagacgagggcgggctgcgaaggctgcaatctctgatcaagaacataacgttaaggcgaactaaaaccagcaaaataaagggaaagcctgtgttggagctgccggagaggaaggtgttcattcaacatatcaccttaagcgacgaggaaaggaaaatttatcaatctgtgaagaacgaaggaagggcaacaataggacgctacttcaatgaaggcactgtcctggcccattacgcagacgtccttggactcctcctgcggctacgccaaatttgttgtcacacgtacctgctgactaacgcggtgagtagcaacggaccaagcggtaatgatacccccgaagagctgagaaagaagttgattcgaaagatgaaactgatcttatcatccggctccgacgaagaatgcgctatctgcttggacagtttaaccgttccagttatcacacattgtgcacacgtcttctgcaaaccatgcatatgtcaggtaatccagaacgagcagccacacgctaagtgccctctatgtcggaatgacatacacgaggacaacctgctggaatgtccgccagaggagttagcaagagactcagaaaagaagtccgacatggagtggaccagttcctctaaaatcaacgctctcatgcacgcactcactgatctcaggaagaaaaatccaaacattaaaagcctcgtggtgagccaattcacaacctttttatctctgatcgagatacctctgaaggcctcaggcttcgtctttactcgactggacggttcaatggctcagaaaaaaagggtcgaaagtattcaatgcttccaaaataccgaggccggaagcccaactattatgttgcttagcctcaaggccgggggtgttggccttaacctgagcgcagcgtcacgcgtttttctaatggacccagcttggaatccagccgcggaggatcaatgttttgatcggtgccatcggctggggcagaagcaagaagttatcattacgaagtttatcgtcaaggacagcgtggaggagaatatgctgaaaattcagaacaagaagagggagctggcagcaggtgccttcggcacaaaaaaacccaacgccgacgagatgaaacaagcgaagataaatgagatccgtacccttatcgatctgtag

SEQ ID NO: 134855 - DNA, 1374 bp, Artificial Sequence
  derived and/or modified sequence
atgtttaagcgggatccagtgtggaaatacttgcagacagttcaatacggggtccatgggaacttccctcggctttcttaccctacgttcttcccgaggtttgagtttcaggatgtgattccgcccgacgattttcttaccagcgacgaagaagtcgatagcgtactgtttgggtcattgcgtggtcacgtggtaggcttacgttattacaccggagtagttaataacaacgagatggtcgcacttcagagggaccccaacaacccttacgacaagaatgcaataaaagtaaacaacgtgaatggcaatcaggtgggtcacctgaagaaggagttggcaggtgcccttgcatatatcatggacaataaactggctcaaatcgagggggtcgtccctttcggagcaaataacgccttcactatgccccttcacatgactttctggggcaaggaagagaaccgcaaagccgttagcgaccaactgaagaaacacgggttcaagctgggcccggcacccaaaaccctcgggttcaacttagaatcgggatggggatctggccgggcaggacctagctacagtatgccagtgcatgccgctgtgcagatgacaactgaacagctgaaaacagagtttgacaagctcttcgaggacctgaaggaagacgataaaacccacgaaatggagcccgccgaggctatagaaacaccacttctcccacaccagaagcaggctctcgcttggatggtcagccgagagaatagtaaggaactgcccccattctgggaacagaggaatgacttatattataatactattacaaacttttcggagaaggaccgacctgaaaatgtccatggcggaatactggccgacgacatggggctgggcaaaaccttaacagcaattgccgtgatactgaccaactttcacgatggtaggccacttccaattgaacgggtcaagaagaacttgctgaaaaaggagtataatgtgaatgacgacagcatgaagctaggcggaaacaatacgtccgaaaaagccgatggcctcagtaaggacgcctcacggtgctcggaacagccttctatatctgacatcaaggaaaaaagcaagtttcgaatgtctgaactgagctcttcacgtccaaagcgaagaaagaccgccgtccagtacattgaaagttctgactccgaggaaattgagacaagtgagctaccacagaagatgaaaggcaaactgaaaaatgttcagtccgagacaaagggcagagcgaaggcaggttctagtaaggtcatcgaggatgtagccttcgcatgtgcactgacgagttcagtacccacgaccaagaagaaaatgttgaagaaggtgaagtag

SEQ ID NO: 134856 - DNA, 3030 bp, Artificial Sequence
  derived and/or modified sequence
atgtcctggatgtttaagcgggatcctgtctggaagtatctacagacagtgcagtacggcgtccacggcaattttcctaggctctcttacccgaccttttttccaaggttcgaatttcaggatgtgatacctccagacgacttcctcaccagcgatgaagaggtggactctgttctgtttggttcgctgcgaggacatgtggtgggtttacgctattatacgggtgtggtgaacaacaatgagatggtagcattgcagcgtgacccaaacaatccttatgataaaaacgccattaaggtgaacaatgtcaacgggaatcaagtgggccatctgaagaaagaactggcaggtgctttggcatatatcatggacaacaagctggcccagatcgagggagtggtccctttcggcgcaaataatgccttcacaatgccactgcatatgaccttttggggaaaggaggagaacaggaaagcggtgtccgatcaactcaaaaagcacggttttaagctcgggcctgctccaaagacccttggatttaacctcgaaagcggctggggcagtgggcgcgcgggcccttcctacagcatgccggtccacgcagcagtccaaatgacaactgaacaactgaaaactgagtttgataaactgttcgaggatcttaaggaagacgacaagactcacgaaatggagcccgcggaagcgatcgagacccctctcttgcctcaccaaaaacaagccctcgcctggatggtttctagagaaaacagtaaggaacttccccccttttgggaacaaagaaatgatctgtattataataccataaccaatttctccgagaaagacagacccgagaacgtccacggcggcattctcgccgacgatatgggactgggaaagaccctcaccgccatcgccgtgatactgactaactttcatgacgggcggccgttgcctattgagagagttaagaaaaatctgttgaagaaagagtataacgttaacgatgattccatgaaacttgggggcaacaacacgagcgagaaagccgatggcctcagcaaggatgcatccaggtgctccgagcagcccagcatcagcgacatcaaggagaaatcaaagttccgcatgtcagagctctcttccagtcgcccaaagagaagaaagacagcggtgcagtacatcgaatcttctgacagcgaggagattgaaacttccgagctgccccagaagatgaagggaaaactgaaaaacgtgcagtccgaaactaagggtcgcgcaaaagctgggagtagcaaggtgattgaagatgtcgccttcgcttgcgctttgaccagtagcgttcccacaaccaagaaaaagatgttaaagaaaggagcttgcgccgttgaaggctccaagaaaactgacgtggaggaacggcccagaacaactctcatcatttgtcctctgagtgtcctttccaactggattgatcagttcggccagcatatcaaaagtgacgttcacctcaatttttacgtgtactatgggcccgacagaatcagagagcctgccttgttgtctaaacaggatattgtccttaccacttacaatatcctcacccacgattatgggactaaaggggactccccactccattctattagatggctccgcgtgattctcgacgaaggtcacgctatccgcaaccctaacgcgcagcagacaaaagccgtgctcgacctggagtccgagaggaggtgggtcttgactgggacccccattcagaattctctaaaagatctgtggagcctccttagtttcctaaaactcaagccttttatcgatcgcgaatggtggcatcgcactatccagagacccgtgaccatgggcgacgaaggcggcttgagaagactgcaatcattaatcaagaatattacgctgcggagaaccaaaacatccaaaatcaagggaaagccagtgctggaacttccagaaagaaaggtctttatacagcatatcaccctgtccgacgaggagcggaagatctatcagtcagtgaaaaacgagggaagagctactatcggacgttattttaatgaaggaaccgttctggctcattatgcagacgtgctgggactgctactgagactcaggcagatctgctgccatacttatttgctgactaacgcggtgtcatccaatggtccctcaggaaatgacaccccggaggaactccggaaaaaactgatcaggaaaatgaagcttatactaagctcagggagcgatgaagagtgcgcaatctgcttagatagcctcacagtgcctgtcatcacacattgcgcccacgtattctgcaagccctgcatctgtcaggtcatacagaacgagcagccgcatgccaaatgtccactttgtagaaatgacattcatgaagataatcttttggaatgccctcctgaagagctggccagggatagtgagaagaaatccgatatggagtggaccagctcgtcgaaaatcaacgccttaatgcacgctttgaccgacttgagaaagaagaaccccaacatcaagtcccttgtggtcagccaattcacgactttcctgtcattgatcgagatccccctcaaggcctccggctttgtgttcaccagattagacggtagcatggctcaaaagaagcgggtcgagtcaatccaatgctttcagaatacagaggccggaagtccgacgatcatgctgctcagcctgaaggctggcggcgttggcttaaacctctctgccgccagccgcgtgttccttatggacccggcctggaaccctgccgccgaagatcaatgttttgatagatgtcacaggttgggccagaagcaggaggtgattatcacgaagttcatcgtcaaggactcggttgaagaaaacatgttaaagatccagaacaaaaaaagggagctcgcagcaggagccttcggaactaagaaacctaacgctgatgaaatgaagcaggctaagattaacgagatccgtaccctgatcgacctttag

SEQ ID NO: 134857 - DNA, 3030 bp, Artificial Sequence
  derived and/or modified sequence
atgtcctggatgttcaagagggaccctgtgtggaagtacctgcagacagtgcagtatggagtgcacggcaacttcccccggctgagctaccccaccttcttccccaggtttgagttccaggatgtgatccccccagatgacttcctgaccagtgatgaggaggtggacagcgtgctgtttggcagcctgcggggccacgtggtgggcctgcgctactacacaggagtggtgaacaacaatgagatggtggccctgcagagggaccccaacaacccctatgacaagaatgccatcaaggtgaacaacgtgaatggaaaccaggtgggccacctgaagaaggagctggccggggccctggcctacatcatggacaacaagctggcccagatcgagggcgtggtgccctttggagccaacaatgccttcaccatgcccctgcacatgaccttctggggcaaggaggagaacaggaaggctgtgtctgaccagctgaagaagcacggcttcaagctgggccctgcccccaagaccctgggcttcaacctggagagcggctggggcagcggccgggccggccccagctacagcatgcctgtgcatgctgctgtgcagatgaccacagagcagctgaagacagaatttgacaagctgtttgaggacctgaaggaggatgacaagacccatgagatggagcctgctgaggccatcgagacccccctgctgccccaccagaagcaggccctggcctggatggtgtcccgggagaacagcaaggagctgccccccttctgggagcagagaaatgacctgtactacaacaccatcaccaacttcagcgagaaggacagaccagaaaatgtgcacggcggcatcctggctgatgacatgggcctgggcaagaccctgacagccatcgccgtcatcctgaccaacttccatgatggccggcccctgcccatcgagcgggtgaagaagaacctgctgaagaaggagtacaacgtgaatgatgacagcatgaagctgggcggcaacaacaccagcgagaaggcagatggcctgagcaaggatgccagccgctgcagcgagcagcccagcatcagtgacatcaaggagaagagcaagttcaggatgtctgagctgagcagcagccggcccaagaggaggaagacagctgtgcagtacatcgagagcagtgacagcgaggagattgagaccagcgagctgccccagaagatgaagggcaagctgaagaatgtgcagagcgagaccaagggccgggccaaggccggcagcagcaaggtgattgaagatgtggcctttgcctgtgccctgaccagctctgtgcccaccaccaagaagaagatgctgaagaagggggcctgtgctgtggagggcagcaagaagacagatgtggaggagcggcccaggaccaccctcatcatctgccccctgtctgtgctgagcaactggattgaccagtttggccagcacatcaagagtgatgtgcacctgaacttctacgtgtactacggccctgaccgcatccgggagcccgccctgctgagcaagcaggacatcgtgctgaccacctacaacatcctgacccatgactatggcaccaagggggacagccccctgcacagcatccgctggctgcgggtcatcctggatgagggccacgccatccggaaccccaatgcccagcagaccaaggctgtgctggacctggagagcgagcggcgctgggtgctgaccggcacccccatccagaacagcctgaaggacctgtggagcctgctgtccttcctgaagctgaagcccttcatcgaccgggagtggtggcacaggaccatccagaggcctgtgaccatgggagatgagggcggcctgcggcggctgcagagcctcatcaagaacatcaccctgcggaggaccaagaccagcaagatcaagggcaagcctgtgctggagctgcctgagaggaaggtgttcatccagcacatcaccctgagtgatgaggagaggaagatctaccagagcgtgaagaatgaaggccgggccaccatcggccgctacttcaatgaaggaacagtgctggcccactatgcagatgtgctgggcctgctgctgcggctgcggcagatctgctgccacacctacctgctgaccaatgctgtgagcagcaatggccccagcggaaatgacaccccagaggagctgaggaagaagctgatcaggaagatgaagctgatcctgagcagcggcagtgatgaagaatgtgccatctgcctggacagcctgactgtgcctgtgatcacccactgtgcccacgtgttctgcaagccctgcatctgccaggtgatccagaatgagcagccccacgccaagtgccccctgtgcagaaatgacatccacgaggacaacctgctggagtgccccccagaggagctggcccgggacagcgagaagaagagtgacatggagtggaccagcagcagcaagatcaatgccctgatgcacgccctgacagacctgaggaagaagaaccccaacatcaagagcctggtggtgtcccagttcaccaccttcctgagcctgattgagatccccctgaaggccagcggctttgtgttcacccggctggatggctccatggcccagaagaagagggtggagagcatccagtgcttccagaacacagaggccggcagccccaccatcatgctgctgagcctgaaggccggcggcgtgggcctgaacctgtctgctgccagcagggtcttcctgatggaccctgcctggaacccagctgctgaggaccagtgctttgaccgctgccaccggctgggccagaagcaggaggtgatcatcaccaagttcatcgtgaaggacagcgtggaggagaacatgctgaagatccagaacaagaagcgggagctggccgccggggccttcggcaccaagaagcccaatgctgatgagatgaagcaggccaagatcaatgagatccgcaccctgattgacctgtag

SEQ ID NO: 134858 - DNA, 1374 bp, Artificial Sequence
  derived and/or modified sequence
atgttcaagagggaccctgtgtggaagtacctgcagacagtgcagtatggagtgcacggcaacttcccccggctgagctaccccaccttcttccccaggtttgagttccaggacgtcatccccccagatgacttcctgaccagtgatgaggaggtggacagcgtgctgtttggcagcctgcggggccacgtggtgggcctgcgctactacacaggagtggtgaacaacaatgagatggtggccctgcagagggaccccaacaacccctatgacaagaatgccatcaaggtgaacaacgtgaatggaaaccaggtgggccacctgaagaaggagctggccggggccctggcctacatcatggacaacaagctggcccagattgaaggagtggtgccctttggagccaacaatgccttcaccatgcccctgcacatgaccttctggggcaaggaggagaacaggaaggctgtgtctgaccagctgaagaagcacggcttcaagctgggccctgcccccaagaccctgggcttcaacctggagagcggctggggcagcggccgggccggccccagctacagcatgcctgtgcacgccgctgtgcagatgaccacagagcagctgaagacagaatttgacaagctgtttgaggacctgaaggaggatgacaagacccatgagatggagcctgctgaggccatcgagacccccctgctgccccaccagaagcaggccctggcctggatggtgtcccgggagaacagcaaggagctgccccccttctgggagcagagaaatgacctgtactacaacaccatcaccaacttcagcgagaaggacagaccagaaaatgtgcatggaggcatcctggctgatgacatgggcctgggcaagaccctgacagccatcgctgtgatcctgaccaacttccatgatggccggcccctgcccatcgagcgggtgaagaagaacctgctgaagaaggagtacaacgtgaatgatgacagcatgaagctgggcggcaacaacaccagcgagaaggcagatggcctgagcaaggatgccagccgctgcagcgagcagcccagcatcagtgacatcaaggagaagagcaagttcaggatgtctgagctgagcagcagccggcccaagaggaggaagacagctgtgcagtacatcgagagcagtgacagcgaggagattgagaccagcgagctgccccagaagatgaagggcaagctgaagaatgtgcagagcgagaccaagggccgggccaaggccggcagcagcaaggtgattgaagatgtggcctttgcctgtgccctgaccagctctgtgcccaccaccaagaagaagatgctgaagaaggtgaagtag

SEQ ID NO: 134859 - DNA, 3030 bp, Artificial Sequence
  derived and/or modified sequence
atgagctggatgttcaagcgggaccccgtgtggaagtacctgcagaccgtgcaatacggcgttcacgggaatttcccgcgactttcttatcccaccttctttccccgatttgaatttcaggatgtgatccctccagacgatttccttacaagcgacgaagaggttgacagcgtgttgtttggtagtcttagaggtcacgtggtgggtttacgttactacacaggtgttgtgaataataacgagatggttgccctgcagagagaccctaataacccgtacgacaagaacgccatcaaagtgaataacgtgaacgggaaccaggttggccacctgaagaaggagctggccggggcattggcatatattatggataacaagctggcacagattgagggtgttgtgccatttggggccaataacgcatttacaatgcctttgcacatgacattctggggcaaggaggaaaatcggaaagcagtgagtgaccagctcaagaagcatggtttcaagttgggtcccgctccaaaaacgctggggtttaacttggaatcagggtggggaagcggaagggccggtccgagctacagcatgccggtccacgccgccgtgcagatgacaactgagcaactgaaaaccgaatttgacaagctgttcgaggatctgaaggaagatgacaagacgcacgagatggagcctgccgaagcaatagagactcccttgttaccacatcagaagcaagccctggcttggatggtgtcaagagagaattcgaaggagctgccgcctttctgggagcagcgcaacgacttgtattacaatacgatcactaacttcagcgagaaagatcgtcccgaaaacgtccacgggggcatcctggcagacgatatggggctgggaaagacgctcacagccatcgcagtgatcctgacaaatttccatgatggtcggccgctgcccattgaaagggtgaagaagaacctgttgaagaaggaatacaatgtcaacgacgatagcatgaaactggggggaaacaacacctcagagaaagctgatgggctatcaaaggacgcctctcggtgttccgagcagcccagcatctctgacattaaagagaaatctaaatttagaatgtccgaactctccagttcacggcctaagcgtcgcaaaaccgctgttcagtacatcgaaagctcagattccgaggaaattgaaaccagcgagctcccccagaagatgaaaggcaaacttaaaaatgtacagagcgagaccaagggccgagcaaaggcgggttcttcaaaggtcattgaggacgtggcattcgcctgcgctcttacctcatccgtgcccactacgaagaagaaaatgctgaagaaaggcgcctgcgctgttgagggatccaagaagaccgatgtcgaggagaggccgcgcacgacccttatcatctgtccattgtccgtgctcagcaattggatcgaccaatttggccaacatattaaaagcgacgtacatctcaacttctacgtatactatggacctgatagaattagggagcctgccttgttaagtaaacaggatatagtgctcaccacctataacatcctgacccatgactacggcactaaaggagattccccgctgcattcaatccgatggctgagggtgattctggacgagggccatgccataaggaaccctaacgcccagcaaactaaggctgtgttggatctggagtccgagcgacggtgggtactcacaggtacccccatccagaattccctcaaagatctgtggagtctgctttctttcctgaagcttaagccctttatcgaccgggagtggtggcaccgtaccatccagaggcctgttactatgggggatgaaggcggtttgagacggcttcaatccctaatcaagaatatcacacttcgtcgcacgaaaacaagcaagattaaggggaaaccagtactggagctgcccgagcgaaaggtgtttatacaacatatcaccctgtccgacgaggagcgcaaaatttatcagtctgtcaagaacgaggggcgggccaccattggccggtatttcaatgaaggtacagtcttagctcactacgctgacgttcttggactgctgctccggctccgccagatatgttgccacacctacctgctcactaatgctgtgtcctctaatggaccgtcaggcaacgatactccagaggagctcagaaagaagctcataagaaagatgaagctcattttatcctcaggatcggatgaggaatgtgctatctgcctcgactccctgaccgttccagtgattacacactgcgctcacgtgttctgcaaaccttgtatttgccaggtgatacagaacgaacaaccacatgcaaagtgccccctgtgtagaaacgatatccacgaagacaacctcctggagtgtccacccgaagaactcgccagggactcagagaagaagtctgatatggaatggaccagctccagcaaaatcaatgctctcatgcatgcccttaccgatcttcgtaagaagaatcccaatatcaagtcgctggttgtctcacagttcacaactttcctctccctgatcgagattccattgaaggcttcaggatttgttttcactcgcctcgacggttccatggctcaaaaaaaacgcgtggagtctatccaatgttttcagaacacggaggcaggatctccaactatcatgcttctgtcgctgaaggctggtggtgttggccttaatctgtccgctgcgtctcgtgtcttcttgatggatccagcctggaaccctgctgctgaagatcaatgcttcgacagatgccatcggctaggccaaaagcaggaggtaattatcacaaaattcattgtcaaggactccgtggaggagaatatgctcaaaattcaaaacaagaagcgcgaattggcggccggcgcctttggaacgaagaagcccaacgcggacgaaatgaagcaggctaaaattaacgaaatccgtacgcttatcgacctgtag

SEQ ID NO: 134860 - DNA, 3030 bp, Artificial Sequence
  derived and/or modified sequence
atgagctggatgttcaagcgggaccccgtgtggaagtacctgcagacggtgcagtatggcgttcacgggaactttccccgtttatcttacccgaccttctttccaaggttcgagtttcaagacgtgatccccccggacgattttttaacatccgatgaagaagtggatagcgtgctttttgggtcactccgggggcacgttgttggattaaggtactataccggcgtcgttaataataacgagatggttgcactgcagcgcgaccccaataacccatatgacaagaacgcgattaaagttaacaatgtgaatgggaatcaggtcggtcatttaaagaaagaacttgcaggagccttggcgtatatcatggacaacaagctggctcaaattgaaggggttgtgcccttcggggcgaacaacgcgttcacaatgcctctgcatatgacattttggggcaaagaagaaaatcggaaagccgtgtcagaccagctgaaaaagcacggttttaaactgggacctgcgccaaaaacattaggttttaacctggagtcaggctggggctcaggacgagctggtccttcgtatagtatgccagtgcatgcggccgtgcagatgactaccgagcagctgaagacagaatttgacaagctcttcgaagacttgaaagaggatgataaaacccatgagatggaacctgcagaagctattgaaaccccactgctcccacaccagaagcaggcccttgcctggatggtctcgcgagagaattccaaggaactcccgcctttctgggagcagagaaacgacctgtactataacacaatcacaaatttctcggagaaagaccgccccgagaacgtgcatgggggtatactcgccgatgatatggggctgggaaagacactgaccgctatcgctgtaatcctgacaaacttccacgatggcagaccgctgcctatagaaagggtcaaaaagaacctgctcaaaaaagagtacaatgttaatgatgactccatgaaactgggcggcaataacacttccgagaaagccgatgggctaagcaaggatgcgtctcgctgttccgagcagccatcaatctccgatatcaaagagaagtcaaaatttcgtatgagtgagctgtccagcagtagaccaaagagacgaaagaccgccgtacaatacatagaatcatccgattccgaggagatcgaaacctcagaattgcctcagaagatgaaaggcaaactgaaaaatgtacagtctgagaccaagggtcgcgcgaaggccggctctagcaaagtgatcgaggacgtagcatttgcatgcgcactgactagctccgttccaacgacaaagaagaagatgcttaagaagggggcatgcgcagtcgaaggaagcaaaaagaccgatgtcgaagaaagaccacgtacaacacttatcatctgcccactgtccgttcttagtaactggatcgatcagttcggtcagcatatcaaatcagacgtccacctcaatttctatgtctactatgggccagacagaatccgagagcccgcgctcttgtccaagcaggatatcgtccttaccacttataacatactgacccacgactacggaacaaagggtgatagccccctgcattccatccgctggttgagggtcattcttgatgagggccatgcgattcgcaatccgaatgcccagcaaacgaaagccgtcctcgacttagaaagcgagaggcggtgggtgctaaccggcaccccgatacaaaatagccttaaggacctctggtcattgctttcattcctgaagctgaaaccctttatcgatagagaatggtggcatagaaccatccaaagacctgtcaccatgggggacgagggcggattgcggagactgcagagtctgattaagaatatcactttgagacgcacaaaaacatccaaaatcaagggcaagcccgtgcttgagctcccagagaggaaagtcttcatccaacacatcacactttcggatgaggaacggaagatttatcagagtgtcaagaacgagggccgcgctaccatcggtcggtatttcaatgagggaaccgttctcgctcactatgccgacgttctgggactgctgctacggctgcggcagatctgttgccacacctacttgctgaccaacgcagtctcctccaatgggccatccggcaacgacacccccgaggagctgcggaagaagctcatccgaaaaatgaagctaatcctgtccagtgggtcagatgaagagtgtgcaatctgcctggattccttaactgtcccagtgatcactcactgcgcacacgtattctgcaagccctgcatatgtcaggtcatccagaacgaacaacctcacgctaagtgcccactttgtcggaacgacatccacgaagataatttgctggagtgtccccccgaagagctcgcaagagactcagagaaaaagtctgacatggagtggacgagtagctctaagattaatgcgctgatgcacgcactgacagatcttagaaaaaagaaccctaacataaagtccctggtggtaagccaatttacaacatttctgagtctgatagagatcccactgaaggcctctggattcgtctttacccggctcgatggctccatggcccaaaagaagcgagtggaatcaatacagtgcttccagaacacagaagctggttctcctaccattatgctgcttagcttgaaggctggcggtgtgggactgaacttgagcgccgcttcccgcgtctttctcatggatcctgcctggaacccagcggctgaggaccagtgcttcgaccgttgtcacagattggggcagaagcaggaggtaataatcactaagtttatagtgaaggactctgtcgaggagaatatgctgaagattcagaacaaaaaaagagaactggcagcaggggcctttgggaccaagaagcccaacgctgacgaaatgaagcaagccaaaattaatgagatcagaaccctcatagacctatag

SEQ ID NO: 134861 - DNA, 1374 bp, Artificial Sequence
  derived and/or modified sequence
atgttcaagcgggaccccgtgtggaagtacctgcagaccgtgcagtatggggtgcacggcaatttcccacggctgtcttaccccaccttctttcctcggtttgaattccaagatgtaattccccctgacgacttcctgacatctgacgaggaggtagatagcgttctatttggatccttgagggggcatgtcgttgggctaaggtattataccggcgtcgtgaataacaacgaaatggtcgcgctccagcgcgacccaaacaatccctatgacaagaatgccatcaaggtgaataatgtgaatggcaatcaggtgggacacttgaagaaggagttggctggagccctggcctacatcatggataacaaattggcccagatcgaaggggttgtgccttttggcgcaaacaacgcctttacaatgccactccatatgaccttttggggcaaggaagagaaccgaaaagcagtttcagatcaattgaagaagcacgggttcaagcttggacctgccccgaagactctaggcttcaatctcgaatccggctggggtagtggaagggcgggccctagttactccatgccagtgcatgcggccgtgcagatgaccacagagcagttgaaaacagaattcgacaagctcttcgaagatctgaaggaggacgataagactcatgaaatggaacccgcggaagcaatcgagactccacttttgcctcatcagaaacaagcactcgcttggatggtgagcagagagaactccaaggagttgccccctttctgggaacagcggaatgacttgtactacaatacgatcactaacttctccgagaaagataggcctgaaaatgtccacggcggtatcctggcagatgacatgggcctcggcaaaaccttaactgccattgctgtgattctgacgaattttcatgacggacggccacttcccattgaaagagtcaaaaagaatctactcaagaaggagtacaatgtcaatgatgattcgatgaagctgggaggcaataatacaagtgaaaaggccgatgggcttagtaaagacgcttcacggtgttctgagcagccaagtattagtgacataaaagagaagtccaagtttagaatgagtgagttgtctagctcaaggcccaaacggcgcaagacagccgtacagtacatcgaaagctcggattccgaagagatcgagactagcgagctgcctcaaaagatgaagggaaagctgaaaaacgttcaaagcgagaccaaggggcgagctaaagcagggtcctctaaggtgatcgaggatgtcgcttttgcatgcgctcttactagttcagtgcccaccaccaagaagaaaatgctgaaaaaagtcaagtag

SEQ ID NO: 134862 - DNA, 3030 bp, Artificial Sequence
  derived and/or modified sequence
atgagctggatgttcaagcgggaccccgtgtggaagtacctgcagaccgtgcagtacggcgtgcatgggaacttcccccgcctttcctatcccactttcttcccccggttcgagttccaagacgtgatccctcccgacgactttctaacatccgatgaggaagtggactcagtgttgttcggttctcttagggggcacgtggtcgggcttcgctactatactggtgtggtcaataacaacgaaatggtggcgttgcagcgggaccccaacaacccctatgacaagaatgctattaaagtgaacaatgtgaacggtaaccaggtagggcacctcaagaaggaattggccggggcattggcttacataatggacaacaaactagctcagattgaaggcgtagtgcctttcggagccaataatgccttcacgatgccactgcatatgactttttgggggaaagaggagaacagaaaggcggttagtgatcaactcaagaagcatggatttaaactcggacccgctccgaagaccctggggtttaatttggaaagcggatggggttccggccgtgccggcccctcctattctatgccggtccacgccgccgtgcagatgacgactgaacagctgaagactgagttcgacaagctgttcgaggacctgaaagaagatgataaaacacacgagatggaacccgccgaagcaatagaaacacccttgctgcctcaccagaagcaagccctcgcctggatggtgtcccgagagaattcaaaggagctgccgcctttctgggaacagaggaacgatctgtactacaacaccatcacaaactttagcgagaaggatcgccctgagaacgtgcatggcgggattctggccgacgacatggggctcgggaagacactcactgccatcgctgttattctcaccaatttccatgacggccggccactaccaattgaaagagtcaaaaagaatctgctgaagaaggagtataacgtgaatgatgattcgatgaagctaggaggcaataacacctcagaaaaagctgacggtctgtcaaaagacgctagcagatgttccgaacagcccagcatctctgatattaaggagaagtccaaatttcggatgagcgaactgtctagcagcagacctaagcgtagaaagaccgctgtgcagtacattgaatcctccgactccgaggagatcgagacaagtgaactcccccagaaaatgaagggaaaactgaagaatgtgcagtctgaaactaaaggtagggccaaggctggcagcagtaaggtgattgaggacgtagcatttgcttgcgccctgacgagcagcgtgcccacaacgaaaaaaaagatgcttaagaaaggcgcctgtgcagtcgaagggtccaaaaaaacagatgtcgaagagcgccctcgcacgacactaataatctgcccactgtccgtgctgagcaactggatcgaccaatttgggcagcatattaagtcagacgtacacctcaatttctacgtttactacgggccagacaggatccgcgagccagcattactcagtaagcaagacatagtcctgactacttataacattttaacacacgactacggaaccaagggtgacagtcccctgcactcaattagatggctgcgggtaatccttgacgagggccacgccattcgtaatcccaacgcccaacaaaccaaagctgttctggacctcgagtctgaacggcgatgggtattaacaggcactcccattcagaattctctgaaagatctgtggtccctgctgagcttccttaagctgaagcccttcattgaccgcgagtggtggcacaggactatccaacgcccagttacaatgggagacgagggtggcctgcgtcggctacagagcctaatcaagaacatcacgctcaggagaacgaagactagcaaaatcaaaggaaaaccagtcctggagcttcctgagcgaaaggttttcatccagcacattacattgtctgacgaggaacggaaaatctatcagagcgtgaagaacgagggacgagcaactatcgggcggtattttaatgagggtactgtgttagcccactatgcggacgtcctcggcctcctgcttaggctgagacagatttgttgccatacctatttgcttaccaatgcggtttccagtaatggaccaagcggtaatgataccccagaggagcttcgcaagaaactgatacggaagatgaagctgattttgtcctccggctccgacgaagagtgcgctatatgtctggattccttaaccgtgcctgttattacacactgtgctcacgtcttttgtaagccttgcatctgccaagtgatccagaacgagcagccgcatgcaaagtgcccactctgccgaaacgatattcacgaagataaccttttggagtgccccccggaagagcttgccagggatagcgagaagaaatcagacatggagtggacctcctcttccaagatcaatgctctcatgcatgcccttaccgatctaaggaaaaagaatcctaatattaaaagcctggtggtgagccagtttacaaccttcctttccctgatagaaattccattaaaggcttctggctttgtgtttacccgcttggacggctcaatggcgcaaaagaagcgcgtggaaagcatccagtgctttcagaacactgaggccggaagtccaacaatcatgctcctgtctctgaaggccggcggagtcggcctgaatttaagtgccgcttctcgcgtcttcttgatggaccctgcctggaaccccgctgcagaagatcaatgttttgacagatgccaccgactcgggcagaagcaggaggtcatcatcacaaaatttatcgtaaaagacagtgtggaagagaatatgctgaagatccaaaacaagaagcgggagctcgccgcgggggccttcggtacgaagaagcccaacgctgatgaaatgaagcaggccaagatcaatgagatcaggacccttatagacctgtag

SEQ ID NO: 134863 - DNA, 3030 bp, Artificial Sequence
  derived and/or modified sequence
atgtcgtggatgttcaagcgagatccggtgtggaagtacttgcagaccgtgcagtacggcgtgcatgggaattttcctcggctctcataccccacttttttccctcgctttgagtttcaggacgtcattcctcccgacgacttcttgacaagcgacgaagaggtggacagcgtgctctttggttctctgaggggtcacgtggtcggacttcgctattatactggcgttgtcaacaataatgagatggtcgcccttcagagggaccccaacaacccttatgataagaacgcaatcaaggttaacaatgtcaatggcaaccaggtcggccaccttaagaaggagttggcgggtgccctcgcgtacatcatggacaataaattggcacaaattgagggagtcgtcccgttcggagccaataacgccttcacaatgcctctccatatgacgttttggggcaaggaagaaaaccgcaaggccgtaagcgaccagttaaaaaagcacggctttaagctggggcctgcaccaaaaactttggggttcaatcttgaatctggctggggttcaggcagagcaggaccaagctactcgatgcctgtgcacgctgccgtacagatgactacagagcagcttaaaacagaattcgacaagctgttcgaggacctgaaggaagacgataaaacacatgagatggagcctgccgaagctatcgagacgcccctcttgccccatcagaagcaggcccttgcttggatggtatctcgcgaaaactcaaaggagctccctcccttctgggagcagcgtaatgatctctattacaacactattacaaacttcagtgagaaggacagacccgagaacgtccatggcggaatcctagctgatgacatgggactgggcaagaccttgactgccattgcagtgatacttaccaactttcacgacgggcgaccactacccatcgagagagtaaagaaaaacttactcaagaaagagtataatgtgaacgatgacagtatgaaattggggggtaataacacttccgagaaagcggacggattatctaaggacgcttctcgatgttcagagcaacctagtatctcagacattaaagagaagagcaagtttagaatgagcgaactcagcagctctagacccaaaagaagaaagacagcagtacagtacatcgaatcaagcgatagtgaagaaatcgagaccagcgagttgcctcaaaagatgaaaggaaagcttaagaatgtacaatcagaaacgaagggcagggctaaagccggaagctcaaaggtgatcgaggacgtggcctttgcatgtgctctgacaagtagcgtaccaacaacaaaaaagaaaatgctcaagaaaggagcttgtgcagtcgaggggagcaagaaaacagacgtggaggagcgcccaaggactactctgataatttgcccactctccgtgctgagcaattggattgatcagtttgggcaacacattaagtcagacgtgcatctgaacttttacgtctactatggcccagaccgcatccgggaaccagccctgcttagtaaacaagatatcgtacttactacttataacattctgacacacgattacgggacaaaaggagattccccccttcatagcattcgctggctgagagtgatcctggatgaaggccatgccatacggaatcctaacgcgcagcaaaccaaggccgtgctcgatctagagtctgagcggaggtgggtgttgaccggcacccccattcagaatagtttgaaggatctctggtccctactgtcattcttaaagctgaagcctttcatcgatagagagtggtggcacagaaccattcagcgcccagtgaccatgggagatgagggtggtctgaggaggctccagagcttaattaaaaatatcactctacggaggactaagacaagcaagattaagggcaagccagtgctcgagctcccagaacggaaggtgtttatccagcacattaccctgagtgacgaggaaaggaagatctaccagtccgtgaaaaatgaagggagggcaactataggtagatactttaatgaagggactgtgctggcccactacgctgacgtgctcggcttgttgctgaggctgaggcagatctgttgccacacatacctcctcactaacgcggtgagttctaatggaccaagcggcaatgacacaccggaggagttgcgcaaaaaactgattagaaagatgaaactgattctgagctcgggtagtgacgaggaatgtgcaatatgtttggacagccttaccgtccctgtgatcacacattgcgcacatgtgttctgtaagccttgtatttgtcaggtcattcaaaatgagcagcctcacgccaagtgccccctttgccgaaatgatattcacgaggacaatctccttgagtgccctcccgaagagttggcgagagattcagagaaaaagtctgacatggagtggacgagctcttccaaaattaatgccctaatgcacgccctgacggacctgaggaaaaaaaaccctaatataaagtctcttgtagtgagccagttcacaacattccttagcctgatcgaaatccctctgaaggcctccgggtttgtgttcactaggttggatggctctatggctcagaagaaacgagtggagtcaatccagtgcttccaaaataccgaggcaggcagcccaacaatcatgctgcttagtttgaaagccggtggcgttggcctcaatctaagcgctgccagccgggtgttcctaatggacccggcttggaaccccgcagctgaagaccagtgtttcgatcggtgccaccgtttaggtcagaaacaggaagtgatcattacaaaatttattgtaaaggactctgtggaggagaatatgctaaaaatccagaataagaaaagagaactggccgctggcgcattcggcacaaaaaagcccaatgccgacgagatgaaacaagctaagataaacgagattagaaccttaatcgacctctag

SEQ ID NO: 134864 - DNA, 3030 bp, Artificial Sequence
  derived and/or modified sequence
atgagttggatgttcaaaagggacccagtgtggaagtacctacagacagtgcaatatggagtgcacggtaattttcccagactatcatatcccacatttttcccacgattcgagtttcaggatgtgataccacctgacgatttcctaacgagcgatgaggaagtggactcagttcttttcggcagcctgaggggacacgtcgtgggactgcgctactataccggagtcgtcaataataacgaaatggttgccctgcagcgtgatccaaataatccatatgataagaatgctatcaaggtgaacaacgtcaatgggaaccaagttggacacctgaagaaagaactggcgggtgcactggcgtatatcatggacaataaactggcccagattgagggtgtggtgccattcggagcgaataatgcttttactatgcctttgcacatgactttctggggaaaggaggagaaccgcaaggctgtttccgatcagctcaaaaaacacggcttcaaactcgggccagcccctaaaaccctagggttcaacttggaaagcggatggggctctggacgggcaggccctagctacagcatgccagtccacgccgcagttcagatgacaacggaacagctgaaaacagagtttgacaaactttttgaagatctgaaggaggacgataagacacatgagatggaaccagctgaagctatagaaactccgctcctgcctcaccagaaacaggcactggcctggatggtgagcagggaaaattccaaggagctccctcccttttgggaacagaggaacgacctgtactacaacactatcaccaacttctccgagaaggatcgccctgagaacgttcacggcggaatcttggctgacgatatgggtctcgggaaaaccctcacagctatcgcagtgatcctgaccaacttccacgatggtaggcctctgcctatagagcgcgtgaagaaaaacttactgaaaaaggaatataatgttaatgatgattctatgaaattggggggaaacaatactagtgagaaagccgatggtctatcgaaagacgcatctaggtgctcggagcagcccagcatttctgatataaaggagaagtccaagtttaggatgagcgagctcagctctagccgacctaaaaggaggaaaactgcagttcagtatatcgaaagtagcgatagcgaggaaatagaaacctcagagctgccgcagaaaatgaaaggtaaactgaaaaatgtccagagcgaaacaaaaggacgtgcaaaggctgggagctctaaggttattgaggatgtggctttcgcttgcgctctcacctcttcagtcccaaccactaagaagaaaatgctcaaaaagggggcatgtgctgttgaggggtcaaaaaagactgatgtggaggaacgcccacgcactactctaattatctgccccctcagcgtgttgagcaattggatcgaccagttcggacagcatattaaatccgatgtgcacctgaacttttatgtctattatgggccagatcggatcagggaaccagctttactgtcaaaacaggacattgttttgactacctacaatattctgacccatgattacggcactaagggtgacagtcccctgcacagcatccggtggttacgagtgatcttggacgagggacatgccataaggaatcctaacgctcagcaaaccaaagctgttctcgacctcgagagcgagcgcaggtgggtgctaaccggtacccctatccaaaacagcttgaaggatttatggagtcttctatcctttctgaaattgaagccatttatcgatcgcgagtggtggcaccgcaccattcagcgaccagtgacaatgggtgatgagggcggactgcggaggttacagtccctgattaaaaatataacacttagacgtactaagacaagcaaaataaagggaaagccggttctggagttgccagagaggaaggtattcattcaacatattacactctctgacgaagagcgcaaaatataccagtcggtcaaaaatgaggggagagcaactatcggacggtactttaatgaggggacagtgctggcacactatgccgatgtccttgggttacttctgaggctgagacaaatttgttgtcatacctacctgctgaccaatgccgttagcagcaacggtccgtcaggaaatgacacacccgaggaactgaggaagaagctcattaggaaaatgaaactaatcttatcgtcaggctccgatgaagagtgtgcaatttgcttagattcactgacagtgcctgtcattactcactgcgctcacgttttctgcaaaccttgcatatgtcaggttattcagaacgaacagccccacgccaagtgtccactgtgtagaaatgatatccatgaggacaatctgctggaatgcccacctgaagagttggcacgcgattctgaaaagaagagtgacatggagtggacctctagctcaaagataaacgcgctgatgcatgccctgaccgatttgcgaaagaaaaatcctaacatcaaatctctggtggtctctcagttcactacctttttatcacttatcgagattccattaaaggcctccgggttcgtcttcactcgcctggatggtagcatggcccaaaagaagcgcgtggaatctatccaatgcttccagaacacagaggccggatctcccactattatgctactgtccctcaaggcgggaggcgtggggctgaatctgtctgctgctagtcgggtgtttcttatggatccagcttggaatcccgcagccgaggatcagtgttttgatcggtgccataggctggggcaaaaacaagaggtgatcataaccaaattcatcgtcaaagatagcgtggaggaaaatatgctgaaaatccaaaacaagaagagagagttggccgcaggagcctttggcacaaagaagcccaacgctgacgaaatgaagcaggccaaaatcaatgagatacgcacattaatcgatctatag

SEQ ID NO: 134865 - DNA, 1374 bp, Artificial Sequence
  derived and/or modified sequence
atgttcaagcgagacccagtgtggaaatatcttcagaccgtacaatatggtgtgcatggtaattttccgagactgtcctaccctaccttttttcctcgatttgaatttcaggacgtcattcctcctgacgactttctgacatctgatgaagaagtagacagcgttcttttcggatccctaagaggccacgtcgtcggcctccgatactataccggcgtggtgaacaacaatgaaatggtcgccttgcaacgggaccccaacaatccgtatgacaagaacgccattaaagtgaataacgttaacggtaaccaagtagggcaccttaagaaagaattggcaggggcactcgcctacatcatggataacaaactagcacagattgagggagttgtgccctttggggctaacaacgcgtttaccatgccgctgcacatgacgttttggggtaaggaagaaaaccggaaggccgtatccgatcagctcaaaaaacatggatttaaactcggaccagcaccaaagactctcggcttcaatcttgaaagtgggtggggctcgggcagggccggaccctcatatagcatgcctgtgcatgccgctgtgcagatgacaaccgaacagttaaagactgagttcgacaagcttttcgaggatttgaaggaggacgacaaaacccatgaaatggagcctgccgaggctatcgagaccccactgctcccccaccagaagcaagccctagcctggatggtctcccgagaaaactctaaagaactccctccattctgggagcagaggaacgacttgtactacaatacgatcactaattttagtgaaaaggacagacccgagaatgtgcacggaggcattctcgcagacgacatggggctcggcaaaacactcactgctatcgctgtcatcttgactaattttcacgatggaaggccacttcccatagaacgtgtcaagaaaaacttgcttaagaaggagtacaatgtgaatgacgactccatgaaactgggaggtaataacacatcagagaaagccgatggcctgtcaaaggacgcatcccgctgttccgagcaaccaagtatttctgatattaaggaaaaaagcaagttccgcatgtccgaactgtccagctctcgccctaagagacgaaagactgctgtacagtatattgagagttctgattcagaagagatcgaaacaagcgaactcccccagaagatgaaaggcaagttgaagaacgtgcagtctgaaaccaaaggcagagctaaagccggtagcagcaaggtgatcgaagatgtggccttcgcgtgtgcccttacctcttctgtgcccacgacaaagaaaaagatgctgaagaaggtgaaatag

SEQ ID NO: 134866 - DNA, 3030 bp, Artificial Sequence
  derived and/or modified sequence
atgagttggatgttcaagcgagatcctgtgtggaagtacttacaaacagtgcagtacggcgttcacggcaattttccaaggctgagctacccgacttttttcccgcgatttgagtttcaggatgtgataccacctgacgatttcctgacttccgacgaagaagtggacagcgtcctgtttggctctttgaggggacatgtcgtgggtctgcggtactacaccggcgtcgtaaacaacaatgaaatggtggcactccagagggatcctaacaatccctacgacaaaaacgccatcaaggtgaataatgtcaacggaaaccaggtcgggcacctcaagaaggaacttgctggcgcactggcttacattatggataataagctggctcagatcgagggtgttgttccttttggcgcaaataacgcatttactatgccgttacacatgactttctggggcaaagaagagaacaggaaagcggtgtcagaccaactgaaaaaacacggattcaaactcgggcctgctcccaagactttggggttcaacctggagtctggttggggcagtggcagggccggaccttcttactctatgcctgtgcacgccgctgtgcagatgaccaccgagcagctcaagaccgaattcgataaattatttgaggacctcaaagaggatgataagacacacgagatggaacctgccgaagcaatagaaactcctctcctgccccatcagaaacaggctctggcttggatggtgagtcgtgagaattccaaagagctgcccccattttgggaacagaggaatgatctctattacaacacaattacgaacttctccgagaaagaccggccagagaatgtccacggtgggattctcgcagatgatatggggctgggaaaaacattgaccgccatcgccgtcatactgacaaacttccacgacggaagacccttacccattgagcgagtgaagaagaacttactcaagaaggagtataacgtcaatgacgatagcatgaagctcgggggaaataatacctcagagaaggccgacggccttagtaaggacgccagtcgctgctccgagcaaccttccatctctgatataaaggagaagtccaagtttcggatgtccgagctttcatccagtcgaccaaaaagaaggaaaacagccgtgcagtacattgagtcttcagactccgaggaaatcgagacatcagagctgccccaaaagatgaagggcaaacttaaaaacgtgcaaagcgagaccaaagggcgtgctaaggccggttccagcaaggtcattgaagacgtagcatttgcctgtgcgctcacatcttccgtccccactacaaagaagaagatgctgaagaagggagcatgcgctgtggaagggtctaagaagaccgacgttgaggaacggccaaggaccactctgataatttgtccgctcagtgtgctttcaaattggatagatcagtttgggcagcatataaagtctgatgtccacctgaacttctatgtgtactatgggccagatcgaatcagggagccggcactcctttccaagcaggatattgtactcacgacttacaacatcctgacccacgattatggcactaagggagacagcccacttcactctattagatggcttagagtgatcttagacgaggggcatgctattaggaatcctaatgctcagcagaccaaggcagtgctagaccttgagtccgagcgacgctgggtcttgacgggcactcccattcagaattcattgaaggatctgtggagtctgctctctttcctgaaactcaaacccttcatagatagggagtggtggcaccgcactatccagagacccgtcaccatgggagatgagggcggactgcgacgcctccagagcctgattaagaatattacattgcggagaaccaagactagcaagataaaaggcaagcctgtcctagagctccccgaacgaaaggtgttcatacagcatattacactcagcgatgaggaacggaaaatctaccagtcagtcaagaacgaagggcgagctactattggcaggtacttcaatgaaggaaccgttctagctcactacgcggatgtcctgggtctcctcctcaggctgcgtcaaatctgctgccacacctacctgcttacgaatgccgtatctagtaacggacctagtggtaatgataccccagaagagctcagaaagaagttgatacggaaaatgaagctgattctctcgtccgggtccgacgaagagtgcgccatctgtctcgactctctcacagtgccagtgattactcactgcgcccacgtgttttgtaagccttgtatttgccaagtgattcagaacgagcagcctcatgctaagtgtcctctgtgccggaacgacatacacgaggataatctgctggagtgccctccagaggaactggcaagagactccgagaaaaagagcgatatggagtggacaagcagctcaaagataaacgccctcatgcacgcactcaccgatttaagaaaaaaaaaccccaatatcaagagcctagtcgtttctcaatttaccacgttcctctccctcatcgaaattccactcaaggcctctgggtttgtgttcactagattggacggaagcatggctcagaaaaaaagagtcgagtctatccagtgtttccagaatacggaggccggatcacctactattatgctgctgtctctcaaagcaggaggagttggccttaacttgagcgcggcatcccgagtgtttctgatggatcccgcttggaatcctgcagccgaggaccaatgcttcgaccgctgtcatcgtctcggccagaagcaagaagtgattattacaaagtttattgtgaaggattcagtggaggagaatatgctaaagattcagaacaagaagcgggaactggcagcgggagccttcggcaccaagaaaccgaatgcagatgagatgaaacaggccaagattaatgagattagaactctgattgatctctag

SEQ ID NO: 134867 - DNA, 3030 bp, Artificial Sequence
  derived and/or modified sequence
atgagctggatgttcaagagagaccccgtgtggaagtacctgcagaccgtgcagtacggcgtgcacggcaacttccccagactgagctaccccaccttcttccccagattcgagttccaggacgtgatcccccccgacgacttcctgaccagcgacgaggaggtggacagcgtgctgttcggcagcctgagaggccacgtggtgggcctgagatactacaccggcgtggtgaacaacaacgagatggtggccctgcagagagaccccaacaacccctacgacaagaacgccatcaaggtgaacaacgtgaacggcaaccaggtgggccacctgaagaaggagctggccggcgccctggcctacatcatggacaacaagctggcccagatcgagggcgtggtgcccttcggcgccaacaacgccttcaccatgcccctgcacatgaccttctggggcaaggaggagaacagaaaggccgtgagcgaccagctgaagaagcacggcttcaagctgggccccgcccccaagaccctgggcttcaacctggagagcggctggggcagcggcagagccggccccagctacagcatgcccgtgcacgccgccgtgcagatgaccaccgagcagctgaagaccgagttcgacaagctgttcgaggacctgaaggaggacgacaagacccacgagatggagcccgccgaggccatcgagacccccctgctgccccaccagaagcaggccctggcctggatggtgagcagagagaacagcaaggagctgccccccttctgggagcagagaaacgacctgtactacaacaccatcaccaacttcagcgagaaggacagacccgagaacgtgcacggcggcatcctggccgacgacatgggcctgggcaagaccctgaccgccatcgccgtgatcctgaccaacttccacgacggcagacccctgcccatcgagagagtgaagaagaacctgctgaagaaggagtacaacgtgaacgacgacagcatgaagctgggcggcaacaacaccagcgagaaggccgacggcctgagcaaggacgccagcagatgcagcgagcagcccagcatcagcgacatcaaggagaagagcaagttcagaatgagcgagctgagcagcagcagacccaagagaagaaagaccgccgtgcagtacatcgagagcagcgacagcgaggagatcgagaccagcgagctgccccagaagatgaagggcaagctgaagaacgtgcagagcgagaccaagggcagagccaaggccggcagcagcaaggtgatcgaggacgtggccttcgcctgcgccctgaccagcagcgtgcccaccaccaagaagaagatgctgaagaagggcgcctgcgccgtggagggcagcaagaagaccgacgtggaggagagacccagaaccaccctgatcatctgccccctgagcgtgctgagcaactggatcgaccagttcggccagcacatcaagagcgacgtgcacctgaacttctacgtgtactacggccccgacagaatcagagagcccgccctgctgagcaagcaggacatcgtgctgaccacctacaacatcctgacccacgactacggcaccaagggcgacagccccctgcacagcatcagatggctgagagtgatcctggacgagggccacgccatcagaaaccccaacgcccagcagaccaaggccgtgctggacctggagagcgagagaagatgggtgctgaccggcacccccatccagaacagcctgaaggacctgtggagcctgctgagcttcctgaagctgaagcccttcatcgacagagagtggtggcacagaaccatccagagacccgtgaccatgggcgacgagggcggcctgagaagactgcagagcctgatcaagaacatcaccctgagaagaaccaagaccagcaagatcaagggcaagcccgtgctggagctgcccgagagaaaggtgttcatccagcacatcaccctgagcgacgaggagagaaagatctaccagagcgtgaagaacgagggcagagccaccatcggcagatacttcaacgagggcaccgtgctggcccactacgccgacgtgctgggcctgctgctgagactgagacagatctgctgccacacctacctgctgaccaacgccgtgagcagcaacggccccagcggcaacgacacccccgaggagctgagaaagaagctgatcagaaagatgaagctgatcctgagcagcggcagcgacgaggagtgcgccatctgcctggacagcctgaccgtgcccgtgatcacccactgcgcccacgtgttctgcaagccctgcatctgccaggtgatccagaacgagcagccccacgccaagtgccccctgtgcagaaacgacatccacgaggacaacctgctggagtgcccccccgaggagctggccagagacagcgagaagaagagcgacatggagtggaccagcagcagcaagatcaacgccctgatgcacgccctgaccgacctgagaaagaagaaccccaacatcaagagcctggtggtgagccagttcaccaccttcctgagcctgatcgagatccccctgaaggccagcggcttcgtgttcaccagactggacggcagcatggcccagaagaagagagtggagagcatccagtgcttccagaacaccgaggccggcagccccaccatcatgctgctgagcctgaaggccggcggcgtgggcctgaacctgagcgccgccagcagagtgttcctgatggaccccgcctggaaccccgccgccgaggaccagtgcttcgacagatgccacagactgggccagaagcaggaggtgatcatcaccaagttcatcgtgaaggacagcgtggaggagaacatgctgaagatccagaacaagaagagagagctggccgccggcgccttcggcaccaagaagcccaacgccgacgagatgaagcaggccaagatcaacgagatcagaaccctgatcgacctgtag

SEQ ID NO: 134868 - DNA, 1374 bp, Artificial Sequence
  derived and/or modified sequence
atgttcaagagagaccccgtgtggaagtacctgcagaccgtgcagtacggcgtgcacggcaacttccccagactgagctaccccaccttcttccccagattcgagttccaggacgtgatcccccccgacgacttcctgaccagcgacgaggaggtggacagcgtgctgttcggcagcctgagaggccacgtggtgggcctgagatactacaccggcgtggtgaacaacaacgagatggtggccctgcagagagaccccaacaacccctacgacaagaacgccatcaaggtgaacaacgtgaacggcaaccaggtgggccacctgaagaaggagctggccggcgccctggcctacatcatggacaacaagctggcccagatcgagggcgtggtgcccttcggcgccaacaacgccttcaccatgcccctgcacatgaccttctggggcaaggaggagaacagaaaggccgtgagcgaccagctgaagaagcacggcttcaagctgggccccgcccccaagaccctgggcttcaacctggagagcggctggggcagcggcagagccggccccagctacagcatgcccgtgcacgccgccgtgcagatgaccaccgagcagctgaagaccgagttcgacaagctgttcgaggacctgaaggaggacgacaagacccacgagatggagcccgccgaggccatcgagacccccctgctgccccaccagaagcaggccctggcctggatggtgagcagagagaacagcaaggagctgccccccttctgggagcagagaaacgacctgtactacaacaccatcaccaacttcagcgagaaggacagacccgagaacgtgcacggcggcatcctggccgacgacatgggcctgggcaagaccctgaccgccatcgccgtgatcctgaccaacttccacgacggcagacccctgcccatcgagagagtgaagaagaacctgctgaagaaggagtacaacgtgaacgacgacagcatgaagctgggcggcaacaacaccagcgagaaggccgacggcctgagcaaggacgccagcagatgcagcgagcagcccagcatcagcgacatcaaggagaagagcaagttcagaatgagcgagctgagcagcagcagacccaagagaagaaagaccgccgtgcagtacatcgagagcagcgacagcgaggagatcgagaccagcgagctgccccagaagatgaagggcaagctgaagaacgtgcagagcgagaccaagggcagagccaaggccggcagcagcaaggtgatcgaggacgtggccttcgcctgcgccctgaccagcagcgtgcccaccaccaagaagaagatgctgaagaaggtgaagtag

SEQ ID NO: 134869 - DNA, 5317 bp, Artificial Sequence
  derived and/or modified sequence
ttgttgcagaaggagacggcgtcgacgtctgactggactcgcggcgacttacctttcagtcgtgcgctcctgatccggcgctcggaatttgtccccggcttcagggctgcggggcctggaaggaggcgtatcgaggcggctcgaaaacgatccaggggagccgaggcgctcctcttgtcatcccactcagcgccatgtcctggatgttcaagagggatccagtttggaagtacttgcagactgtccagtatggagttcatggaaattttccacgcctctcatatccaactttctttccacgttttgaattccaagatgttatccctccagatgactttctaactagtgatgaagaagtagattccgttttatttggaagtttgagaggtcatgtggttggactacgctattacacgggagtagttaataataatgaaatggttgcattacaacgagatcctaataacccttatgataagaatgcaattaaagtaaacaatgtgaatggaaatcaagttggccatttaaagaaagagcttgcaggtgctttggcctatatcatggacaacaaattggcacaaattgaaggggtagttccttttggtgcaaacaatgcttttaccatgcctctgcatatgactttttggggaaaagaagaaaatagaaaagcggtttcagatcagttgaagaaacatggatttaaattgggtcctgcaccaaaaactttaggattcaatttggaaagtggttggggctctggaagagctggaccaagctatagtatgccagtgcatgctgcagtacagatgacaactgaacagcttaaaacagaatttgacaaattgtttgaagatttaaaagaagatgataaaacccatgaaatggaaccagctgaggctattgaaacaccactgcttccacatcaaaaacaagctctagcttggatggtgtcacgggaaaatagcaaagaacttccaccattctgggaacagcgaaatgacttatactataacacaataacaaatttttctgagaaggaccgaccagaaaatgtccatggaggaattttagctgatgatatgggtttgggtaaaactcttacggccattgcagtaatccttaccaacttccatgatggcagacctcttcctattgaaagagttaaaaagaatctactgaagaaggaatataatgttaacgatgactctatgaaacttggaggaaacaataccagtgaaaaggcagatggactaagcaaagacgcatctagatgtagtgaacaacccagtatttcagatatcaaggagaagagtaagtttcgcatgtcagaattgtctagctcccgccccaaaagaagaaaaactgctgtccagtacatagaaagcagtgattcagaggaaattgaaacaagtgaattgccgcagaaaatgaaaggcaaactgaaaaatgtacagtctgaaactaaaggcagggcgaaagcaggatcttctaaggttatagaagatgtggcatttgcatgtgcattaacttcatctgttcctacaacaaaaaagaaaatgttgaaaaagggagcttgtgcagtggaggggtcaaagaaaactgatgttgaggagagaccaagaacaacactgatcatctgtccgctttctgtgttaagcaactggattgaccagtttggacaacatataaaatcagatgtacacttgaatttttatgtttattatggtcctgatcgtattagagaaccggccttactttcaaaacaggatattgttttgactacgtataatattttaactcatgactatggaactaaaggagatagtccattacatagcataaggtggctaagagtgatcctggatgaaggacatgccatacgaaatccaaatgctcagcagacaaaagctgtacttgacttagaatcagaaagaagatgggttttgacaggtactccaatccagaattctttaaaggacttgtggtctcttctttcctttttaaaacttaaaccatttattgatagagaatggtggcatagaacaatacagcgtcctgtcacaatgggagatgaaggaggacttaggcgtttacagtccctaattaaaaatattacacttagaagaacaaagacaagcaaaattaaaggaaaacctgttttggagttaccagaacgtaaagtatttattcagcacattacactttcagatgaagagagaaagatttatcagtctgtgaaaaatgaaggcagagccactattggaaggtattttaatgaagggactgtcctggcacattatgcagatgtcctgggtcttttgcttagactgcggcaaatttgttgccatacttaccttcttacaaatgcagtgtcttccaatggcccctcaggaaatgatacacctgaagaactgagaaagaagttaataaggaagatgaagttaattctgagctcaggttcagatgaggaatgtgcaatttgcctggattctttaacagttcctgtgataacacattgtgcacatgtattttgtaaaccctgtatttgccaagtcattcagaatgagcagccacatgctaaatgccctttatgcagaaatgatatacatgaagataatttattagaatgtcctccagaagaattagcacgtgacagtgagaaaaagtctgatatggaatggacatccagttcaaagattaatgcgctaatgcacgcattgactgacttaagaaagaagaatcccaacataaaaagtttggttgtttctcagtttacaacattcctgtctttaatagaaataccacttaaagcctctggatttgtgtttactcgtttggatggttccatggcccaaaagaaaagagttgaatcaattcagtgttttcaaaacactgaagcaggatctccaactataatgcttctgtccttaaaagcaggtggagttggtttgaatctgtctgcagcttctcgagtgtttttaatggatccagcctggaatcctgctgctgaagatcagtgctttgacagatgccatagacttggtcagaagcaagaagttatcatcacaaaattcattgtaaaggactctgttgaagaaaatatgctgaaaatacaaaacaaaaagagagaacttgcagcaggagcctttggaactaaaaaaccaaatgctgacgaaatgaaacaagccaaaattaatgaaatcagaacattaattgacttataatttgtgggattttagtaaggtcagtttgattggatacttaagttttagaaatgagaaaaatacagagttttagaaatgagatctagagaacacgtcttctaaaaggggcatattttatattagtgaagaggtattactgacacaatttcttctatatatgaacctatttttaatgaaacttcaaatagcaataagttccgttatatactgtggcctgaaataatttgagaaaaaaggttactttgttattcagcttttcataatatctatgctgagtattttcacgtatcttccaagtactcagctttttcgtatttcaaataaggtcagaccttttatacttttgaccaaatagttattttctatgttggacacttagttatttaccaaagcctccgatttgtgatgcagtgtttgtagtccttgtaaacaatatatacagactatacaagaattaattttattgggctttcaaaaaccatatttgcattccagaaccaaatcttaaatgagaccaaagtccaggttagcacaggtttttatttttcctacagctacattgagatatagttcacataaatgacttggagttttatgttcatgaaaaaattagggattatgttaagagtactattttttccattttagttaagtagtactacactcattgtttaaatgtaacttgctgtgtctgaggtataaatatagtctgtgggagtgagaggcaaaccagtcctacccaatttgatttgaatattttaaattatggaactgctaaatagatatttctataaatagataatttttatttatgtagctttttttggaagtaactttataaatttttataattcagaagactactatatgtgagaggcgtgatatctggatggaagttgggctggatgatctccaaagtcgtttcaactcttaaagacatcttaatcctgaatgtaaacaattgttatgtgtttagaatcagaatttgattttgaacttgagtaattcatccttacagctatctgtagaattagtcatcttttttcttttcttttttttttacttttttgttaataagcaaacttatttgctgcagaatttgggttgactcctgagcatatttaaaacaaagaagctagaaatttagcagtcagattaggtaggtggttttatttcaaagggaaactttaatccaaagaaagattaattactctaacaaacaagagaagcttcatgtttgatgatacagatttaagaatacctgagacttaagagtgttggaagtcatttgatagaaagatgagatcggagacaatgttgtgttatagggcacacattgaaggtatatgccaaatctctcaccagataagtccttttctccctgtgccgttttcttgctcaaagggaacagtgaattagccagctagaatcttcctggtccctttttgaggcagtagcaggtaaggaaagggctgattttcatcaaaaccaagacctttctgcagggatgatagtggaataataatgtgggattagcccgctagcattaggagcagttgggaagttacctggtagatcaagcattacacacaaaaaatcaagttgatcagagtatgggttctccatatagcaatacttcagtgagattaagtataaacagtttttggcaaaaaacaacacagtctactctttctgcttacaaagacaaagccttacaaactcactatgaaggtaaagggaggacagcttgcttctttgcccagacatttacaaagttgtttttaaaacacactcataagtaagtttggcaagttgtttaaaaaatgtctctttgttttgtacagttctgttagatgttgttatattttaaaagtttaatttaaaaaatttaatttgtccttcctaagaaggataaatatataaaaaagccactggaatgaaaacttcctatatgctatgctgttgtcttattattatatagaaaaataactttagaaaaatattgaagacattgtattaccacttgtgattcaaacaattttgtggttaaaactggattttaaatttaaaaatcaataaaaatttcaaatgtt

SEQ ID NO: 134870 - DNA, 3896 bp, Artificial Sequence
  derived and/or modified sequence
gtctgactggactcgcggcgacttacctttcagtcgtgcgctcctgatccggcgctcggaatttgtccccggcttcagggctgcggggcctggaaggaggcgtatcgaggcggctcgaaaacgatccaggggagccgaggcgctcctcttgtcatcccactcagcgccatgtcctggatgttcaagagggatccagtttggaagtacttgcagactgtccagtatggagttcatggaaattttccacgcctctcatatccaactttctttccacgttttgaattccaagatgttatccctccagatgactttctaactagtgatgaagaagtagattccgttttatttggaagtttgagaggtcatgtggttggactacgctattacacgggagtagttaataataatgaaatggttgcattacaacgagatcctaataacccttatgataagaatgcaattaaagtaaacaatgtgaatggaaatcaagttggccatttaaagaaagagcttgcaggtgctttggcctatatcatggacaacaaattggcacaaattgaaggggtagttccttttggtgcaaacaatgcttttaccatgcctctgcatatgactttttggggaaaagaagaaaatagaaaagcggtttcagatcagttgaagaaacatggatttaaattgggtcctgcaccaaaaactttaggattcaatttggaaagtggttggggctctggaagagctggaccaagctatagtatgccagtgcatgctgcagtacagatgacaactgaacagcttaaaacagaatttgacaaattgtttgaagatttaaaagaagatgataaaacccatgaaatggaaccagctgaggctattgaaacaccactgcttccacatcaaaaacaagctctagcttggatggtgtcacgggaaaatagcaaagaacttccaccattctgggaacagcgaaatgacttatactataacacaataacaaatttttctgagaaggaccgaccagaaaatgtccatggaggaattttagctgatgatatgggtttgggtaaaactcttacggccattgcagtaatccttaccaacttccatgatggcagacctcttcctattgaaagagttaaaaagaatctactgaagaaggaatataatgttaacgatgactctatgaaacttggaggaaacaataccagtgaaaaggcagatggactaagcaaagacgcatctagatgtagtgaacaacccagtatttcagatatcaaggagaagagtaagtttcgcatgtcagaattgtctagctcccgccccaaaagaagaaaaactgctgtccagtacatagaaagcagtgattcagaggaaattgaaacaagtgaattgccgcagaaaatgaaaggcaaactgaaaaatgtacagtctgaaactaaaggcagggcgaaagcaggatcttctaaggttatagaagatgtggcatttgcatgtgcattaacttcatctgttcctacaacaaaaaagaaaatgttgaaaaagggagcttgtgcagtggaggggtcaaagaaaactgatgttgaggagagaccaagaacaacactgatcatctgtccgctttctgtgttaagcaactggattgaccagtttggacaacatataaaatcagatgtacacttgaatttttatgtttattatggtcctgatcgtattagagaaccggccttactttcaaaacaggatattgttttgactacgtataatattttaactcatgactatggaactaaaggagatagtccattacatagcataaggtggctaagagtgatcctggatgaaggacatgccatacgaaatccaaatgctcagcagacaaaagctgtacttgacttagaatcagaaagaagatgggttttgacaggtactccaatccagaattctttaaaggacttgtggtctcttctttcctttttaaaacttaaaccatttattgatagagaatggtggcatagaacaatacagcgtcctgtcacaatgggagatgaaggaggacttaggcgtttacagtccctaattaaaaatattacacttagaagaacaaagacaagcaaaattaaaggaaaacctgttttggagttaccagaacgtaaagtatttattcagcacattacactttcagatgaagagagaaagatttatcagtctgtgaaaaatgaaggcagagccactattggaaggtattttaatgaagggactgtcctggcacattatgcagatgtcctgggtcttttgcttagactgcggcaaatttgttgccatacttaccttcttacaaatgcagtgtcttccaatggcccctcaggaaatgatacacctgaagaactgagaaagaagttaataaggaagatgaagttaattctgagctcaggttcagatgaggaatgtgcaatttgcctggattctttaacagttcctgtgataacacattgtgcacatgtattttgtaaaccctgtatttgccaagtcattcagaatgagcagccacatgctaaatgccctttatgcagaaatgatatacatgaagataatttattagaatgtcctccagaagaattagcacgtgacagtgagaaaaagtctgatatggaatggacatccagttcaaagattaatgcgctaatgcacgcattgactgacttaagaaagaagaatcccaacataaaaagtttggttgtttctcagtttacaacattcctgtctttaatagaaataccacttaaagcctctggatttgtgtttactcgtttggatggttccatggcccaaaagaaaagagttgaatcaattcagtgttttcaaaacactgaagcaggatctccaactataatgcttctgtccttaaaagcaggtggagttggtttgaatctgtctgcagcttctcgagtgtttttaatggatccagcctggaatcctgctgctgaagatcagtgctttgacagatgccatagacttggtcagaagcaagaagttatcatcacaaaattcattgtaaaggactctgttgaagaaaatatgctgaaaatacaaaacaaaaagagagaacttgcagcaggagcctttggaactaaaaaaccaaatgctgacgaaatgaaacaagccaaaattaatgaaatcagaacattaattgacttataatttgtgggattttagtaagaagactactatatgtgagaggcgtgatatctggatggaagttgggctggatgatctccaaagtcgtttcaactcttaaagacatcttaatcctgaatgtaaacaattgttatgtgtttagaatcagaatttgattttgaacttgagtaattcatccttacagctatctgtagaattagtcatcttttttcttttcttttttttttacttttttgttaataagcaaacttatttgctgcagaatttgggttgactcctgagcatatttaaaacaaagaagctagaaatttagcagtcagattaggtaggtggttttatttcaaagggaaactttaatccaaagaaagattaattactctaacaaacaagagaagcttcatgtttgatgatacagatttaagaatacctgagacttaagagtgttggaagtcatttgatagaaagatgagatcggagacaatgttgtgttatagggcacacattgaaggtatatgccaaatctctcaccagataagtccttttctccctgtgccgttttcttgctcaaagggaacagtgaattagccagctagaatcttcctggtccctttttgaggcagtagcaggtaaggaaagggctgattttcatcaaaaccaagacctttctgcagggatgatagtggaataataatgtgggatta

SEQ ID NO: 134871 - DNA, 1598 bp, Artificial Sequence
  derived and/or modified sequence
acagagcgacgctggtctcccagattgttgcagaaggagacggcgtcgacgtctgactggactcgcggcgacttacctttcagtcgtgcgctcctgatccggcgctcggaatttgtccccggcttcagggctgcggggcctggaaggaggcgtatcgaggcggctcgaaaacgatccaggggagccgaggcgctcctcttgtcatcccactcagcgccatgtcctggatgttcaagagggatccagtttggaagtacttgcagactgtccagtatggagttcatggaaattttccacgcctctcatatccaactttctttccacgttttgaattccaagatgttatccctccagatgactttctaactagtgatgaagaagtagattccgttttatttggaagtttgagaggtcatgtggttggactacgctattacacgggagtagttaataataatgaaatggttgcattacaacgagatcctaataacccttatgataagaatgcaattaaagtaaacaatgtgaatggaaatcaagttggccatttaaagaaagagcttgcaggtgctttggcctatatcatggacaacaaattggcacaaattgaaggggtagttccttttggtgcaaacaatgcttttaccatgcctctgcatatgactttttggggaaaagaagaaaatagaaaagcggtttcagatcagttgaagaaacatggatttaaattgggtcctgcaccaaaaactttaggattcaatttggaaagtggttggggctctggaagagctggaccaagctatagtatgccagtgcatgctgcagtacagatgacaactgaacagcttaaaacagaatttgacaaattgtttgaagatttaaaagaagatgataaaacccatgaaatggaaccagctgaggctattgaaacaccactgcttccacatcaaaaacaagctctagcttggatggtgtcacgggaaaatagcaaagaacttccaccattctgggaacagcgaaatgacttatactataacacaataacaaatttttctgagaaggaccgaccagaaaatgtccatggaggaattttagctgatgatatgggtttgggtaaaactcttacggccattgcagtaatccttaccaacttccatgatggcagacctcttcctattgaaagagttaaaaagaatctactgaagaaggaatataatgttaacgatgactctatgaaacttggaggaaacaataccagtgaaaaggcagatggactaagcaaagacgcatctagatgtagtgaacaacccagtatttcagatatcaaggagaagagtaagtttcgcatgtcagaattgtctagctcccgccccaaaagaagaaaaactgctgtccagtacatagaaagcagtgattcagaggaaattgaaacaagtgaattgccgcagaaaatgaaaggcaaactgaaaaatgtacagtctgaaactaaaggcagggcgaaagcaggatcttctaaggttatagaagatgtggcatttgcatgtgcattaacttcatctgttcctacaacaaaaaagaaaatgttgaaaaaggttaaa

SEQ ID NO: 134872 - DNA, 3633 bp, Artificial Sequence
  derived and/or modified sequence
acagagcgacgctggtctcccagattgttgcagaaggagacggcgtcgacgtctgactggactcgcggcgacttacctttcagtcgtgcgctcctgatccggcgctcggaatttgtccccggcttcagggctgcggggcctggaaggaggcgtatcgaggcggctcgaaaacgatccaggggagccgaggcgctcctcttgtcatcccactcagcgccatgtcctggatgttcaagagggatccagtttggaagtacttgcagactgtccagtatggagttcatggaaattttccacgcctctcatatccaactttctttccacgttttgaattccaagatgttatccctccagatgactttctaactagtgatgaagaagtagattccgttttatttggaagtttgagaggtcatgtggttggactacgctattacacgggagtagttaataataatgaaatggttgcattacaacgagatcctaataacccttatgataagaatgcaattaaagtaaacaatgtgaatggaaatcaagttggccatttaaagaaagagcttgcaggtgctttggcctatatcatggacaacaaattggcacaaattgaaggggtagttccttttggtgcaaacaatgcttttaccatgcctctgcatatgactttttggggaaaagaagaaaatagaaaagcggtttcagatcagttgaagaaacatggatttaaattgggtcctgcaccaaaaactttaggattcaatttggaaagtggttggggctctggaagagctggaccaagctatagtatgccagtgcatgctgcagtacagatgacaactgaacagcttaaaacagaatttgacaaattgtttgaagatttaaaagaagatgataaaacccatgaaatggaaccagctgaggctattgaaacaccactgcttccacatcaaaaacaagctctagcttggatggtgtcacgggaaaatagcaaagaacttccaccattctgggaacagcgaaatgacttatactataacacaataacaaatttttctgagaaggaccgaccagaaaatgtccatggaggaattttagctgatgatatgggtttgggtaaaactcttacggccattgcagtaatccttaccaacttccatgatggcagacctcttcctattgaaagagttaaaaagaatctactgaagaaggaatataatgttaacgatgactctatgaaacttggaggaaacaataccagtgaaaaggcagatggactaagcaaagacgcatctagatgtagtgaacaacccagtatttcagatatcaaggagaagagtaagtttcgcatgtcagaattgtctagctcccgccccaaaagaagaaaaactgctgtccagtacatagaaagcagtgattcagaggaaattgaaacaagtgaattgccgcagaaaatgaaaggcaaactgaaaaatgtacagtctgaaactaaaggcagggcgaaagcaggatcttctaaggttatagaagatgtggcatttgcatgtgcattaacttcatctgttcctacaacaaaaaagaaaatgttgaaaaagggagcttgtgcagtggaggggtcaaagaaaactgatgttgaggagagaccaagaacaacactgatcatctgtccgctttctgtgttaagcaactggattgaccagtttggacaacatataaaatcagatgtacacttgaatttttatgtttattatggtcctgatcgtattagagaaccggccttactttcaaaacaggatattgttttgactacgtataatattttaactcatgactatggaactaaaggagatagtccattacatagcataaggtggctaagagtgatcctggatgaaggacatgccatacgaaatccaaatgctcagcagacaaaagctgtacttgacttagaatcagaaagaagatgggttttgacaggtactccaatccagaattctttaaaggacttgtggtctcttctttcctttttaaaacttaaaccatttattgatagagaatggtggcatagaacaatacagcgtcctgtcacaatgggagatgaaggaggacttaggcgtttacagtccctaattaaaaatattacacttagaagaacaaagacaagcaaaattaaaggaaaacctgttttggagttaccagaacgtaaagtatttattcagcacattacactttcagatgaagagagaaagatttatcagtctgtgaaaaatgaaggcagagccactattggaaggtattttaatgaagggactgtcctggcacattatgcagatgtcctgggtcttttgcttagactgcggcaaatttgttgccatacttaccttcttacaaatgcagtgtcttccaatggcccctcaggaaatgatacacctgaagaactgagaaagaagttaataaggaagatgaagttaattctgagctcaggttcagatgaggaatgtgcaatttgcctggattctttaacagttcctgtgataacacattgtgcacatgtattttgtaaaccctgtatttgccaagtcattcagaatgagcagccacatgctaaatgccctttatgcagaaatgatatacatgaagataatttattagaatgtcctccagaagaattagcacgtgacagtgagaaaaagtctgatatggaatggacatccagttcaaagattaatgcgctaatgcacgcattgactgacttaagaaagaagaatcccaacataaaaagtttggttgtttctcagtttacaacattcctgtctttaatagaaataccacttaaagcctctggatttgtgtttactcgtttggatggttccatggcccaaaagaaaagagttgaatcaattcagtgttttcaaaacactgaagcaggatctccaactataatgcttctgtccttaaaagcaggtggagttggtttgaatctgtctgcagcttctcgagtgtttttaatggatccagcctggaatcctgctgctgaagatcagtgctttgacagatgccatagacttggtcagaagcaagaagttatcatcacaaaattcattgtaaaggactctgttgaagaaaatatgctgaaaatacaaaacaaaaagagagaacttgcagcaggagcctttggaactaaaaaaccaaatgctgacgaaatgaaacaagccaaaattaatgaaatcagaacattaattgacttataatttgtgggattttagtaagactactatatgtgagaggcgtgatatctggatggaagttgggctggatgatctccaaagtcgtttcaactcttaaagacatcttaatcctgaatgtaaacaattgttatgtgtttagaatcagaatttgattttgaacttgagtaattcatccttacagctatctgtagaattagtcatcttttttcttttcttttttttttacttttttgttaataagcaaacttatttgctgcagaatttgggttgactcctgagcatatttaaaacaaagaagctagaaatttagcagtcagattaggtaggtggttttatttcaaagggaaactttaatccaaagaaagattaattactctaacaaacaaga

SEQ ID NO: 134873 - protein, 385 aa, Artificial Sequence
  derived and/or modified sequence
MMMMALSKTFGQKPVKFQLEDDGEFYMIGSEVGNYLRMFRGSLYKRYPSLWRRLATVEERKKIVASSHGKKTKPNTKDHGYTTLATSVTLLKASEVEEILDGNDEKYKAVSISTEPPTYLREQKAKRNSQWVPTLPNSSHHLDAVPCSTTINRNRMGRDKKRTFPLCFDDHDPAVIHENASQPEVLVPIRLDMEIDGQKLRDAFTWNMNEKLMTPEMFSEILCDDLDLNPLTFVPAIASAIRQQIESYPTDSILEDQSDQRVIIKLNIHVGNISLVDQFEWDMSEKENSPEKFALKLCSELGLGGEFVTTIAYSIRGQLSWHQKTYAFSENPLPTVEIAIRNTGDADQWCPLLETLTDAEMEKKIRDQDRNTRRMRRLANTAPAW

SEQ ID NO: 134874 - protein, 26 aa, Artificial Sequence
  derived and/or modified sequence
WRRLATVEERKKIVASSHALMTMTQL

SEQ ID NO: 134875 - DNA, 1717 bp, Artificial Sequence
  derived and/or modified sequence
aacgccagcgcctgcgcactgagggcggcctggtcgtcgtctgcggcggcggcggcggctgaggagcccggctgaggcgccagtacccggcccggtccgcatttcgccttccggcttcggtttccctcggcccagcacgccccggccccgccccagccctcctgatccctcgcagcccggctccggccgcccgcctctgccgccgcaatgatgatgatggcgctgagcaagaccttcgggcagaagcccgtgaagttccagctggaggacgacggcgagttctacatgatcggctccgaggtgggaaactacctccgtatgttccgaggttctctgtacaagagatacccctcactctggaggcgactagccactgtggaagagaggaagaaaatagttgcatcgtcacatggtaaaaaaacaaaacctaacactaaggatcacggatacacgactctagccaccagtgtgaccctgttaaaagcctcggaagtggaagagattctggatggcaacgatgagaagtacaaggctgtgtccatcagcacagagccccccacctacctcagggaacagaaggccaagaggaacagccagtgggtacccaccctgcccaacagctcccaccacttagatgccgtgccatgctccacaaccatcaacaggaaccgcatgggccgagacaagaagagaaccttccccctttgctttgatgaccatgacccagctgtgatccatgagaacgcatctcagcccgaggtgctggtccccatccggctggacatggagatcgatgggcagaagctgcgagacgccttcacctggaacatgaatgagaagttgatgacgcctgagatgttttcagaaatcctctgtgacgatctggatttgaacccgctgacgtttgtgccagccatcgcctctgccatcagacagcagatcgagtcctaccccacggacagcatcctggaggaccagtcagaccagcgcgtcatcatcaagctgaacatccatgtgggaaacatttccctggtggaccagtttgagtgggacatgtcagagaaggagaactcaccagagaagtttgccctgaagctgtgctcggagctggggttgggcggggagtttgtcaccaccatcgcatacagcatccggggacagctgagctggcatcagaagacctacgccttcagcgagaaccctctgcccacagtggagattgccatccggaacacgggcgatgcggaccagtggtgcccactgctggagactctgacagacgctgagatggagaagaagatccgcgaccaggacaggaacacgaggcggatgaggcgtcttgccaacacggccccggcctggtaaccagcccatcagcacacggctcccacggagcatctcagaagattgggccgcctctcctccatcttctggcaaggacagaggcgaggggacagcccagcgccatcctgaggatcgggtgggggtggagtgggggcttccaggtggcccttcccggcacacattccatttgttgagccccagtcctgccccccaccccaccctccctacccctccccagtctctggggtcaggaagaaaccttattttaggttgtgttttgtttttgtataggagccccaggcagggctagtaacagtttttaaataaaaggcaacaggtcatgttcaatttcttcaacaaaaaaaaaaaaaaa

SEQ ID NO: 134876 - DNA, 1158 bp, Artificial Sequence
  derived and/or modified sequence
atgatgatgatggccctgagcaagaccttcggccagaagcccgtgaagttccagctggaggacgacggcgagttctacatgatcggcagcgaggtgggcaactacctgagaatgttcagaggcagcctgtacaagagataccccagcctgtggagaagactggccaccgtggaggagagaaagaagatcgtggccagcagccacggcaagaagaccaagcccaacaccaaggaccacggctacaccaccctggccaccagcgtgaccctgctgaaggccagcgaggtggaggagatcctggacggcaacgacgagaagtacaaggccgtgagcatcagcaccgagccccccacctacctgagagagcagaaggccaagagaaacagccagtgggtgcccaccctgcccaacagcagccaccacctggacgccgtgccctgcagcaccaccatcaacagaaacagaatgggcagagacaagaagagaaccttccccctgtgcttcgacgaccacgaccccgccgtgatccacgagaacgccagccagcccgaggtgctggtgcccatcagactggacatggagatcgacggccagaagctgagagacgccttcacctggaacatgaacgagaagctgatgacccccgagatgttcagcgagatcctgtgcgacgacctggacctgaaccccctgaccttcgtgcccgccatcgccagcgccatcagacagcagatcgagagctaccccaccgacagcatcctggaggaccagagcgaccagagagtgatcatcaagctgaacatccacgtgggcaacatcagcctggtggaccagttcgagtgggacatgagcgagaaggagaacagccccgagaagttcgccctgaagctgtgcagcgagctgggcctgggcggcgagttcgtgaccaccatcgcctacagcatcagaggccagctgagctggcaccagaagacctacgccttcagcgagaaccccctgcccaccgtggagatcgccatcagaaacaccggcgacgccgaccagtggtgccccctgctggagaccctgaccgacgccgagatggagaagaagatcagagaccaggacagaaacaccagaagaatgagaagactggccaacaccgcccccgcctggtag

SEQ ID NO: 134877 - DNA, 1158 bp, Artificial Sequence
  derived and/or modified sequence
atgatgatgatggccctgtcaaagacctttggtcaaaagccagtgaagtttcagctggaggacgacggagaattctatatgataggatcagaggtgggcaattacctcagaatgtttcgggggagcttatacaagcggtacccatccctatggaggcgactggctacagtcgaggaacgcaagaaaatcgtggcttcctcccatggcaaaaagactaagccaaacactaaagatcacgggtatacaaccctggccacctcggtcacactattgaaagcatctgaagtggaggaaattctggatggcaatgacgaaaaatacaaggccgtgagtatttcaacagaacctcccacatatctgagagaacagaaggccaaacgtaattcgcagtgggtgcccactttgcccaatagctcccaccacctggatgctgtgccgtgcagcaccactatcaacaggaatcggatgggtagagacaagaaacggacttttccgctttgtttcgacgaccatgacccagcagtcattcatgagaacgcttcacagcccgaggtcctcgtacctatacgactcgacatggagatagatggccagaaactccgtgatgcctttacctggaacatgaatgagaagttgatgacgccggaaatgttttccgagatcctatgcgacgaccttgacctcaatcccctcacctttgtccccgcaattgccagtgccattcgtcaacaaattgaatcatatccgaccgatagcatactcgaggatcaatcagatcagcgcgtgattatcaagcttaacatccatgttgggaacataagtttagttgatcaatttgagtgggatatgtccgagaaagaaaactcccccgaaaagttcgccctaaagttgtgctccgaattaggtcttgggggcgagttcgtgacaactattgcctattccatccggggacagctcagctggcaccaaaagacttacgcttttagtgagaaccctttgccgactgtcgagatcgctatcagaaatacgggtgacgctgatcagtggtgcccacttcttgaaacattgaccgacgcagaaatggagaaaaaaatcagagatcaggatcgaaatacaagacggatgcggcggctcgctaacacagcgcccgcctggtag

SEQ ID NO: 134878 - DNA, 1158 bp, Artificial Sequence
  derived and/or modified sequence
atgatgatgatggccctgagcaagaccttcggccagaagcctgtgaagttccagctggaggatgatggagagttctacatgattggcagcgaggtgggcaactacctgaggatgttccggggcagcctgtacaagcgctaccccagcctgtggaggcggctggccaccgtggaggagaggaagaagatcgtggccagcagccacggcaagaagaccaagcccaacaccaaggaccacggctacaccaccctggccacctctgtgaccctgctgaaggccagcgaggtggaggagatcctggatggaaatgatgagaagtacaaggctgtgtccatcagcacagagccccccacctacctgcgggagcagaaggccaagaggaacagccagtgggtgcccaccctgcccaacagcagccaccacctggatgctgtgccctgcagcaccaccatcaacagaaacaggatgggccgggacaagaagaggaccttccccctgtgctttgatgaccatgaccctgctgtgattcatgaaaatgccagccagcctgaggtgctggtgcccatccggctggacatggagattgatggccagaagctgagagatgccttcacctggaacatgaatgagaagctgatgaccccagagatgttttctgagatcctgtgtgatgacctggacctgaaccccctgacctttgtgcctgccatcgccagcgccatccggcagcagatcgagagctaccccacagacagcatcctggaggaccagagcgaccagagggtcatcatcaagctgaacatccacgtgggcaacatcagcctggtggaccagtttgagtgggacatgtctgagaaggagaacagccctgagaagtttgccctgaagctgtgcagcgagctgggcctgggcggggagtttgtgaccaccatcgcctacagcatccggggccagctgtcctggcaccagaagacctacgccttcagcgagaaccccctgcccaccgtggagatcgccatcagaaatactggagatgctgaccagtggtgccccctgctggagaccctgacagatgctgagatggagaagaagatccgggaccaggacaggaacaccaggaggatgaggcggctggccaacacagccccagcctggtag

SEQ ID NO: 134879 - DNA, 1158 bp, Artificial Sequence
  derived and/or modified sequence
atgatgatgatggccctgagcaagaccttcggccagaagcccgtgaaattccaactggaggatgacggagaattctacatgatcggcagcgaggttgggaattaccttagaatgttccgaggctccttgtataagcgctatccttctctatggcgccgcctggctaccgtggaagagagaaaaaaaatcgtggcgtccagccacggaaaaaagaccaaacccaatacgaaggaccatggctacaccactttggcaacatctgtcactttattaaaggcctctgaagtggaagaaattctggacggaaacgacgaaaagtacaaagcggtttctattagcaccgagcctcccacttatctgcgcgaacaaaaggccaaaagaaacagccagtgggttcccacccttcccaacagtagccatcacttggacgcagtgccctgttctaccactattaatagaaacaggatgggcagggacaaaaagagaacgttcccactctgtttcgatgaccacgaccccgctgtaattcatgaaaacgcctcacagccagaggttctcgttccgattcgccttgatatggaaatcgacgggcagaagctgcgggacgcattcacgtggaatatgaatgagaagctaatgacaccggagatgtttagcgagatcctgtgtgacgacttggacttaaacccgttgacttttgttcctgcaattgcatccgctatcagacaacagatcgaatcataccctaccgacagcattttggaggaccagtcagatcaaagagtgatcattaagttgaatattcatgtgggaaacatatctttagtggatcagttcgaatgggatatgagcgaaaaggagaacagtcctgaaaagttcgcgctgaagctctgttcagagctggggttggggggcgaattcgtcactacaattgcctactctatccgcggacagttgagctggcatcaaaaaacatatgccttttcagagaatccccttcccaccgtggaaattgctattcgcaatacaggggacgccgatcaatggtgtcctctgcttgagaccctgaccgacgcggagatggaaaaaaaaataagagatcaagacagaaacactcggcggatgcggaggctcgccaatactgctccggcatggtag

SEQ ID NO: 134880 - DNA, 1158 bp, Artificial Sequence
  derived and/or modified sequence
atgatgatgatggctttgtcgaagacgttcggtcaaaagccagtcaaattccagttagaggatgacggcgagttctacatgattggctcggaagtgggcaattatctgcgcatgtttagaggctccctgtacaagagatatccaagtctgtggaggaggctcgcaacagtggaagaaaggaagaaaatagtggcatctagccatggtaagaagacaaaacctaacacaaaggatcatggttatacaaccttggccacttccgtgaccctcctcaaagcttcagaggtggaagaaatactcgatggaaatgatgaaaaatacaaggctgtgagtatttcaacagagccacctacctacctgcgggaacagaaggcaaagaggaatagtcagtgggtgcctactctgccaaattcttcgcatcacctggacgccgtcccctgtagtaccaccatcaacaggaatcgtatgggcagagataagaagaggacattccccctctgttttgatgatcacgatccagctgttattcatgagaacgcgtcccaaccggaagtcctggtgccaatccgtctcgatatggaaatcgacggccagaagctgcgcgacgcattcacttggaacatgaatgaaaagctgatgactcccgagatgttttcggaaattctctgtgacgacttagaccttaaccctttaacattcgtacctgccattgcatccgctatcagacaacagattgaatcctatcctactgactcaattttagaagatcagagtgatcaaagagtgattattaagctgaatattcacgtgggaaatatcagcctggtcgaccagttcgaatgggacatgtcagaaaaggagaattctcccgaaaaatttgccctgaaactctgtagcgaactcgggctggggggagagtttgttaccacaatcgcgtatagcattaggggccagctgtcatggcatcagaagacttacgccttttctgaaaatcccttgccaaccgtggaaatcgctatccgcaacactggggatgccgaccagtggtgcccactgctggagaccctcaccgatgccgagatggagaagaagattcgtgaccaggaccggaatacccgacgaatgcgacgtctggccaacacggcacctgcctggtag

SEQ ID NO: 134881 - DNA, 1690 bp, Artificial Sequence
  derived and/or modified sequence
ctgcgcactgagggcggcctggtcgtcgtctgcggcggcggcggcggctgaggagcccggctgaggcgccagtacccggcccggtccgcatttcgccttccggcttcggtttccctcggcccagcacgccccggccccgccccagccctcctgatccctcgcagcccggctccggccgcccgcctctgccgccgcaatgatgatgatggcgctgagcaagaccttcgggcagaagcccgtgaagttccagctggaggacgacggcgagttctacatgatcggctccgaggtgggaaactacctccgtatgttccgaggttctctgtacaagagatacccctcactctggaggcgactagccactgtggaagagaggaagaaaatagttgcatcgtcacatggtaaaaaaacaaaacctaacactaaggatcacggatacacgactctagccaccagtgtgaccctgttaaaagcctcggaagtggaagagattctggatggcaacgatgagaagtacaaggctgtgtccatcagcacagagccccccacctacctcagggaacagaaggccaagaggaacagccagtgggtacccaccctgcccaacagctcccaccacttagatgccgtgccatgctccacaaccatcaacaggaaccgcatgggccgagacaagaagagaaccttccccctttgctttgatgaccatgacccagctgtgatccatgagaacgcatctcagcccgaggtgctggtccccatccggctggacatggagatcgatgggcagaagctgcgagacgccttcacctggaacatgaatgagaagttgatgacgcctgagatgttttcagaaatcctctgtgacgatctggatttgaacccgctgacgtttgtgccagccatcgcctctgccatcagacagcagatcgagtcctaccccacggacagcatcctggaggaccagtcagaccagcgcgtcatcatcaagctgaacatccatgtgggaaacatttccctggtggaccagtttgagtgggacatgtcagagaaggagaactcaccagagaagtttgccctgaagctgtgctcggagctggggttgggcggggagtttgtcaccaccatcgcatacagcatccggggacagctgagctggcatcagaagacctacgccttcagcgagaaccctctgcccacagtggagattgccatccggaacacgggcgatgcggaccagtggtgcccactgctggagactctgacagacgctgagatggagaagaagatccgcgaccaggacaggaacacgaggcggatgaggcgtcttgccaacacggccccggcctggtaaccagcccatcagcacacggctcccacggagcatctcagaagattgggccgcctctcctccatcttctggcaaggacagaggcgaggggacagcccagcgccatcctgaggatcgggtgggggtggagtgggggcttccaggtggcccttcccggcacacattccatttgttgagccccagtcctgccccccaccccaccctccctacccctccccagtctctggggtcaggaagaaaccttattttaggttgtgttttgtttttgtataggagccccaggcagggctagtaacagtttttaaataaaaggcaacaggtcatgttcaatttcttcaa

SEQ ID NO: 134882 - protein, 1105 aa, Artificial Sequence
  derived and/or modified sequence
MAAAAGGGGPGTAVGATGSGIAAAAAGLAVYRRKDGGPATKFWESPETVSQLDSVRVWLGKHYKKYVHADAPTNKTLAGLVVQLLQFQEDAFGKHVTNPAFTKLPAKCFMDFKAGGALCHILGAAYKYKNEQGWRRFDLQNPSRMDRNVEMFMNIEKTLVQNNCLTRPNIYLIPDIDLKLANKLKDIIKRHQGTFTDEKSKASHHIYPYSSSQDDEEWLRPVMRKEKQVLVHWGFYPDSYDTWVHSNDVDAEIEDPPIPEKPWKVHVKWILDTDIFNEWMNEEDYEVDENRKPVSFRQRISTKNEEPVRSPERRDRKASANARKRKHSPSPPPPTPTESRKKSGKKGQASLYGKRRSQKEEDEQEDLTKDMEDPTPVPNIEEVVLPKNVNLKKDSENTPVKGGTVADLDEQDEETVTAGGKEDEDPAKGDQSRSVDLGEDNVTEQTNHIIIPSYASWFDYNCIHVIERRALPEFFNGKNKSKTPEIYLAYRNFMIDTYRLNPQEYLTSTACRRNLTGDVCAVMRVHAFLEQWGLVNYQVDPESRPMAMGPPPTPHFNVLADTPSGLVPLHLRSPQVPAAQQMLNFPEKNKEKPVDLQNFGLRTDIYSKKTLAKSKGASAGREWTEQETLLLLEALEMYKDDWNKVSEHVGSRTQDECILHFLRLPIEDPYLENSDASLGPLAYQPVPFSQSGNPVMSTVAFLASVVDPRVASAAAKAALEEFSRVREEVPLELVEAHVKKVQEAARASGKVDPTYGLESSCIAGTGPDEPEKLEGAEEEKMEADPDGQQPEKAENKVENETDEGDKAQDGENEKNSEKEQDSEVSEDTKSEEKETEENKELTDTCKERESDTGKKKVEHEISEGNVATAAAAALASAATKAKHLAAVEERKIKSLVALLVETQMKKLEIKLRHFEELETIMDREKEALEQQRQQLLTERQNFHMEQLKYAELRARQQMEQQQHGQNPQQAHQHSGGPGLAPLGAAGHPGMMPHQQPPPYPLMHHQMPPPHPPQPGQIPGPGSMMPGQHMPGRMIPTVAANIHPSGSGPTPPGMPPMPGNILGPRVPLTAPNGMYPPPPQQQPPPPPPADGVPPPPAPGPPASAAP

SEQ ID NO: 134883 - DNA, 5780 bp, Artificial Sequence
  derived and/or modified sequence
ctgggcggggccgggaagcggcagtggcggctacgcgcgcgggggtgcgcgcgggaacgaccgggaaacaccgcgagggccggggtgggccaggctgtggggacgacgggctgcgacgatggccgcagcggcgggcggcggcgggccggggacagcggtaggcgccacgggctcggggattgcggcggcagccgcaggcctagctgtttatcgacggaaggatgggggcccggccaccaagttttgggagagcccggagacggtgtcccagctggattcggtgcgggtctggctgggcaagcactacaagaagtatgttcatgcggatgctcctaccaataaaacactggctgggctggtggtgcagcttcttcagttccaggaagatgcctttgggaagcatgtcaccaacccggccttcaccaaactccctgcaaagtgtttcatggatttcaaagctggaggcgccttatgtcacattcttggggctgcttacaagtataaaaatgaacagggatggcggaggtttgacctacagaacccatctcgaatggatcgtaatgtggaaatgtttatgaacattgaaaaaacattggtgcagaacaattgtttgaccagacccaacatctacctcattccagacattgatctgaagttggctaacaaattgaaagatatcatcaaacgacatcagggaacatttacggatgagaagtcaaaagcttcccaccacatttacccatattcttcctcacaagacgatgaagaatggttgagaccggtgatgagaaaagagaagcaagtgttagtgcattggggcttttacccagacagctatgatacttgggtccatagtaatgatgttgatgctgaaattgaagatccaccaattccagaaaaaccatggaaggttcatgtgaaatggattttggacactgatattttcaatgaatggatgaatgaggaggattatgaggtggatgaaaataggaagcctgtgagttttcgtcagcggatttcaaccaagaatgaagagccagtcagaagtccagaaagaagagatagaaaagcatcagctaatgctcgaaagaggaaacattcgccttcgcctccccctccgacaccaacagaatcacggaagaagagtgggaagaaaggccaagctagcctttatgggaagcgcagaagtcagaaagaggaagatgagcaagaagatctaaccaaggatatggaagacccaacacctgtacccaatatagaagaagtagtacttcccaaaaatgtgaacctaaagaaagatagtgaaaatacacctgttaaaggaggaactgtagcggatctagatgagcaggatgaagaaacagtcacagcaggaggaaaggaagatgaagatcctgccaaaggtgatcagagtcgatcagttgaccttggggaagataatgtgacagagcagaccaatcacattattattcctagttatgcatcatggtttgattataactgtattcatgtgattgaacggcgtgctcttcctgagttcttcaatggaaaaaacaaatccaagactccagaaatatacttggcatatcgaaattttatgattgacacgtatcgtctaaacccccaagagtatttaactagcactgcttgtcggaggaacttgactggagatgtgtgtgctgtgatgagggtccatgcctttttagagcagtggggactcgttaattaccaagttgacccggaaagtagacccatggcaatgggacctcctcctactcctcattttaatgtattagctgataccccctctgggcttgtgcctctgcatcttcgatcacctcaggttcctgctgctcaacagatgctaaattttcctgagaaaaacaaggaaaaaccagttgatttgcagaactttggtctccgtactgacatttactccaagaaaacattagcaaagagtaaaggtgctagtgctggaagagaatggactgaacaggagacccttctactcctggaggccctggagatgtacaaggatgattggaacaaagtgtcggaacatgttggaagtcgtactcaggatgaatgcatcctccactttttgagacttcccattgaggacccataccttgagaattcagatgcttcccttgggcctttggcctaccagcctgtccccttcagtcagtcaggaaatccagttatgagtactgttgcttttttggcatctgtggtggaccctcgcgtggcatctgctgcagcaaaagcggctttggaggagttttctcgggtccgggaggaggtaccactggaattggttgaagctcatgtcaagaaagtacaagaagcagcacgagcctctgggaaagtggatcccacctacggtctggagagcagctgcattgcaggcacagggcccgatgagccagagaagcttgaaggagctgaagaggaaaaaatggaagccgaccctgatggtcagcagcctgaaaaggcagaaaataaagtggaaaatgaaacggatgaaggtgataaagcacaagatggagaaaatgaaaaaaatagtgaaaaggaacaggatagtgaagtgagtgaggataccaaatcagaagaaaaggagactgaagagaacaaagaactcactgatacatgtaaagaaagagaaagtgatactgggaagaagaaagtagaacatgaaatttccgaaggaaatgttgccacagccgcagcagctgctcttgcctcagcggctaccaaagccaagcacctggctgcagtggaagaaagaaagatcaagtccctggtagctctcttggttgagacacaaatgaagaaactagagatcaaacttcgacattttgaagagctggaaactatcatggacagagagaaagaagctctagaacaacagaggcagcagttgcttactgaacgccaaaacttccacatggaacagctgaagtatgctgaattacgagcacgacagcaaatggaacagcagcagcatggccagaaccctcaacaggcacaccagcactcaggaggacctggcctggccccacttggagcagcagggcaccctggcatgatgcctcatcaacagccccctccctaccctctgatgcaccaccagatgccaccacctcatccaccccagccaggtcagataccaggcccaggttccatgatgcccgggcagcacatgccaggccgcatgattcccactgttgcagccaacatccacccctctgggagtggccctacccctcctggcatgccaccaatgccaggaaacatcttaggaccccgggtacccctgacagcacctaacggcatgtatccccctccaccacagcagcagccaccgccaccaccacctgcagatggggtccctccgcctcctgctcctggcccgccagcctcagctgctccttagcctggaagatgcagggaacctccacgcccaccaccatgagctggagtggggatgacaagacttgtgttcctcaactttcttgggtttctttcaggatttttcttctcacagctccaagcacgtgtcccgtgcctccccactcctcttaccacccctctctctgacactttttgtgttgggtcctcagccaacactcaaggggaaacctgtagtgacagtgtgccctggtcatccttaaaataacctgcatctcccctgtcctggtgtgggagtaagctgacagtttctctgcaggtcctgtcaactttagcatgctatgtctttaccatttttgctctcttgcagttttttgctttgtcttatgcttctatggataatgctatataatcattatctttttatctttctgttattattgttttaaaggagagcatcctaagttaataggaaccaaaaaataatgatgggcagaagggggggaatagccacaggggacaaaccttaaggcattataagtgaccttatttctgcttttctgagctaagaatggtgctgatggtaaagtttgagacttttgccacacacaaatttgtgaaaattaaacgagatgtggaaggagaacctcagtgattttattccctagtgaggcctctgagggcctccacactgcctggcagaacataccactgaactagtatgtgctagaggagggcacaaacatccgctccttccctaggcctgctggctctggttttctatgcagatgattcattggattgggggtgagtgttttgtttttctgggggcagtgtgagctttgagggttggaatattgggaggcattccttagtttcctcaactagcctggaaagttaggagtctagggtaattacccccaatgagtctagcctactattcactgctttgtgtgcatttttttctccctctttaaaaaaccctttaaaagaaaaaaaaaagtagatagtgctaaatattttagctcatgaaacttggttaggatggctgggggtacaagtccccaaactacctcttgttacagtagccagggagtggaatttcgtcaaccggtacttttaaggttaggatgggacgggaaaagtgaagcaggatattagctccttataccttctcccttccatttctgagatctcacattccatctatcacagggttttcaaagagatgctgagggtaacaaggaactcacttggcagtcagagcatcatgctttgaggtttggggtgctcaggctgggagggtagaatgccattccagaggacaagccacaaaaatgccttaatttgagctcgtatttacccctgctgataagtgacttgagagttcccggttttttcctcttgtccttccctcccttctgtccttccatgtgtggggaaagggtgtttttggtagagcttggtttccaaagcgcctggctttctcacttcacattctcaagtggcagtttcattatttagaatgcaaggtggacatcttttggatatctttttctatatattttctaaagctttacatatgagagggtatagggaggtgtttataaaacacttgagaacttttttccttaatatcagaaagcaaaaaaataaaaccacaattgagatttgcctttcaaaccctcaggtttgcctctaaccaggtgtccctggtcaccatcagagtactggaatacgggaaccgaggagaccttggtccttttgtttttgttctggactcttgggagtggaaatgagaatgagtttattcctactggagcttagttccaatgcatttggctccagaaagaccccagtgccttttgacaatggccagggttttacctacttcctgccagtctttcccaaaggaaactcattccaaatacttcttttttcccctggagtccgagaaggaaaatggaattctggttcatactgtggtcccttgtaacctcaggtctttaatgtgatcactttcaaatttaaaagatccaggtggaaatatttttactatagtaataattctacaaaatacctgaattcttaacactgttatatttcagtataagtggtggctttttcttttcatgtctttgatctggttttattcctgtaattcagccacctgattttgtgaggggggggaataatatgtggtttttgtacaaacatgtttctcagtgtgttgttattttggaaaaaatgaggggagggagtttggcaagaatggagaaaatgaatgaagaaggcctaatctctctctttttcagtgaataaatggaacaccatttctggattctaaaaaaaaaaaaaaaaaaaaaaaa

SEQ ID NO: 134884 - DNA, 3318 bp, Artificial Sequence
  derived and/or modified sequence
atggccgccgccgccggcggcggcggccccggcaccgccgtgggcgccaccggcagcggcatcgccgccgccgccgccggcctggccgtgtacagaagaaaggacggcggccccgccaccaagttctgggagagccccgagaccgtgagccagctggacagcgtgagagtgtggctgggcaagcactacaagaagtacgtgcacgccgacgcccccaccaacaagaccctggccggcctggtggtgcagctgctgcagttccaggaggacgccttcggcaagcacgtgaccaaccccgccttcaccaagctgcccgccaagtgcttcatggacttcaaggccggcggcgccctgtgccacatcctgggcgccgcctacaagtacaagaacgagcagggctggagaagattcgacctgcagaaccccagcagaatggacagaaacgtggagatgttcatgaacatcgagaagaccctggtgcagaacaactgcctgaccagacccaacatctacctgatccccgacatcgacctgaagctggccaacaagctgaaggacatcatcaagagacaccagggcaccttcaccgacgagaagagcaaggccagccaccacatctacccctacagcagcagccaggacgacgaggagtggctgagacccgtgatgagaaaggagaagcaggtgctggtgcactggggcttctaccccgacagctacgacacctgggtgcacagcaacgacgtggacgccgagatcgaggacccccccatccccgagaagccctggaaggtgcacgtgaagtggatcctggacaccgacatcttcaacgagtggatgaacgaggaggactacgaggtggacgagaacagaaagcccgtgagcttcagacagagaatcagcaccaagaacgaggagcccgtgagaagccccgagagaagagacagaaaggccagcgccaacgccagaaagagaaagcacagccccagcccccccccccccacccccaccgagagcagaaagaagagcggcaagaagggccaggccagcctgtacggcaagagaagaagccagaaggaggaggacgagcaggaggacctgaccaaggacatggaggaccccacccccgtgcccaacatcgaggaggtggtgctgcccaagaacgtgaacctgaagaaggacagcgagaacacccccgtgaagggcggcaccgtggccgacctggacgagcaggacgaggagaccgtgaccgccggcggcaaggaggacgaggaccccgccaagggcgaccagagcagaagcgtggacctgggcgaggacaacgtgaccgagcagaccaaccacatcatcatccccagctacgccagctggttcgactacaactgcatccacgtgatcgagagaagagccctgcccgagttcttcaacggcaagaacaagagcaagacccccgagatctacctggcctacagaaacttcatgatcgacacctacagactgaacccccaggagtacctgaccagcaccgcctgcagaagaaacctgaccggcgacgtgtgcgccgtgatgagagtgcacgccttcctggagcagtggggcctggtgaactaccaggtggaccccgagagcagacccatggccatgggccccccccccaccccccacttcaacgtgctggccgacacccccagcggcctggtgcccctgcacctgagaagcccccaggtgcccgccgcccagcagatgctgaacttccccgagaagaacaaggagaagcccgtggacctgcagaacttcggcctgagaaccgacatctacagcaagaagaccctggccaagagcaagggcgccagcgccggcagagagtggaccgagcaggagaccctgctgctgctggaggccctggagatgtacaaggacgactggaacaaggtgagcgagcacgtgggcagcagaacccaggacgagtgcatcctgcacttcctgagactgcccatcgaggacccctacctggagaacagcgacgccagcctgggccccctggcctaccagcccgtgcccttcagccagagcggcaaccccgtgatgagcaccgtggccttcctggccagcgtggtggaccccagagtggccagcgccgccgccaaggccgccctggaggagttcagcagagtgagagaggaggtgcccctggagctggtggaggcccacgtgaagaaggtgcaggaggccgccagagccagcggcaaggtggaccccacctacggcctggagagcagctgcatcgccggcaccggccccgacgagcccgagaagctggagggcgccgaggaggagaagatggaggccgaccccgacggccagcagcccgagaaggccgagaacaaggtggagaacgagaccgacgagggcgacaaggcccaggacggcgagaacgagaagaacagcgagaaggagcaggacagcgaggtgagcgaggacaccaagagcgaggagaaggagaccgaggagaacaaggagctgaccgacacctgcaaggagagagagagcgacaccggcaagaagaaggtggagcacgagatcagcgagggcaacgtggccaccgccgccgccgccgccctggccagcgccgccaccaaggccaagcacctggccgccgtggaggagagaaagatcaagagcctggtggccctgctggtggagacccagatgaagaagctggagatcaagctgagacacttcgaggagctggagaccatcatggacagagagaaggaggccctggagcagcagagacagcagctgctgaccgagagacagaacttccacatggagcagctgaagtacgccgagctgagagccagacagcagatggagcagcagcagcacggccagaacccccagcaggcccaccagcacagcggcggccccggcctggcccccctgggcgccgccggccaccccggcatgatgccccaccagcagccccccccctaccccctgatgcaccaccagatgccccccccccaccccccccagcccggccagatccccggccccggcagcatgatgcccggccagcacatgcccggcagaatgatccccaccgtggccgccaacatccaccccagcggcagcggccccaccccccccggcatgccccccatgcccggcaacatcctgggccccagagtgcccctgaccgcccccaacggcatgtaccccccccccccccagcagcagccccccccccccccccccgccgacggcgtgccccccccccccgcccccggcccccccgccagcgccgccccctag

SEQ ID NO: 134885 - DNA, 78 bp, Artificial Sequence
  derived and/or modified sequence
atggcgggcagggtgccaagcctgctggtattactagttttccctagttcatgcctcgcttttcgaagccccctgtag

SEQ ID NO: 134886 - DNA, 3318 bp, Artificial Sequence
  derived and/or modified sequence
atggctgccgccgccggtggtgggggcccggggaccgccgtgggcgcaacagggtccgggatcgcagccgccgccgctggcctcgccgtttacagacggaaggacggaggccctgctactaagttttgggagagcccagagactgtgagccagctcgattctgtccgggtatggctcggtaagcactataagaagtatgttcacgctgacgctccaactaacaaaacactcgcggggctggtcgtgcagttgctgcaatttcaggaggatgccttcgggaaacacgtgactaatcctgcctttaccaagttgcctgcgaaatgcttcatggactttaaagccggtggtgccctgtgccacattttgggggcagcctacaagtataagaacgagcagggttggcgcaggttcgacctgcagaatccctcaaggatggatcgcaatgtcgagatgttcatgaatatagaaaagacacttgtccagaacaactgtctcacacgccctaacatctaccttattccagatatcgatctgaagctcgccaataaattgaaggacattataaaaagacaccaaggtacattcaccgatgaaaagagtaaagcctcacaccacatatacccatactctagttcccaagacgatgaggaatggctccgccccgtgatgaggaaggaaaagcaggtgctggtgcattggggcttttaccccgacagttatgatacctgggtgcatagcaacgacgttgatgctgaaatcgaggatccccctattccagagaaaccctggaaggtgcacgttaaatggatcctggatactgacattttcaacgaatggatgaacgaagaggattatgaggtggacgagaatagaaagccggttagttttcggcagagaatctccaccaaaaacgaggagcccgtcagaagtccagaaaggcgtgaccggaaagccagcgccaacgcccggaagcgaaaacattcgccttctccccccccgcccactccaaccgagtcacgtaagaaaagtggaaaaaaaggtcaggccagcctgtatggcaaaagaaggtcccagaaagaagaggacgagcaagaagacctgacgaaagatatggaggacccaacacccgtgcctaatatagaagaggtggtgctaccaaagaacgtgaacttgaaaaaagattccgaaaacaccccggtgaaaggaggcacggtcgctgatctggacgagcaagatgaggaaacagtgaccgccggcggtaaggaagatgaggatcccgccaagggtgaccaatctcggagtgtggatctgggcgaggataacgttacagagcagacaaatcatatcatcattccatcttacgcaagttggttcgattataactgtatccatgtaattgaacggagggcactgcccgaattcttcaacgggaaaaacaagtccaagaccccagaaatctacctagcatataggaactttatgatagacacatacaggttaaatccccaggaatatctcacctcgaccgcgtgcaggcggaacttgactggcgacgtatgcgcagtcatgcgcgtgcatgccttcttggagcagtgggggttggttaactatcaggtggaccccgagagtcgccccatggctatggggcctccgcccactccacatttcaacgtcctagcagacactccaagtgggcttgtgcccctccaccttaggtctccccaggtgccagcagcgcagcagatgctgaacttcccagagaagaacaaagagaagcctgtggatctgcagaactttggacttagaactgacatttacagtaaaaaaactctcgccaagtctaagggcgctagtgccggccgtgaatggactgaacaggagactctcttattattagaagctctggaaatgtataaagatgattggaataaggtgagtgaacacgttgggtcacggactcaagatgagtgcatcttgcactttctgcggctaccaatcgaggacccatacctcgagaacagcgacgcctcattgggaccattggcatatcagcctgtcccctttagtcagagcggtaatcctgtaatgtctacggtggcctttctggcctctgttgtggacccaagggtggcttctgccgcagcgaaagctgcgctggaagagttctcacgcgtgagagaagaagtgcctctggagcttgtagaggcccacgtgaagaaggtccaagaagcggctcgagctagtgggaaggtggaccctacttatggcctggagtctagctgtatcgccggcactgggcccgatgagcctgaaaagctggagggcgccgaagaggagaaaatggaagctgacccagacggccaacagccagagaaggccgaaaacaaggtagaaaatgagacagatgaaggcgataaggcacaggacggagagaacgagaaaaactctgagaaagagcaggatagcgaggtctcagaggatacgaaaagcgaagagaaggagacagaggaaaataaggagttgacagacacgtgcaaagaaagggagtctgacaccgggaagaagaaagttgagcatgaaatttccgaagggaacgtggcaaccgccgctgctgccgctctcgcttcagctgccacaaaggctaagcacctcgccgctgtcgaagagcgtaaaattaaaagcttagtggccctcctggtcgagacccaaatgaaaaaactggagatcaagctgcggcacttcgaagagctggaaactatcatggatagagagaaggaggccttagaacaacaacgccaacagctgctcactgaaagacagaacttccacatggagcaattaaagtacgctgagttgcgggccagacagcagatggagcagcagcaacacggccagaacccacaacaagcccaccagcattcaggcggtcctggattggcccctcttggtgccgccggacatccgggcatgatgcctcaccagcaaccccccccctacccactgatgcatcatcagatgccaccaccccaccccccacagccaggccagatccctggtcctggctcgatgatgcccggccagcacatgcccggacgaatgatccctacagttgcagctaacatccatccatctggctccgggcctaccccgccagggatgcctcctatgccaggaaacatcctggggcctagagttcctctgacggccccaaacggaatgtacccaccacccccacaacaacagcccccacctccacctccggccgatggggttcctccgccgcctgctcccggaccccctgcctcagcagctccatag

SEQ ID NO: 134887 - DNA, 3318 bp, Artificial Sequence
  derived and/or modified sequence
atggctgctgctgctgggggcggcggccctggaacagctgtgggcgccactggaagtggcattgctgctgctgctgctggcctggccgtgtacagaaggaaggatggcggccctgccaccaagttctgggagagccctgagaccgtgtcccagctggacagcgtgcgggtgtggctgggcaagcactacaagaagtatgtgcatgctgatgcccccaccaacaagaccctggccggcctggtggtgcagctgctgcagttccaggaggatgccttcggcaagcacgtgaccaacccagccttcaccaagctgcctgccaagtgcttcatggacttcaaggccggcggggccctgtgccacatcctgggcgccgcctacaagtacaagaatgagcagggctggaggagatttgacctgcagaaccccagcaggatggacagaaatgtggagatgttcatgaacatcgagaagaccctggtgcagaacaactgcctgacccggcccaacatctacctgatcccagacatcgacctgaagctggccaacaagctgaaggacatcatcaagaggcaccagggcaccttcacagatgagaagagcaaggccagccaccacatctacccctacagcagcagccaggatgatgaggagtggctgcggcctgtgatgaggaaggagaagcaggtgctggtgcactggggcttctacccagacagctatgacacctgggtgcacagcaatgatgtggatgctgagattgaggacccccccatccctgagaagccctggaaggtgcacgtgaagtggatcctggacacagacatcttcaatgagtggatgaatgaagaagattatgaggtggatgaaaataggaagcctgtgtccttccggcagaggatcagcaccaagaatgaggagcctgtgcgcagccctgagcggcgggacaggaaggccagcgccaatgccaggaagaggaagcacagccccagccccccaccacccacccccacagagagcaggaagaagagcggcaagaagggccaggccagcctgtatggcaagagaagaagccagaaggaggaggatgagcaggaggacctgaccaaggacatggaggaccccacccctgtgcccaacatcgaggaggtggtgctgcccaagaatgtgaacctgaagaaggacagcgagaacacccctgtgaagggcggcaccgtggccgacctggatgagcaggatgaggagaccgtgacagctgggggcaaggaggatgaggaccctgccaagggggaccagagccgctctgtggacctgggagaagataatgtgacagagcagaccaaccacatcatcatccccagctatgcctcctggtttgactacaactgcatccacgtgattgaaagaagagccctgcctgagttcttcaacgggaagaacaagagcaagaccccagagatctacctggcctacagaaacttcatgattgacacctaccgcctgaacccccaggagtacctgaccagcacagcctgcagaagaaacctgactggagatgtgtgtgctgtgatgagggtgcacgccttcctggagcagtggggcctggtgaactaccaggtggaccctgagagccggcccatggccatgggccccccacccaccccccacttcaacgtgctggccgacacccccagcggcctggtgcccctgcacctgcggagcccccaggtgcctgctgcccagcagatgctgaacttccctgagaagaacaaggagaagcctgtggacctgcagaactttggcctgaggacagacatctacagcaagaagaccctggccaagagcaaaggagccagcgctggccgggagtggacagagcaggagaccctgctgctgctggaggccctggagatgtacaaggatgactggaacaaggtgtctgagcacgtgggcagcaggacccaggatgagtgcatcctgcacttcctgcggctgcccatcgaggacccctacctggagaacagtgatgccagcctgggccccctggcctaccagcctgtgcccttcagccagagcggcaaccctgtgatgagcacagtggccttcctggcctctgtggtggacccccgggtggccagcgctgctgccaaggccgccctggaggagttcagccgggtgcgggaggaggtgcccctggagctggtggaggcccacgtgaagaaggtgcaggaggccgcccgggccagcggcaaggtggaccccacctacggcctggagagcagctgcatcgccggcactggaccagatgagcctgagaagctggagggcgctgaggaggagaagatggaggccgaccctgatggccagcagcctgagaaggccgagaacaaggtggagaatgaaacagatgaaggagacaaggcccaggatggagaaaatgagaagaacagcgagaaggagcaggacagcgaggtgtctgaggacaccaagtctgaggagaaggagacagaggagaacaaggagctgacagacacctgcaaggagcgggagagtgacaccgggaagaagaaggtggagcacgagatcagcgagggcaatgtggccacagctgctgctgctgccctggccagcgctgccaccaaggccaagcacctggccgctgtggaggagaggaagatcaagagcctggtggccctgctggtggagacccagatgaagaagctggagatcaagctgcggcactttgaggagctggagaccatcatggaccgggagaaggaggccctggagcagcagaggcagcagctgctgacagagcggcagaacttccacatggagcagctgaagtatgcagagctgcgggcccggcagcagatggagcagcagcagcacggccagaacccccagcaggcccaccagcacagcggcggccctggcctggcccccctgggcgctgctggccaccctggcatgatgccccaccagcagcccccaccctaccccctgatgcaccaccagatgcccccaccccaccccccccagcccggccagatccctggccctggctccatgatgcctggccagcacatgcctggccgcatgatccccaccgtggccgccaacatccaccccagcggcagcggccccaccccacctggcatgccacccatgcctggcaacatcctgggcccccgggtgcccctgacagccccaaatggcatgtacccacctccaccccagcagcagcccccacctcctcctccagcagatggagtgcccccacctccagcccctggccccccagccagcgctgccccctag

SEQ ID NO: 134888 - DNA, 3318 bp, Artificial Sequence
  derived and/or modified sequence
atggccgccgccgccggcggcggcggccccggcaccgccgtgggcgccaccgggtccggcattgcggccgctgccgctggactggctgtgtaccggcgcaaagatggcggtccagctaccaagttttgggagagtcccgagaccgtctctcagttggattcggtgcgggtctggctcggaaagcattataagaaatatgtgcacgccgatgccccaacaaataagacactggccggactcgttgtgcagctgctccagtttcaggaagatgcattcgggaaacacgtgaccaacccggcattcacaaagctacccgccaaatgctttatggatttcaaagctggcggggccttgtgtcacattctgggggccgcatataagtacaagaacgagcaggggtggagacggtttgatctgcagaatccttctcggatggatcgtaacgtagaaatgttcatgaatattgagaagacattagttcaaaataattgtcttactcggccaaatatatacctcatccccgatattgatctgaaactggcaaataagcttaaagatatcattaagagacaccaggggacatttacggatgagaagagcaaagcgtcccatcatatctacccgtacagcagctctcaggacgatgaagagtggctcagaccggtcatgcggaaggaaaagcaggtgctcgtgcactggggtttctacccagacagctatgacacctgggttcattctaacgacgtggatgcagaaatagaagatccgcccattccagagaagccatggaaggtccacgtgaaatggattctcgacaccgacatatttaacgagtggatgaacgaggaagactacgaggtcgacgagaatcgcaagccagtgtccttccggcaacgtatctctactaagaatgaagaacctgtaagaagccctgaacggagggatcgcaaggcttccgctaatgcaaggaagagaaagcactctccatcccccccgccacccacaccaacagaaagtcggaagaagtctggcaaaaagggccaagcctccttgtacggtaagcgcaggtcgcagaaagaggaagatgagcaggaagaccttaccaaggacatggaagacccaactccagtgccaaatattgaagaggtggtactgccaaagaacgtcaatttaaagaaagactccgagaacacccctgttaagggggggactgtggcggatctagacgagcaagacgaagaaaccgtgacagccggcggaaaagaagatgaggacccagccaagggtgaccaaagcagaagtgtagacctgggagaagacaacgtgaccgaacagaccaaccatatcattattccttcttatgcgtcttggtttgattacaactgcattcacgtgatagagcggagggctctgccagagttctttaatgggaagaataagagtaagactccagaaatttatcttgcctaccgaaactttatgatagatacataccggctaaacccacaggaatatcttacctccaccgcatgtcggagaaacctgacgggagatgtgtgcgcggtaatgagggtgcacgcgttcctggagcagtggggcctggtgaactaccaggtggacccggaaagccggccgatggcaatgggcccccctcccactccacacttcaacgtcctcgccgacaccccaagcggcctcgtcccattgcacctgagaagtccccaggtccctgcggcacaacagatgcttaattttccggagaaaaataaagagaaacccgtcgacctccagaacttcgggcttcgcacagatatatatagcaaaaagacattggcaaagtctaagggcgcaagcgccggaagagagtggaccgaacaggaaaccttgcttctgctcgaggcgcttgaaatgtataaggatgactggaacaaggtgtcagagcacgtagggtcacgcacgcaggatgagtgcatcctgcacttcctgaggctgcccatagaggatccatacctggagaattctgacgcttccctggggcctctggcataccaaccagtgcccttctcacaatccggcaatcctgtcatgtccacagttgcattcctggcatcagtggtggaccctcgggttgcgtcagccgcagcaaaagctgctctggaagagtttagccgggttcgggaagaggtccccctcgagctggtggaggcccatgtgaagaaagtacaagaggctgcacgcgcctctgggaaggtagaccccacctacggacttgaatcctcctgtatcgcaggaacgggcccagacgaacctgaaaaactggaaggcgctgaggaggagaaaatggaggcggatcctgatggccagcagcccgagaaagccgagaacaaagttgagaacgaaactgacgagggtgacaaggcacaagacggagagaatgaaaaaaactccgaaaaggagcaggacagtgaggtttccgaggacacaaagtccgaagagaaagaaaccgaagaaaacaaggaactgacggacacctgtaaggaaagggaatccgacactggtaaaaaaaaggtagagcatgaaattagcgaaggcaatgtggcaacagctgccgccgctgcgttagctagtgccgctacaaaggctaagcatctggccgcagtcgaggagcggaagattaaatcactggttgccctgctcgtggagacccagatgaagaagttggaaataaagttgcgccatttcgaggagttagaaacaattatggacagagaaaaggaagctttggaacagcagcggcagcagttgctgaccgagcgccaaaattttcacatggaacagctgaagtacgcggaattgcgcgctaggcagcagatggagcagcaacagcacggacagaaccctcagcaggcgcaccagcattcgggggggcctggcctggctcccctgggcgcggctggccaccccggaatgatgcctcatcagcaacctcccccatatccattgatgcatcaccagatgcctccgccccacccaccacagcccggacagatacccggcccaggctccatgatgcctggtcagcacatgccaggccgcatgattcccacagtggcagccaacatccatccttccgggtcgggccctactccacctggtatgccacctatgcccggtaacattcttggaccgagggtccccttgaccgcccctaatggcatgtatcccccccctccccaacagcagcctccccctcccccacccgccgatggcgtgcctcctccaccggcacccggtccaccggcatctgccgctccttag

SEQ ID NO: 134889 - DNA, 3318 bp, Artificial Sequence
  derived and/or modified sequence
atggcagcagcagcaggaggaggaggccctggaactgcagtcggagccacgggaagtggtattgcagcagcagctgccggactggccgtatacagacgaaaggatggcggtcccgcaaccaagttctgggagtctccggagacagtctctcaactggacagtgtgcgtgtgtggctcggaaagcattataaaaagtacgtacacgcggacgcccctactaataaaacattagcagggctcgtggtgcagttgttgcagttccaggaagatgcgtttgggaagcatgtgacgaacccagctttcaccaaattgccagctaagtgcttcatggattttaaagccggaggagcgctttgtcatatcctcggagcagcctataaatacaaaaacgagcaggggtggcggagattcgacctccagaatccttcccgtatggaccgtaatgtggagatgtttatgaacattgaaaagacccttgtgcagaacaattgtctgacgcgcccaaatatctatctgatcccagacatcgacttgaagcttgccaacaagctaaaagacatcattaaacgccaccagggtaccttcaccgacgaaaaatcaaaggcctcccatcatatttacccctactcctctagtcaggacgacgaggaatggcttagacctgttatgaggaaggagaagcaggtactggtgcactgggggttttacccagacagctacgacacgtgggtccatagcaatgacgtggatgcagaaatagaagatccgcctatccctgaaaaaccctggaaagtccacgtgaaatggatcctggatacagatatctttaacgagtggatgaacgaggaggattacgaagttgatgaaaatagaaagccagtgtcctttaggcagaggatttcaacaaagaatgaggagcccgtgcgatcccctgagcgtcgcgataggaaggcctccgctaatgcaaggaagcgcaagcatagccctagtccaccaccgcctacacctactgaatcacgcaagaagtctggcaagaaagggcaggcctcactctacggaaaaagacggagccagaaggaagaagatgaacaagaggatttaaccaaggatatggaagatcccacccctgttcccaatattgaagaagtagttctccccaaaaacgtcaatcttaaaaaggattccgagaacactcccgtgaagggcggaaccgtggctgacctggacgagcaagatgaagagacggtgacggccggaggcaaagaagatgaagacccggctaaaggcgaccagagtcgctctgtcgacctgggagaagacaatgtcacggagcaaacaaatcatatcatcatcccttcatatgctagctggttcgattataattgcatccacgtcatcgagagacgggcactaccagagttctttaacggaaagaataagagtaagacgcctgagatctatctcgcatacagaaattttatgatcgacacctatcggctgaacccccaggaatacctgacatcaaccgcatgcagaagaaacctcaccggtgacgtgtgtgctgttatgcgggtccacgctttcctagagcagtggggccttgtcaattaccaggtggaccccgagagccggccaatggcgatgggcccaccacccactccacactttaatgtcctcgcagacacaccttcaggactggttcccttacacctccgctctcctcaggtgcccgctgcccaacagatgcttaacttccctgagaagaacaaggaaaaacctgtcgacttgcagaatttcggactgcgaacggatatttactcaaaaaagacgttggctaaaagtaagggagcgagcgccggtagggagtggactgagcaagagactctgctacttttagaggccctcgagatgtacaaagacgactggaataaagtgtctgagcacgtgggatcgaggacacaagacgagtgtattctgcacttcctgaggcttccaatcgaagatccgtacctggagaacagcgacgcttcactggggcctctggcatatcagccggttcccttttcacagagcggcaatccagttatgagcaccgttgcgtttctcgcttctgtggtggaccctcgagttgcatcagccgcagctaaggcagcactcgaggaattttcacgggtgcgcgaggaggtccctttggagcttgtggaggcgcacgtgaaaaaggttcaggaggctgccagggcctcgggcaaggtcgatcccacctacggcttagagtctagttgtatcgcgggtaccggccctgatgaacctgaaaagctggagggcgcagaagaagagaaaatggaagccgaccccgacggacaacaacctgaaaaggctgaaaacaaggtggagaacgaaactgatgagggagacaaagcacaggatggagagaatgaaaaaaatagcgaaaaagagcaggactcggaagtgagcgaagacaccaagtccgaggaaaaagagacagaggagaataaggagctgaccgacacatgcaaagaacgtgaatcggacactggcaagaagaaagtggagcatgaaatatctgaggggaacgtggccacagccgcagccgctgctcttgctagtgcagctaccaaagctaaacatctcgctgcagtggaagagcgcaagattaagagcctcgtcgcccttctggtggagacacagatgaaaaaattggaaataaaactgcgacacttcgaagagctggaaaccatcatggaccgggagaaggaagccttagagcagcagcggcagcagctcttaacggagcggcagaatttccatatggagcagctgaagtacgccgagctcagggcccgacagcagatggaacagcagcagcacgggcagaatccacagcaagcacaccaacatagcggtggtcctggcctagctccgcttggagccgcagggcacccagggatgatgccacatcagcagcctcccccttatccactgatgcaccatcagatgcccccaccacacccaccgcagccaggacagatccccggacctggcagcatgatgcccggtcagcacatgccgggaaggatgatcccaacagtggccgcaaacatccacccatcgggatccgggcctacgccacccggtatgccaccaatgcctggtaacatccttggacctcgagtgccactgaccgcacccaacggcatgtacccacctccccctcaacagcagcccccacctcccccacctgcggatggcgtacccccacccccagctccaggacctccagcttcagcagcaccttag

SEQ ID NO: 134890 - DNA, 6375 bp, Artificial Sequence
  derived and/or modified sequence
ggctgggcggggccgggaagcggcagtggcggctacgcgcgcgggggtgcgcgcgggaacgaccgggaaacaccgcgagggccggggtgggccaggctgtggggacgacgggctgcgacgatggccgcagcggcgggcggcggcgggccggggacagcggtaggcgccacgggctcggggattgcggcggcagccgcaggcctagctgtttatcgacggaaggatgggggcccggccaccaagttttgggagagcccggagacggtgtcccagctggattcggtgcgggtctggctgggcaagcactacaagaagtatgttcatgcggatgctcctaccaataaaacactggctgggctggtggtgcagcttcttcagttccaggaagatgcctttgggaagcatgtcaccaacccggccttcaccaaactccctgcaaagtgtttcatggatttcaaagctggaggcgccttatgtcacattcttggggctgcttacaagtataaaaatgaacagggatggcggaggtttgacctacagaacccatctcgaatggatcgtaatgtggaaatgtttatgaacattgaaaaaacattggtgcagaacaattgtttgaccagacccaacatctacctcattccagacattgatctgaagttggctaacaaattgaaagatatcatcaaacgacatcagggaacatttacggatgagaagtcaaaagcttcccaccacatttacccatattcttcctcacaagacgatgaagaatggttgagaccggtgatgagaaaagagaagcaagtgttagtgcattggggcttttacccagacagctatgatacttgggtccatagtaatgatgttgatgctgaaattgaagatccaccaattccagaaaaaccatggaaggttcatgtgaaatggattttggacactgatattttcaatgaatggatgaatgaggaggattatgaggtggatgaaaataggaagcctgtgagttttcgtcagcggatttcaaccaagaatgaagagccagtcagaagtccagaaagaagagatagaaaagcatcagctaatgctcgaaagaggaaacattcgccttcgcctccccctccgacaccaacagaatcacggaagaagagtgggaagaaaggccaagctagcctttatgggaagcgcagaagtcagaaagaggaagatgagcaagaagatctaaccaaggatatggaagacccaacacctgtacccaatatagaagaagtagtacttcccaaaaatgtgaacctaaagaaagatagtgaaaatacacctgttaaaggaggaactgtagcggatctagatgagcaggatgaagaaacagtcacagcaggaggaaaggaagatgaagatcctgccaaaggtgatcagagtcgatcagttgaccttggggaagataatgtgacagagcagaccaatcacattattattcctagttatgcatcatggtttgattataactgtattcatgtgattgaacggcgtgctcttcctgagttcttcaatggaaaaaacaaatccaagactccagaaatatacttggcatatcgaaattttatgattgacacgtatcgtctaaacccccaagagtatttaactagcactgcttgtcggaggaacttgactggagatgtgtgtgctgtgatgagggtccatgcctttttagagcagtggggactcgttaattaccaagttgacccggaaagtagacccatggcaatgggacctcctcctactcctcattttaatgtattagctgataccccctctgggcttgtgcctctgcatcttcgatcacctcaggttcctgctgctcaacagatgctaaattttcctgagaaaaacaaggaaaaaccagttgatttgcagaactttggtctccgtactgacatttactccaagaaaacattagcaaagagtaaaggtgctagtgctggaagagaatggactgaacaggagacccttctactcctggaggccctggagatgtacaaggatgattggaacaaagtgtcggaacatgttggaagtcgtactcaggatgaatgcatcctccactttttgagacttcccattgaggacccataccttgagaattcagatgcttcccttgggcctttggcctaccagcctgtccccttcagtcagtcaggaaatccagttatgagtactgttgcttttttggcatctgtggtggaccctcgcgtggcatctgctgcagcaaaagcggctttggaggagttttctcgggtccgggaggaggtaccactggaattggttgaagctcatgtcaagaaagtacaagaagcagcacgagcctctgggaaagtggatcccacctacggtctggagagcagctgcattgcaggcacagggcccgatgagccagagaagcttgaaggagctgaagaggaaaaaatggaagccgaccctgatggtcagcagcctgaaaaggcagaaaataaagtggaaaatgaaacggatgaaggtgataaagcacaagatggagaaaatgaaaaaaatagtgaaaaggaacaggatagtgaagtgagtgaggataccaaatcagaagaaaaggagactgaagagaacaaagaactcactgatacatgtaaagaaagagaaagtgatactgggaagaagaaagtagaacatgaaatttccgaaggaaatgttgccacagccgcagcagctgctcttgcctcagcggctaccaaagccaagcacctggctgcagtggaagaaagaaagatcaagtccctggtagctctcttggttgagacacaaatgaagaaactagagatcaaacttcgacattttgaagagctggaaactatcatggacagagagaaagaagctctagaacaacagaggcagcagttgcttactgaacgccaaaacttccacatggaacagctgaagtatgctgaattacgagcacgacagcaaatggaacagcagcagcatggccagaaccctcaacaggcacaccagcactcaggaggacctggcctggccccacttggagcagcagggcaccctggcatgatgcctcatcaacagccccctccctaccctctgatgcaccaccagatgccaccacctcatccaccccagccaggtcagataccaggcccaggttccatgatgcccgggcagcacatgccaggccgcatgattcccactgttgcagccaacatccacccctctgggagtggccctacccctcctggcatgccaccaatgccaggaaacatcttaggaccccgggtacccctgacagcacctaacggcatgtatccccctccaccacagcagcagccaccgccaccaccacctgcagatggggtccctccgcctcctgctcctggcccgccagcctcagctgctccttagcctggaagatgcagggaacctccacgcccaccaccatgagctggagtggggatgacaagacttgtgttcctcaactttcttgggtttctttcaggatttttcttctcacagctccaagcacgtgtcccgtgcctccccactcctcttaccacccctctctctgacactttttgtgttgggtcctcagccaacactcaaggggaaacctgtagtgacagtgtgccctggtcatccttaaaataacctgcatctcccctgtcctggtgtgggagtaagctgacagtttctctgcaggtcctgtcaactttagcatgctatgtctttaccatttttgctctcttgcagttttttgctttgtcttatgcttctatggataatgctatataatcattatctttttatctttctgttattattgttttaaaggagagcatcctaagttaataggaaccaaaaaataatgatgggcagaagggggggaatagccacaggggacaaaccttaaggcattataagtgaccttatttctgcttttctgagctaagaatggtgctgatggtaaagtttgagacttttgccacacacaaatttgtgaaaattaaacgagatgtggaaggagaacctcagtgattttattccctagtgaggcctctgagggcctccacactgcctggcagaacataccactgaactagtatgtgctagaggagggcacaaacatccgctccttccctaggcctgctggctctggttttctatgcagatgattcattggattgggggtgagtgttttgtttttctgggggcagtgtgagctttgagggttggaatattgggaggcattccttagtttcctcaactagcctggaaagttaggagtctagggtaattacccccaatgagtctagcctactattcactgctttgtgtgcatttttttctccctctttaaaaaaccctttaaaagaaaaaaaaaagtagatagtgctaaatattttagctcatgaaacttggttaggatggctgggggtacaagtccccaaactacctcttgttacagtagccagggagtggaatttcgtcaaccggtacttttaaggttaggatgggacgggaaaagtgaagcaggatattagctccttataccttctcccttccatttctgagatctcacattccatctatcacagggttttcaaagagatgctgagggtaacaaggaactcacttggcagtcagagcatcatgctttgaggtttggggtgctcaggctgggagggtagaatgccattccagaggacaagccacaaaaatgccttaatttgagctcgtatttacccctgctgataagtgacttgagagttcccggttttttcctcttgtccttccctcccttctgtccttccatgtgtggggaaagggtgtttttggtagagcttggtttccaaagcgcctggctttctcacttcacattctcaagtggcagtttcattatttagaatgcaaggtggacatcttttggatatctttttctatatattttctaaagctttacatatgagagggtatagggaggtgtttataaaacacttgagaacttttttccttaatatcagaaagcaaaaaaataaaaccacaattgagatttgcctttcaaaccctcaggtttgcctctaaccaggtgtccctggtcaccatcagagtactggaatacgggaaccgaggagaccttggtccttttgtttttgttctggactcttgggagtggaaatgagaatgagtttattcctactggagcttagttccaatgcatttggctccagaaagaccccagtgccttttgacaatggccagggttttacctacttcctgccagtctttcccaaaggaaactcattccaaatacttcttttttcccctggagtccgagaaggaaaatggaattctggttcatactgtggtcccttgtaacctcaggtctttaatgtgatcactttcaaatttaaaagatccaggtggaaatatttttactatagtaataattctacaaaatacctgaattcttaacactgttatatttcagtataagtggtggctttttcttttcatgtctttgatctggttttattcctgtaattcagccacctgattttgtgaggggggggaataatatgtggtttttgtacaaacatgtttctcagtgtgttgttattttggaaaaaatgaggggagggagtttggcaagaatggagaaaatgaatgaagaaggcctaatctctctctttttcagtgaataaatggaacaccatttctggattctagtcccattctctgcattcatacaccagtttcttcatatatcctatgaagaacctaaacatttggccccacctggtcttggtttgatcagcagttaaaattctgtgactcgggcttccttcccgactgcccaccttcatgatgtgtaaggaacatacattttgagggtacctcacccactgttcatttgcatggtcaaagtgaaaatgagtggaagttctccaaaaatgatggccaacatcctggcacctccaggtgtgagaaatagctttgcttggtgaatgggataatgtttgtcaggatgcagtttagacagtcccaagttggaggcaggccttgagggcagaagattctgtgaaccttgggggacagcttttgggtactcacagatataaaccctgtgcagaaaaaaagaagtgattgttttcaggatgcttataaatcgagtgaagcaaaagaagaggattctgtgtctgccatgagatgaacgccctgctcttcacgaaggtgtgcctctaataaagagagccaaagccagctgggtctcaccagattcctatactttctcaaggatgttgggggaggttaatcctttatcgaaactaaagactggtttat

SEQ ID NO: 134891 - protein, 1214 aa, Artificial Sequence
  derived and/or modified sequence
MAVRKKDGGPNVKYYEAADTVTQFDNVRLWLGKNYKKYIQAEPPTNKSLSSLVVQLLQFQEEVFGKHVSNAPLTKLPIKCFLDFKAGGSLCHILAAAYKFKSDQGWRRYDFQNPSRMDRNVEMFMTIEKSLVQNNCLSRPNIFLCPEIEPKLLGKLKDIIKRHQGTVTEDKNNASHVVYPVPGNLEEEEWVRPVMKRDKQVLLHWGYYPDSYDTWIPASEIEASVEDAPTPEKPRKVHAKWILDTDTFNEWMNEEDYEVNDDKNPVSRRKKISAKTLTDEVNSPDSDRRDKKGGNYKKRKRSPSPSPTPEAKKKNAKKGPSTPYTKSKRGHREEEQEDLTKDMDEPSPVPNVEEVTLPKTVNTKKDSESAPVKGGTMTDLDEQEDESMETTGKDEDENSTGNKGEQTKNPDLHEDNVTEQTHHIIIPSYAAWFDYNSVHAIERRALPEFFNGKNKSKTPEIYLAYRNFMIDTYRLNPQEYLTSTACRRNLAGDVCAIMRVHAFLEQWGLINYQVDAESRPTPMGPPPTSHFHVLADTPSGLVPLQPKTPQQTSASQQMLNFPDKGKEKPTDMQNFGLRTDMYTKKNVPSKSKAAASATREWTEQETLLLLEALEMYKDDWNKVSEHVGSRTQDECILHFLRLPIEDPYLEDSEASLGPLAYQPIPFSQSGNPVMSTVAFLASVVDPRVASAAAKSALEEFSKMKEEVPTALVEAHVRKVEEAAKVTGKADPAFGLESSGIAGTTSDEPERIEESGNDEARVEGQATDEKKEPKEPREGGGAIEEEAKEKTSEAPKKDEEKGKEGDSEKESEKSDGDPIVDPEKEKEPKEGQEEVLKEVVESEGERKTKVERDIGEGNLSTAAAAALAAAAVKAKHLAAVEERKIKSLVALLVETQMKKLEIKLRHFEELETIMDREREALEYQRQQLLADRQAFHMEQLKYAEMRARQQHFQQMHQQQQQPPPALPPGSQPIPPTGAAGPPAVHGLAVAPASVVPAPAGSGAPPGSLGPSEQIGQAGSTAGPQQQQPAGAPQPGAVPPGVPPPGPHGPSPFPNQQTPPSMMPGAVPGSGHPGVAGNAPLGLPFGMPPPPPPPAPSIIPFGSLADSISINLPAPPNLHGHHHHLPFAPGTLPPPNLPVSMANPLHPNLPATTTMPSSLPLGPGLGSAAAQSPAIVAAVQGNLLPSASPLPDPGTPLPPDPTAPSPGTVTPVPPPQ

SEQ ID NO: 134892 - DNA, 5588 bp, Artificial Sequence
  derived and/or modified sequence
gcggccgcggcggcgggaggcggcgggaggcgggcggaggaggaggcggaggaggcgggagctgagctgagtggggcgggcggcggcggggcccgagccggagaagatggcggtgcggaagaaggacggcggccccaacgtgaagtactacgaggccgcggacaccgtgacccagttcgacaacgtgcggctgtggctcggcaagaactacaagaagtatatacaagctgaaccacccaccaacaagtccctgtctagcctggttgtacagttgctacaatttcaggaagaagtttttggcaaacatgtcagcaatgcaccgctcactaaactgccgatcaaatgtttcctagatttcaaagcgggaggctccttgtgccacattcttgcagctgcctacaaattcaagagtgaccagggatggcggcgttacgatttccagaatccatcacgcatggaccgcaatgtggaaatgtttatgaccattgagaagtccttggtgcagaataattgcctgtctcgacctaacatttttctgtgcccagaaattgagcccaaactactagggaaattaaaggacattatcaagagacaccagggaacagtcactgaggataagaacaatgcctcccatgttgtgtatcctgtcccggggaatctagaagaagaggaatgggtacgaccagtcatgaagagggataagcaggttcttctgcactggggctactatcctgacagttacgacacgtggatcccagcgagtgaaattgaggcatctgtggaagatgctccaactcctgagaaacctaggaaggttcatgcaaagtggatcctggacaccgacaccttcaatgaatggatgaatgaggaagactatgaagtaaatgatgacaaaaaccctgtctcccgccgaaagaagatttcagccaagacactgacagatgaggtgaacagcccagattcagatcgacgggacaagaaggggggaaactataagaagaggaagcgctccccctctccttcaccaaccccagaagcaaagaagaaaaatgctaagaaaggtccctcaacaccttacactaagtcaaagcgtggccacagagaagaggagcaagaagacctgacaaaggacatggacgagccctcaccagtccccaatgtagaagaggtgacacttcccaaaacagtcaacacaaagaaagactcagagtcggccccagtcaaaggcggcaccatgaccgacctggatgaacaggaagatgaaagcatggagacgacgggcaaggatgaggatgagaacagtacggggaacaagggagagcagaccaagaatccagacctgcatgaggacaatgtgactgaacagacccaccacatcatcattcccagctacgctgcctggtttgactacaatagtgttcatgccattgagcggagggctctccccgagttcttcaacggcaagaacaagtccaagactccagagatctacctggcctatcgaaactttatgattgacacttaccgactgaacccccaagagtatcttacctctaccgcctgccgccgaaacctagcgggtgatgtctgtgccatcatgagggtccatgccttcctagaacagtggggtcttattaactaccaggtggatgctgagagtcgaccaaccccaatggggcctccgcctacctctcacttccatgtcttggctgacacaccatcagggctggtgcctctgcagcccaagacacctcagcagacctctgcttcccaacaaatgctcaactttcctgacaaaggcaaagagaaaccaacagacatgcaaaactttgggctgcgcacagacatgtacacaaaaaagaatgttccctccaagagcaaggctgcagccagtgccactcgtgagtggacagaacaggaaaccctgcttctcctggaggcactggaaatgtacaaagatgactggaacaaagtgtccgagcatgtgggaagccgcacacaggacgagtgcatcttgcattttcttcgtcttcccattgaagacccatacctggaggactcagaggcctccctaggccccctggcctaccaacccatccccttcagtcagtcgggcaaccctgttatgagcactgttgccttcctggcctctgtcgtcgatccccgagtcgcctctgctgctgcaaagtcagccctagaggagttctccaaaatgaaggaagaggtacccacggccttggtggaggcccatgttcgaaaagtggaagaagcagccaaagtaacaggcaaggcggaccctgccttcggtctggaaagcagtggcattgcaggaaccacctctgatgagcctgagcggattgaggagagcgggaatgacgaggctcgggtggaaggccaggccacagatgagaagaaggagcccaaggaaccccgagaaggagggggtgctatagaggaggaagcaaaagagaaaaccagcgaggctcccaagaaggatgaggagaaagggaaagaaggcgacagtgagaaggagtccgagaagagtgatggagacccaatagtcgatcctgagaaggagaaggagccaaaggaagggcaggaggaagtgctgaaggaagtggtggagtctgagggggaaaggaagacaaaggtggagcgggacattggcgagggcaacctctccaccgctgctgccgccgccctggccgccgccgcagtgaaagctaagcacttggctgctgttgaggaaaggaagatcaaatctttggtggccctgctggtggagacccagatgaaaaagttggagatcaaacttcggcactttgaggagctggagactatcatggaccgggagcgagaagcactggagtatcagaggcagcagctcctggccgacagacaagccttccacatggagcagctgaagtatgcggagatgagggctcggcagcagcacttccaacagatgcaccaacagcagcagcagccaccaccagccctgcccccaggctcccagcctatccccccaacaggggctgctgggccacccgcagtccatggcttggctgtggctccagcctctgtagtccctgctcctgctggcagtggggcccctccaggaagtttgggcccttctgaacagattgggcaggcagggtcaactgcagggccacagcagcagcaaccagctggagccccccagcctggggcagtcccaccaggggttcccccccctggaccccatggcccctcaccgttccccaaccaacaaactcctccctcaatgatgccaggggcagtgccaggcagcgggcacccaggcgtggcgggtaatgctcctttgggtttgccttttggcatgccgcctcctcctcctcctcctgctccatccatcatcccatttggtagtctagctgactccatcagtattaacctccccgctcctcctaacctgcatgggcatcaccaccatctcccgttcgccccgggcactctccccccacctaacctgcctgtgtccatggcgaaccctctacatcctaacctgccggcgaccaccaccatgccatcttccttgcctctcgggccggggctcggatccgccgcagcccaaagccctgccattgtggcagctgttcagggcaacctcctgcccagtgccagcccactgccagacccaggcacccccctgcctccagaccccacagccccgagcccaggcacggtcacccctgtgccacctccacagtgaggagccagccagacatctctccccctcaccccctgtggacatcacggttccaggaacagcccttcccccaccactgggaccctccccagcctggagagttcatcactacgtaaggaaagctccttccgcccctccaaagccctcaccatgcctaacagaggcatgcatttttatatcagattattcaaggacttctgtttaaaagatgtttataatgtctgggagagaggataggatgggaatgctgccctaaaggaagggctggtgaaaggtgtttatacaaggttctattaaccacttctaagggtacacctccctccaaactactgcattttctatggattaaaaaaaaaaaaaaaaagtagattttaaaaagccacattggagctcccttctacccactaaaaaataaccaatttttacattttttgagggggagtgagttttaggaaaggggaattaagattccagggagagctctggggatagaacagggcgcagattccatctctccccaagcccctttttagtgactaagtcaaggccccaactcccctcccccaccctacgctgagcttattcgagttcattcgtactaataatccctcctgcggcttcctcattgttgctgttttaggccaccccagctcagccaatgattcctttccctctgaatgtcagttttgtttttaaaagtcacttgcttagttgatgtcagcgtatgtgtatttggtggggaaaacctaatttcggggatttctgtggtaggtaataggagaagaaagggcactgggggctgttctccttccttccctgggctgtatccatggactcctggaaggcacagagaagggagctataagaggatgtgaagttttaaaacctgaaattgttttttaaagcacttaagcacctccatattatgacttggtgggtcaccccttagcttcctccctctcccaccaagactatgagaacttcagctgatagctgggggctccccagatgaggatgcagggatttgggagcagtggaagagggtgcccaaccttgggttggaccaacccttggctcgcagctcaactctgcttcccgcattcctgctccacgtgtcccagcttctcccctgtgacgggaaggcaggtgtgactccaggctctgcactggttcttcttggttcctcccaccaggccctttgttcctcatgtccccatgtttctctccctctgcgtcttagcacctttcttctgttcaaagttttctgtaaattttctctttttttctttctttcttttttttttttttataaattaatttgctttcagttccatcttgtgggtgcattctgtgttcttacctgtggctgtcaggcagggggattgtgatgggagcagctttcctggagtccttcacagcggcgtttacctgggccgaaagacactctgcaagccacacggcctacagacactgcgcctccccacaaaacacgaacggcagcacaactgtcgagactatgtgctggtataggagcagaggctctcacctgccctaaaagctgtttaagacttggaaggacattcccacaacatggaattttgtatctctgtcccttcagaagtagtggtttcactccttcccttattagagaggaggcaagccccttacctacttttgttataattggcccttcaccctgctgaggtgacggacaggcttaggcagtgctaataatggcctggctttagctccaataaacactccacaggcttccccacaaaaggccttattgggagcttgggagggcgggggccagatttaaggagctggaagggtagga

SEQ ID NO: 134893 - DNA, 3645 bp, Artificial Sequence
  derived and/or modified sequence
atggccgtgagaaagaaggacggcggccccaacgtgaagtactacgaggccgccgacaccgtgacccagttcgacaacgtgagactgtggctgggcaagaactacaagaagtacatccaggccgagccccccaccaacaagagcctgagcagcctggtggtgcagctgctgcagttccaggaggaggtgttcggcaagcacgtgagcaacgcccccctgaccaagctgcccatcaagtgcttcctggacttcaaggccggcggcagcctgtgccacatcctggccgccgcctacaagttcaagagcgaccagggctggagaagatacgacttccagaaccccagcagaatggacagaaacgtggagatgttcatgaccatcgagaagagcctggtgcagaacaactgcctgagcagacccaacatcttcctgtgccccgagatcgagcccaagctgctgggcaagctgaaggacatcatcaagagacaccagggcaccgtgaccgaggacaagaacaacgccagccacgtggtgtaccccgtgcccggcaacctggaggaggaggagtgggtgagacccgtgatgaagagagacaagcaggtgctgctgcactggggctactaccccgacagctacgacacctggatccccgccagcgagatcgaggccagcgtggaggacgcccccacccccgagaagcccagaaaggtgcacgccaagtggatcctggacaccgacaccttcaacgagtggatgaacgaggaggactacgaggtgaacgacgacaagaaccccgtgagcagaagaaagaagatcagcgccaagaccctgaccgacgaggtgaacagccccgacagcgacagaagagacaagaagggcggcaactacaagaagagaaagagaagccccagccccagccccacccccgaggccaagaagaagaacgccaagaagggccccagcaccccctacaccaagagcaagagaggccacagagaggaggagcaggaggacctgaccaaggacatggacgagcccagccccgtgcccaacgtggaggaggtgaccctgcccaagaccgtgaacaccaagaaggacagcgagagcgcccccgtgaagggcggcaccatgaccgacctggacgagcaggaggacgagagcatggagaccaccggcaaggacgaggacgagaacagcaccggcaacaagggcgagcagaccaagaaccccgacctgcacgaggacaacgtgaccgagcagacccaccacatcatcatccccagctacgccgcctggttcgactacaacagcgtgcacgccatcgagagaagagccctgcccgagttcttcaacggcaagaacaagagcaagacccccgagatctacctggcctacagaaacttcatgatcgacacctacagactgaacccccaggagtacctgaccagcaccgcctgcagaagaaacctggccggcgacgtgtgcgccatcatgagagtgcacgccttcctggagcagtggggcctgatcaactaccaggtggacgccgagagcagacccacccccatgggccccccccccaccagccacttccacgtgctggccgacacccccagcggcctggtgcccctgcagcccaagaccccccagcagaccagcgccagccagcagatgctgaacttccccgacaagggcaaggagaagcccaccgacatgcagaacttcggcctgagaaccgacatgtacaccaagaagaacgtgcccagcaagagcaaggccgccgccagcgccaccagagagtggaccgagcaggagaccctgctgctgctggaggccctggagatgtacaaggacgactggaacaaggtgagcgagcacgtgggcagcagaacccaggacgagtgcatcctgcacttcctgagactgcccatcgaggacccctacctggaggacagcgaggccagcctgggccccctggcctaccagcccatccccttcagccagagcggcaaccccgtgatgagcaccgtggccttcctggccagcgtggtggaccccagagtggccagcgccgccgccaagagcgccctggaggagttcagcaagatgaaggaggaggtgcccaccgccctggtggaggcccacgtgagaaaggtggaggaggccgccaaggtgaccggcaaggccgaccccgccttcggcctggagagcagcggcatcgccggcaccaccagcgacgagcccgagagaatcgaggagagcggcaacgacgaggccagagtggagggccaggccaccgacgagaagaaggagcccaaggagcccagagagggcggcggcgccatcgaggaggaggccaaggagaagaccagcgaggcccccaagaaggacgaggagaagggcaaggagggcgacagcgagaaggagagcgagaagagcgacggcgaccccatcgtggaccccgagaaggagaaggagcccaaggagggccaggaggaggtgctgaaggaggtggtggagagcgagggcgagagaaagaccaaggtggagagagacatcggcgagggcaacctgagcaccgccgccgccgccgccctggccgccgccgccgtgaaggccaagcacctggccgccgtggaggagagaaagatcaagagcctggtggccctgctggtggagacccagatgaagaagctggagatcaagctgagacacttcgaggagctggagaccatcatggacagagagagagaggccctggagtaccagagacagcagctgctggccgacagacaggccttccacatggagcagctgaagtacgccgagatgagagccagacagcagcacttccagcagatgcaccagcagcagcagcagcccccccccgccctgccccccggcagccagcccatcccccccaccggcgccgccggcccccccgccgtgcacggcctggccgtggcccccgccagcgtggtgcccgcccccgccggcagcggcgccccccccggcagcctgggccccagcgagcagatcggccaggccggcagcaccgccggcccccagcagcagcagcccgccggcgccccccagcccggcgccgtgccccccggcgtgcccccccccggcccccacggccccagccccttccccaaccagcagaccccccccagcatgatgcccggcgccgtgcccggcagcggccaccccggcgtggccggcaacgcccccctgggcctgcccttcggcatgcccccccccccccccccccccgcccccagcatcatccccttcggcagcctggccgacagcatcagcatcaacctgcccgccccccccaacctgcacggccaccaccaccacctgcccttcgcccccggcaccctgcccccccccaacctgcccgtgagcatggccaaccccctgcaccccaacctgcccgccaccaccaccatgcccagcagcctgcccctgggccccggcctgggcagcgccgccgcccagagccccgccatcgtggccgccgtgcagggcaacctgctgcccagcgccagccccctgcccgaccccggcacccccctgccccccgaccccaccgcccccagccccggcaccgtgacccccgtgccccccccccagtag

SEQ ID NO: 134894 - DNA, 3645 bp, Artificial Sequence
  derived and/or modified sequence
atggccgttcgcaaaaaagacggcgggccgaacgtaaaatattatgaagccgccgacaccgtgacacagttcgataatgtcaggctgtggttagggaagaactataagaaatatatccaagcagagccccccacaaacaagtctttgtcctccctagttgtacagctgctccaattccaggaggaggtattcggtaagcatgtgtccaacgcacctctgacaaagctccccatcaagtgcttcctggattttaaggcaggcggatctctgtgccacatcctggccgccgcttacaagtttaagtctgatcagggatggcgcaggtatgatttccagaacccatcacggatggaccggaacgtcgaaatgttcatgaccatagagaaatcgttggttcagaataattgcctctcacgccccaatatttttctctgccccgagatcgaaccaaagctgctcggaaagctcaaggacatcatcaagaggcaccagggcacagtcacagaagataagaacaatgcgtcacatgttgtctaccccgttccaggcaatctggaagaagaggaatgggtgcgccccgtaatgaagcgagacaaacaggtgctcctgcactggggttactatccagacagctacgacacttggatacccgcaagcgaaatcgaagccagtgtggaagatgcacctaccccggagaagccccggaaggtccatgccaaatggattctcgacacagatacctttaacgagtggatgaacgaggaggactacgaagtgaacgacgataaaaatcccgtctcccgccgtaaaaagatttcagctaagactctcacagatgaagtcaactccccagacagtgacagaagagataagaagggagggaactacaagaagcgaaagcggtcccccagcccgagtcccacaccggaagccaagaagaaaaacgctaaaaaagggccaagcactccgtacacaaagtccaagaggggccacagagaagaagaacaggaagacctcacaaaggatatggatgaaccttcacccgtgcctaacgttgaagaggtaactctgccgaaaaccgtgaatactaaaaaggattctgagtccgcacccgtgaaaggaggcactatgaccgaccttgacgaacaggaggacgagtctatggaaactacaggcaaagacgaagatgagaatagcacggggaacaaaggcgagcagaccaagaaccctgaccttcacgaggataacgtgaccgagcagacccaccacatcatcattccttcttacgctgcctggttcgactataattctgtgcacgccatcgagaggagggctctccctgagtttttcaacgggaagaataaatccaagacccccgagatctatctagcctacagaaacttcatgattgatacttaccggcttaatcctcaggagtatctcacatcgacagcttgccgcagaaatctcgcaggggatgtgtgtgccattatgcgcgtacatgccttcctcgagcagtggggccttataaattatcaggtcgatgctgaatcccgccctactccaatgggtcccccaccgaccagccacttccacgtcctcgccgacaccccgagtggcctggttcccctgcagccgaagacgccccagcagactagcgctagccagcaaatgctgaactttcctgataaagggaaagagaaaccaactgatatgcagaattttggcctccggacagacatgtatactaagaaaaacgttccctccaagtccaaggccgcagcatccgccacaagggagtggactgaacaggaaaccttgctcctgttggaagcactggagatgtataaggacgactggaacaaggtgagcgaacacgtgggatctcgcacacaggacgagtgcatcctccatttcctcagattgcctatcgaggacccatacctggaggactcagaagccagcttaggacctttggcataccagcccatccccttctcacaatctggtaacccggtcatgagcacagtcgccttcctcgccagtgttgtggatccccgggtggcgtccgcagccgcgaagtcagcgctggaagaatttagcaagatgaaggaagaagtccccaccgccctggtcgaggcgcatgtaaggaaagtcgaagaggccgccaaggtaactggcaaagccgacccagctttcggactcgagtcctccggaatcgcgggcactacgtctgatgaacccgagcgaatagaggagagcggaaacgatgaagcacgggtagagggacaggctaccgacgaaaaaaaggaacctaaagaaccgcgggagggcggcggcgccatcgaggaagaagccaaggagaagacctctgaggctccgaagaaggatgaagaaaagggtaaggaaggggattctgagaaggagtctgagaagtctgacggcgaccccatagtggaccccgagaaggagaaagagcccaaagaggggcaggaggaggttttgaaagaggtagtcgagtctgagggcgagcgtaaaactaaagtggagagggatatcggcgaaggcaatctctcaaccgcagccgcagccgctctagccgccgctgctgtcaaggctaagcatcttgcggctgtcgaggagaggaagattaaatccctcgtagccctcctagttgagactcagatgaagaagctcgagattaagcttcggcattttgaagaactcgaaacaattatggatcgcgaacgggaagccttagaatatcagagacaacaactcctggctgataggcaggcgttccatatggagcagctcaagtacgctgaaatgcgagctcgccagcaacactttcagcagatgcaccagcaacagcaacagcccccccccgccctgccaccgggctctcaacccatccccccgacaggagccgcgggcccgccagctgtgcacggcctcgccgtggccccggcctccgtggtgcccgcccctgctggaagtggcgccccgccagggagcctggggccctccgaacagataggtcaggccggatcaactgctggcccccaacagcagcagcccgcgggggcaccccagcccggcgccgtgccacctggggtacctccgcccgggccacatggaccctccccatttcccaatcaacagactcccccaagcatgatgcctggcgctgtacccgggagcggacaccctggagtggcggggaatgctcccctgggactgccgttcggaatgccaccaccacctccgcccccggcaccttctataatcccctttgggagcctcgctgattcaatcagcataaacctgccagcacctccgaacctccacggccaccatcatcacctgccatttgcaccaggtaccctgccgccccctaacctcccagttagtatggccaatcccttacacccgaacctgcctgccacaacaacgatgccctcctcattaccgctcgggcctggattgggcagcgctgcagcccagtctccagctattgtagcagctgtacagggcaacctgctgccgtcagcatcacccctccccgacccgggaactcccttgccccctgaccccaccgccccttctcccgggaccgttacgcccgtgcccccgccccagtag

SEQ ID NO: 134895 - DNA, 3645 bp, Artificial Sequence
  derived and/or modified sequence
atggctgtgaggaagaaggatggcggccccaacgtgaagtactatgaagctgctgacacagtgacccagtttgacaacgtgcggctgtggctgggcaagaactacaagaagtacatccaggccgagccccccaccaacaagagcctgagcagcctggtggtgcagctgctgcagttccaggaggaggtgtttgggaagcacgtgtccaatgcccccctgaccaagctgcccatcaagtgcttcctggacttcaaggccggcggcagcctgtgccacatcctggccgccgcctacaagttcaagagtgaccagggctggaggagatatgacttccagaaccccagcaggatggacagaaatgtggagatgttcatgaccatcgagaagagcctggtgcagaacaactgcctgagccggcccaacatcttcctgtgcccagaaattgagcccaagctgctgggcaagctgaaggacatcatcaagaggcaccagggcaccgtgacagaggacaagaacaatgccagccacgtggtgtaccctgtgcccggcaacctggaggaggaggagtgggtgcggcctgtgatgaagagggacaagcaggtgctgctgcactggggctactacccagacagctatgacacctggatcccagccagcgagattgaggcctctgtggaggatgcccccaccccagagaagcccaggaaggtgcacgccaagtggatcctggacacagacaccttcaatgagtggatgaatgaagaagattatgaggtgaatgatgacaagaaccctgtgtccaggaggaagaagatcagcgccaagaccctgacagatgaggtgaacagcccagacagcgaccggcgggacaagaagggcggcaactacaagaagaggaagaggagccccagccccagccccaccccagaggccaagaagaagaatgccaagaagggccccagcaccccctacaccaagagcaagaggggccaccgggaggaggagcaggaggacctgaccaaggacatggatgagcccagccctgtgcccaacgtggaggaggtgaccctgcccaagacagtgaacaccaagaaggacagcgagagcgcccctgtgaagggcggcaccatgacagacctggatgagcaggaggatgagagcatggagaccaccgggaaggatgaagatgagaacagcacaggcaacaagggggagcagaccaagaacccagacctgcacgaggacaacgtgacagagcagacccaccacatcatcatccccagctatgctgcctggtttgactacaacagcgtgcacgccattgaaagaagagccctgcctgagttcttcaacgggaagaacaagagcaagaccccagagatctacctggcctacagaaacttcatgattgacacctaccgcctgaacccccaggagtacctgaccagcacagcctgcagaagaaacctggccggagatgtgtgtgccatcatgagggtgcacgccttcctggagcagtggggcctcatcaactaccaggtggatgctgagagccggcccacccccatgggccccccacccaccagccacttccacgtgctggccgacaccccatctggcctggtgcccctgcagcccaagaccccccagcagaccagcgccagccagcagatgctgaacttcccagacaagggcaaggagaagcccacagacatgcagaactttggcctgaggacagacatgtacaccaagaagaatgtgcccagcaagagcaaggccgccgccagcgccacccgggagtggacagagcaggagaccctgctgctgctggaggccctggagatgtacaaggatgactggaacaaggtgtctgagcacgtgggcagcaggacccaggatgagtgcatcctgcacttcctgcggctgcccatcgaggacccctacctggaggacagcgaggccagcctgggccccctggcctaccagcccatccccttcagccagagcggcaaccctgtgatgagcacagtggccttcctggcctctgtggtggacccccgggtggccagcgctgctgccaagagcgccctggaggagttcagcaagatgaaggaggaggtgcccacagccctggtggaggcccacgtgaggaaggtggaggaggccgccaaggtgacaggcaaggctgaccctgccttcggcctggagagcagcggcattgctggcaccaccagtgatgagcctgagagaattgaggagagcggaaatgatgaggcccgggtggagggccaggccacagatgagaagaaggagcccaaggagccccgggagggcggcggggccatcgaggaggaggccaaggagaagaccagcgaggcccccaagaaggatgaggagaagggcaaggagggggacagcgagaaggagagcgagaagagtgatggagaccccatcgtggaccctgagaaggagaaggagcccaaggagggccaggaggaggtgctgaaggaggtggtggagagcgagggggagaggaagaccaaggtggagcgggacattggagagggcaacctgagcacagctgctgctgctgccctggccgctgctgctgtgaaggccaagcacctggccgctgtggaggagaggaagatcaagagcctggtggccctgctggtggagacccagatgaagaagctggagatcaagctgcggcactttgaggagctggagaccatcatggaccgggagcgggaggccctggagtaccagaggcagcagctgctggccgaccggcaggccttccacatggagcagctgaagtatgcagagatgagggcccggcagcagcacttccagcagatgcaccagcagcagcagcagcccccaccagccctgcccccaggcagccagcccatccccccaactggagctgctggccccccagctgtgcacggcctggccgtggccccagcctctgtggtgcctgccccagctggcagcggggcccctcctggcagcctgggccccagcgagcagatcggccaggccggcagcacagctggcccccagcagcagcagcctgctggggccccccagcctggagctgtgcccccaggagtgcccccacctggcccccacggccccagccccttccccaaccagcagaccccacccagcatgatgcctggagctgtgcccggcagcggccaccctggggtggccggaaatgcccccctgggcctgcccttcggcatgcctcctcctcctcctcctccagcccccagcatcatccccttcggcagcctggccgacagcatcagcatcaacctgcctgccccacccaacctgcacggccaccaccaccacctgccctttgcccctggcaccctgcccccacccaacctgcctgtgtccatggccaaccccctgcaccccaacctgcctgccaccaccaccatgcccagcagcctgcccctgggccctggcctgggcagcgctgctgcccagagccctgccatcgtggccgctgtgcagggcaacctgctgcccagcgccagccccctgcctgaccccggcacccccctgcccccagaccccacagcccccagccctggcaccgtgacccctgtgcccccaccccagtag

SEQ ID NO: 134896 - DNA, 3645 bp, Artificial Sequence
  derived and/or modified sequence
atggccgtgcggaagaaggacggcggccccaacgtgaagtactacgaggccgccgacacagttacacagtttgacaacgtgcggctctggttgggaaagaactataagaagtacattcaggccgagccccccacaaacaaatctctgtcatccttggttgttcagctcctgcaattccaggaggaggtttttgggaagcacgtgtcaaatgcgccgttgaccaagctgcctattaagtgttttctggactttaaggctgggggatctctttgtcacatccttgccgccgcatataagttcaagtctgaccagggctggcggaggtacgacttccagaaccccagcaggatggatcgcaacgttgaaatgtttatgacaatcgagaaatccctggtacaaaataattgcctgagcaggccaaacatcttcctgtgtcctgaaatcgagcctaagctcctaggcaaattgaaggacataattaaacgccaccaggggactgtcacggaagataagaacaacgcaagccatgtggtgtacccggtgcctggcaacctggaggaggaggagtgggttcgccccgtgatgaagcgcgacaagcaggttctgctgcactggggctattaccccgattcgtacgatacatggattcctgccagcgaaattgaggcttccgtggaggatgcccctacaccggagaagccaaggaaggtccatgctaagtggatcctggacaccgatacattcaatgagtggatgaacgaagaagattacgaagttaatgatgataaaaaccctgtaagtcggcgaaaaaaaatttccgccaaaaccttaactgacgaggtgaattctccagattcagacaggagggataagaaaggtggtaactataaaaagcgcaaaaggagcccttctccttcccctacaccagaagccaaaaagaagaatgcaaagaaaggaccttccactccttataccaagtctaaacgaggccacagggaagaagagcaggaggatttgaccaaagacatggacgagccatcccccgtacccaacgtcgaagaggtgactcttccgaagactgtgaatacaaagaaggactcagaaagcgcccctgtgaagggagggaccatgacagatcttgatgaacaggaggatgaatccatggagacaacagggaaagacgaggatgagaactctacagggaataaaggagaacagaccaagaatcccgatctgcacgaagataatgttactgagcagactcatcatatcatcatcccaagctacgctgcatggttcgactataatagcgttcacgccatagagcgcagagcgcttcccgagtttttcaacggaaaaaataaatctaagaccccggagatctatctggcctacagaaacttcatgatcgatacatatcgtctaaatccgcaagagtacctcacatctaccgcttgcagacggaacctggccggggatgtttgcgcgataatgcgggtgcacgccttccttgagcagtggggcctcattaattaccaagtggatgcagagtctcgccccaccccaatggggcctccgcctacatctcacttccacgtgctggcagacactccgagcggtttggtgcctctccagccaaagaccccccagcaaacttctgcatcccagcagatgttgaacttcccagacaaggggaaggaaaagccgaccgacatgcagaatttcgggcttcggaccgacatgtacaccaaaaagaacgtgcctagcaagtctaaggcagcagcatccgccacccgagagtggactgaacaggagacactgctgctgctggaagctctcgaaatgtacaaggatgattggaataaggtgtccgagcacgtcggaagtcgaactcaggatgaatgtatactacattttctccgactgccaatcgaggacccctacctcgaagattcagaagcctcgttaggtccactcgcataccagcccatacctttttcccagtcaggtaaccctgtgatgtcaacagtggctttccttgcctccgtcgtggatccacgggtggccagcgcagcagccaagtcagcactagaggagttttccaagatgaaagaggaggtcccaaccgctctggtggaagcccacgtgcggaaagtcgaggaggccgctaaggtgaccggcaaggccgatcccgcctttggtctggagtcatctgggatcgcaggtacaacttccgatgaaccagagaggatcgaagaaagtggtaacgatgaggcacgggtggaggggcaagcaacagacgagaagaaggaacccaaggagcctcgtgaaggcgggggagcaatagaggaggaagccaaggagaaaacaagcgaagcacccaaaaaggatgaggagaagggtaaggaaggtgactcagagaaggaatctgaaaagtccgatggcgatccgatcgtggatcccgaaaaggagaaagaaccaaaggagggtcaggaggaggtgttgaaggaagtggttgaatccgaaggcgagcgcaaaactaaagtagagcgggatattggtgagggtaatttaagcacagctgccgctgcagccctagcagccgcagcggtaaaagcgaagcatttagccgctgtggaggaaagaaaaattaagtcactcgtagccctgctggtcgaaacacaaatgaaaaagctggaaatcaagctacggcatttcgaagagttagaaacaattatggatagggagagggaggctctggaatatcagagacagcagctgcttgctgacaggcaggcctttcacatggaacagctgaaatatgctgagatgagggcgcgccaacagcactttcagcagatgcatcaacagcagcaacagcccccccccgccctcccaccgggctcacagccaatccctccaactggcgcagccggcccgccagcggtgcacggcctggccgtagccccagcttctgtggtcccggcacccgccggctctggggcacccccaggctctctaggcccatcagagcagattggacaagcgggcagcaccgcagggccccagcagcaacagccggccggagcgccgcagccgggagctgttccccctggggtgccacctcccggaccacacgggccatcgcctttcccaaaccagcagacccctccttccatgatgcctggcgccgttccgggctccggccacccaggagtggccggaaacgctccactagggttgccttttgggatgcctcctcctccccccccgcccgccccctctataattccttttgggtccctggccgatagcatctcaatcaatcttccagcccctcctaatctgcatggccaccatcaccacctcccattcgcccctgggactctgccgccgccaaacttaccggtttcaatggctaatcccctgcatccaaatcttcccgcgacaactacaatgcccagtagtctgcccctgggccccggtctgggatccgctgcagctcagtcacccgccatcgttgctgctgtgcaaggcaacctgctgcctagtgcaagcccccttcccgatccagggacccccctacccccagatcctacggctcccagtccaggcaccgtcactcccgtgcccccacctcagtag

SEQ ID NO: 134897 - DNA, 3645 bp, Artificial Sequence
  derived and/or modified sequence
atggccgtgaggaagaaggatgggggaccgaatgttaaatactacgaagctgccgacacagtcacccagtttgacaacgtccggctctggctgggcaaaaactataagaagtatattcaggccgaacccccaactaacaaatcactatcaagcctcgtggtccagcttctgcaattccaggaagaagtgtttggcaagcacgtgtctaatgctccccttacaaagctacccatcaaatgttttctagacttcaaggccggaggctcattgtgccatatcctggccgcagcatataaattcaaatccgaccagggttggcgacggtacgatttccagaacccctcccgcatggaccggaatgtcgagatgtttatgacaatcgaaaaatcactggtgcagaacaactgtctttcacgacctaatatctttttgtgccccgaaattgagcccaaactgctgggcaagttaaaggacatcatcaagcgacaccagggcactgtgaccgaagacaagaacaacgccagccacgtggtttaccccgtgccgggaaacctcgaagaggaggaatgggtccgtccggtaatgaaaagagataagcaggtgctgctgcactggggatattaccctgacagttatgatacctggatccccgcttctgagattgaagcctccgtcgaggacgccccaacacctgagaaaccgcgtaaggtgcatgccaagtggatcctagacacagacactttcaatgaatggatgaacgaagaggactacgaagtaaacgatgataaaaaccctgtgtcacgccgtaagaagataagtgcgaaaacgcttacagacgaagtcaactctccagatagtgataggcgtgacaaaaaagggggtaattacaagaagcggaagagatcgccatctccaagtcctactcccgaggccaagaagaagaacgcgaaaaagggtccctctaccccttacaccaaaagtaagcggggacaccgcgaggaagaacaagaagaccttaccaaggatatggatgagccgtcaccagtcccgaacgtggaagaagttactctgcccaagacagtcaacaccaaaaaggactctgagtccgcccctgtgaaggggggaaccatgacagatctggacgaacaggaagacgaatccatggagactacgggcaaggacgaggatgaaaactcgacggggaataagggcgaacagaccaagaatcctgatctccacgaagataatgtgactgaacagactcaccacattataattccgtcatacgcggcttggttcgattacaattccgttcacgccattgagcggcgtgccctccccgagttctttaacgggaagaacaagtccaaaacacctgagatttatctggcgtaccggaatttcatgattgacacataccgcttgaatcctcaggagtacctgacatcgactgcgtgtcgcaggaacctggccggagacgtttgtgccatcatgagggtgcacgccttcctcgaacagtggggactgatcaactatcaagtggacgcagagtctcggcctactcctatgggccctcctcccaccagccattttcatgtactggcagacaccccctcagggctcgtccccctgcaaccaaaaaccccccagcaaacatccgcgtctcagcaaatgctcaacttccctgacaaaggaaaagagaagccaactgacatgcaaaactttggactgcgcacggacatgtatacaaagaagaacgtgcccagcaaaagtaaagcagctgcctcagctacccgggagtggactgaacaagagaccctcctcctattagaagccctcgagatgtacaaggatgactggaacaaagtctcagagcacgtggggagtcgaacccaggacgaatgcatattacactttctgcggctgcccatcgaagatccttatcttgaagattccgaggctagtctgggtccactggcttatcaaccaatccccttttcccagtccggcaaccccgtgatgagtacagtggcttttcttgcaagcgtcgtcgatcctagggtagcgagcgctgcagcaaagtccgcactggaagaattcagcaaaatgaaagaagaggtgcccacagcgttagtggaagcccatgtacgaaaggtggaagaagccgctaaagttaccggcaaggctgaccctgcttttggtttagagtcttccggcatcgccggtaccacaagcgacgagcccgaacgtattgaagaatcggggaatgacgaggcaagggtcgaagggcaggccacagacgagaagaaagaaccaaaagaacccagagagggaggcggagccattgaagaagaggctaaagaaaaaacctcggaggctccaaaaaaagatgaggaaaaaggcaaggagggggactccgaaaaggagagcgaaaaaagcgacggcgatccaatcgtggatcccgaaaaggaaaaagagcctaaagagggccaggaggaggtgctgaaggaagttgtggagagtgaaggtgagcgcaagaccaaggttgaacgggatattggagaggggaatctcagcacggccgctgccgctgctcttgccgctgcagcggtgaaggcgaaacacctggcggctgtggaggaaagaaaaataaaatctctcgtcgcccttcttgtcgaaacacaaatgaagaaattggagataaaattaaggcatttcgaggagctggagacaatcatggacagggagcgcgaagctctggagtatcagcggcagcagttgctggctgaccgtcaggccttccatatggagcagttaaaatatgccgagatgcgggcacggcagcaacattttcagcagatgcaccagcaacagcagcagcccccacccgctctgccgccaggcagccaacctataccccctactggagcggcaggaccccctgcagttcacggcctggcagtcgctcccgcaagcgtggtccccgctcctgcaggcagcggagctccaccgggatcactgggcccatctgaacaaatcggtcaggcgggttctacagctggcccacagcagcagcaacctgctggcgctcctcaacctggtgccgtaccgcctggcgttccgccacctggtccacacggcccatctccattccccaatcagcaaacacccccaagtatgatgccaggagctgtgcctggtagcggacatcctggggtggcaggcaatgcacccctggggctgccattcggcatgcctcctccccctccacctccggcacctagcattatccccttcggctctttagctgattccatctcaatcaaccttcctgcccctcctaatctacacggccaccaccaccacctccccttcgcccctggtacactcccgcctccaaacctcccagtgtccatggctaatcccctgcatcccaacttgcctgccactaccaccatgccgtcttctctccctctcggccctggactgggctccgccgcagcccaaagtccagctattgttgccgctgttcaggggaatcttcttccctcagccagccccctgccagaccctggcacccctcttccccctgaccccacagccccttccccaggtaccgtcaccccagtgcctccaccccagtag

SEQ ID NO: 134898 - DNA, 4076 bp, Artificial Sequence
  derived and/or modified sequence
gcggcgggaggcgggcggaggaggaggcggaggaggcgggagctgagctgagtggggcgggcggcggcggggcccgagccggagaagatggcggtgcggaagaaggacggcggccccaacgtgaagtactacgaggccgcggacaccgtgacccagttcgacaacgtgcggctgtggctcggcaagaactacaagaagtatatacaagctgaaccacccaccaacaagtccctgtctagcctggttgtacagttgctacaatttcaggaagaagtttttggcaaacatgtcagcaatgcaccgctcactaaactgccgatcaaatgtttcctagatttcaaagcgggaggctccttgtgccacattcttgcagctgcctacaaattcaagagtgaccagggatggcggcgttacgatttccagaatccatcacgcatggaccgcaatgtggaaatgtttatgaccattgagaagtccttggtgcagaataattgcctgtctcgacctaacatttttctgtgcccagaaattgagcccaaactactagggaaattaaaggacattatcaagagacaccagggaacagtcactgaggataagaacaatgcctcccatgttgtgtatcctgtcccggggaatctagaagaagaggaatgggtacgaccagtcatgaagagggataagcaggttcttctgcactggggctactatcctgacagttacgacacgtggatcccagcgagtgaaattgaggcatctgtggaagatgctccaactcctgagaaacctaggaaggttcatgcaaagtggatcctggacaccgacaccttcaatgaatggatgaatgaggaagactatgaagtaaatgatgacaaaaaccctgtctcccgccgaaagaagatttcagccaagacactgacagatgaggtgaacagcccagattcagatcgacgggacaagaaggggggaaactataagaagaggaagcgctccccctctccttcaccaaccccagaagcaaagaagaaaaatgctaagaaaggtccctcaacaccttacactaagtcaaagcgtggccacagagaagaggagcaagaagacctgacaaaggacatggacgagccctcaccagtccccaatgtagaagaggtgacacttcccaaaacagtcaacacaaagaaagactcagagtcggccccagtcaaaggcggcaccatgaccgacctggatgaacaggaagatgaaagcatggagacgacgggcaaggatgaggatgagaacagtacggggaacaagggagagcagaccaagaatccagacctgcatgaggacaatgtgactgaacagacccaccacatcatcattcccagctacgctgcctggtttgactacaatagtgttcatgccattgagcggagggctctccccgagttcttcaacggcaagaacaagtccaagactccagagatctacctggcctatcgaaactttatgattgacacttaccgactgaacccccaagagtatcttacctctaccgcctgccgccgaaacctagcgggtgatgtctgtgccatcatgagggtccatgccttcctagaacagtggggtcttattaactaccaggtggatgctgagagtcgaccaaccccaatggggcctccgcctacctctcacttccatgtcttggctgacacaccatcagggctggtgcctctgcagcccaagacacctcagcagacctctgcttcccaacaaatgctcaactttcctgacaaaggcaaagagaaaccaacagacatgcaaaactttgggctgcgcacagacatgtacacaaaaaagaatgttccctccaagagcaaggctgcagccagtgccactcgtgagtggacagaacaggaaaccctgcttctcctggaggcactggaaatgtacaaagatgactggaacaaagtgtccgagcatgtgggaagccgcacacaggacgagtgcatcttgcattttcttcgtcttcccattgaagacccatacctggaggactcagaggcctccctaggccccctggcctaccaacccatccccttcagtcagtcgggcaaccctgttatgagcactgttgccttcctggcctctgtcgtcgatccccgagtcgcctctgctgctgcaaagtcagccctagaggagttctccaaaatgaaggaagaggtacccacggccttggtggaggcccatgttcgaaaagtggaagaagcagccaaagtaacaggcaaggcggaccctgccttcggtctggaaagcagtggcattgcaggaaccacctctgatgagcctgagcggattgaggagagcgggaatgacgaggctcgggtggaaggccaggccacagatgagaagaaggagcccaaggaaccccgagaaggagggggtgctatagaggaggaagcaaaagagaaaaccagcgaggctcccaagaaggatgaggagaaagggaaagaaggcgacagtgagaaggagtccgagaagagtgatggagacccaatagtcgatcctgagaaggagaaggagccaaaggaagggcaggaggaagtgctgaaggaagtggtggagtctgagggggaaaggaagacaaaggtggagcgggacattggcgagggcaacctctccaccgctgctgccgccgccctggccgccgccgcagtgaaagctaagcacttggctgctgttgaggaaaggaagatcaaatctttggtggccctgctggtggagacccagatgaaaaagttggagatcaaacttcggcactttgaggagctggagactatcatggaccgggagcgagaagcactggagtatcagaggcagcagctcctggccgacagacaagccttccacatggagcagctgaagtatgcggagatgagggctcggcagcagcacttccaacagatgcaccaacagcagcagcagccaccaccagccctgcccccaggctcccagcctatccccccaacaggggctgctgggccacccgcagtccatggcttggctgtggctccagcctctgtagtccctgctcctgctggcagtggggcccctccaggaagtttgggcccttctgaacagattgggcaggcagggtcaactgcagggccacagcagcagcaaccagctggagccccccagcctggggcagtcccaccaggggttcccccccctggaccccatggcccctcaccgttccccaaccaacaaactcctccctcaatgatgccaggggcagtgccaggcagcgggcacccaggcgtggcgggtaatgctcctttgggtttgccttttggcatgccgcctcctcctcctcctcctgctccatccatcatcccatttggtagtctagctgactccatcagtattaacctccccgctcctcctaacctgcatgggcatcaccaccatctcccgttcgccccgggcactctccccccacctaacctgcctgtgtccatggcgaaccctctacatcctaacctgccggcgaccaccaccatgccatcttccttgcctctcgggccggggctcggatccgccgcagcccaaagccctgccattgtggcagctgttcagggcaacctcctgcccagtgccagcccactgccagacccaggcacccccctgcctccagaccccacagccccgagcccaggcacggtcacccctgtgccacctccacagtgaggagccagccagacatctctccccctcaccccctgtggacatcacggttccaggaacagcccttcccccaccactgggaccctccccagcctggagagttcatcactacgtaaggaaagctccttccgcccctccaaagccctcaccatgcctaacagaggcatgcatttttatatcagattattcaaggacttctgtttaaaagatgtttataatgtctgggagagaggataggatgggaatgctgccctaaaggaagggctggtgaaaggtgtttatacaaggttctattaaccacttctaagggtacacctccctccaaactactgcattttctatggatt

SEQ ID NO: 134899 - protein, 515 aa, Artificial Sequence
  derived and/or modified sequence
MAARAGFQSVAPSGGAGASGGAGAAAALGPGGTPGPPVRMGPAPGQGLYRSPMPGAAYPRPGMLPGSRMTPQGPSMGPPGYGGNPSVRPGLAQSGMDQSRKRPAPQQIQQVQQQAVQNRNHNAKKKKMADKILPQRIRELVPESQAYMDLLAFERKLDQTIMRKRLDIQEALKRPIKQKRKLRIFISNTFNPAKSDAEDGEGTVASWELRVEGRLLEDSALSKYDATKQKRKFSSFFKSLVIELDKDLYGPDNHLVEWHRTATTQETDGFQVKRPGDVNVRCTVLLMLDYQPPQFKLDPRLARLLGIHTQTRPVIIQALWQYIKTHKLQDPHEREFVICDKYLQQIFESQRMKFSEIPQRLHALLMPPEPIIINHVISVDPNDQKKTACYDIDVEVDDTLKTQMNSFLLSTASQQEIATLDNKIHETIETINQLKTQREFMLSFARDPQGFINDWLQSQCRDLKTMTDVVGNPEEERRAEFYFQPWAQEAVCRYFYSKVQQRRQELEQALGIRNT

SEQ ID NO: 134900 - protein, 291 aa, Artificial Sequence
  derived and/or modified sequence
MMPLNKRGSSLPFKSLVIELDKDLYGPDNHLVEWHRTATTQETDGFQVKRPGDVNVRCTVLLMLDYQPPQFKLDPRLARLLGIHTQTRPVIIQALWQYIKTHKLQDPHEREFVICDKYLQQIFESQRMKFSEIPQRLHALLMPPEPIIINHVISVDPNDQKKTACYDIDVEVDDTLKTQMNSFLLSTASQQEIATLDNKIHETIETINQLKTQREFMLSFARDPQGFINDWLQSQCRDLKTMTDVVGNPEEERRAEFYFQPWAQEAVCRYFYSKVQQRRQELEQALGIRNT

SEQ ID NO: 134901 - DNA, 1548 bp, Artificial Sequence
  derived and/or modified sequence
atggccgccagagccggcttccagagcgtggcccccagcggcggcgccggcgccagcggcggcgccggcgccgccgccgccctgggccccggcggcacccccggcccccccgtgagaatgggccccgcccccggccagggcctgtacagaagccccatgcccggcgccgcctaccccagacccggcatgctgcccggcagcagaatgaccccccagggccccagcatgggcccccccggctacggcggcaaccccagcgtgagacccggcctggcccagagcggcatggaccagagcagaaagagacccgccccccagcagatccagcaggtgcagcagcaggccgtgcagaacagaaaccacaacgccaagaagaagaagatggccgacaagatcctgccccagagaatcagagagctggtgcccgagagccaggcctacatggacctgctggccttcgagagaaagctggaccagaccatcatgagaaagagactggacatccaggaggccctgaagagacccatcaagcagaagagaaagctgagaatcttcatcagcaacaccttcaaccccgccaagagcgacgccgaggacggcgagggcaccgtggccagctgggagctgagagtggagggcagactgctggaggacagcgccctgagcaagtacgacgccaccaagcagaagagaaagttcagcagcttcttcaagagcctggtgatcgagctggacaaggacctgtacggccccgacaaccacctggtggagtggcacagaaccgccaccacccaggagaccgacggcttccaggtgaagagacccggcgacgtgaacgtgagatgcaccgtgctgctgatgctggactaccagcccccccagttcaagctggaccccagactggccagactgctgggcatccacacccagaccagacccgtgatcatccaggccctgtggcagtacatcaagacccacaagctgcaggacccccacgagagagagttcgtgatctgcgacaagtacctgcagcagatcttcgagagccagagaatgaagttcagcgagatcccccagagactgcacgccctgctgatgccccccgagcccatcatcatcaaccacgtgatcagcgtggaccccaacgaccagaagaagaccgcctgctacgacatcgacgtggaggtggacgacaccctgaagacccagatgaacagcttcctgctgagcaccgccagccagcaggagatcgccaccctggacaacaagatccacgagaccatcgagaccatcaaccagctgaagacccagagagagttcatgctgagcttcgccagagacccccagggcttcatcaacgactggctgcagagccagtgcagagacctgaagaccatgaccgacgtggtgggcaaccccgaggaggagagaagagccgagttctacttccagccctgggcccaggaggccgtgtgcagatacttctacagcaaggtgcagcagagaagacaggagctggagcaggccctgggcatcagaaacacctag

SEQ ID NO: 134902 - DNA, 1548 bp, Artificial Sequence
  derived and/or modified sequence
atggctgccagagctggatttcaatctgttgccccttcaggcggcgccggagcttccggtggagctggagctgcggctgccctcggccccggcggtacaccaggaccgcccgtgcgcatgggccccgcgccggggcaaggcttataccggagcccaatgcccggggcagcatatccccgcccaggcatgctgccgggaagccgaatgacaccacagggtccatcaatgggcccccctggatatggagggaacccctccgttagaccaggcctcgctcagtccggaatggaccagtcccgcaaacgccctgcgccccagcagatccagcaggtgcagcagcaggctgtgcaaaaccgcaaccacaacgctaagaagaagaagatggcggacaagattttacctcagcggattagggaactcgtgcctgaaagccaagcttacatggacctcctggcgtttgaacgtaagctggaccaaaccattatgagaaagagattggatatacaggaggctctcaagagaccaatcaaacagaagagaaaactccgtatctttatctccaacacatttaacccggccaaaagcgatgctgaggatggagagggtacagtggcttcttgggaacttcgcgtagagggcaggctcctggaggacagtgcattgtctaaatacgatgccacaaagcagaagagaaagttttcgtcgttctttaaaagcttggttatagaattagataaggacctctacggacccgacaatcatctggtcgaatggcaccggaccgcaaccacacaggagacggatggcttccaggtcaagagacccggcgatgtgaatgtccgctgcacagtactactcatgctggactaccagccaccacaattcaaactcgatcctcgtctggcccggttgctggggattcatacacaaaccaggcctgtgataattcaggcgctgtggcaatatatcaagacacataagttgcaagatccccacgaaagagaatttgtgatttgtgacaagtacctgcaacagatctttgagtcccagaggatgaagttcagcgaaatcccccagagacttcatgcgctcttaatgcctcctgaacctataattattaatcacgtgatatcagtagaccccaacgatcagaaaaaaactgcctgttacgacattgatgtcgaggtggacgatacactcaaaacgcagatgaacagcttcttactctctaccgcctcacagcaggaaatcgctacgctcgataataagattcatgaaacaatcgagaccatcaatcagctgaagactcaaagggaatttatgctcagctttgctagggatcctcaaggcttcatcaatgattggctgcaaagtcaatgcagggatctgaagacaatgactgacgtggtcggcaatccagaagaagagcggcgagccgaattttactttcagccatgggcacaagaagccgtgtgtcggtacttttactctaaggtccagcaaagacggcaggagctcgagcaggccttgggcatacggaacacttag

SEQ ID NO: 134903 - DNA, 1548 bp, Artificial Sequence
  derived and/or modified sequence
atggccgcccgggccggcttccagagcgtggcccccagcggcggggccggggccagcggcggggccggggctgctgctgccctgggccctgggggcaccccaggcccccctgtgaggatgggccctgcccctggccagggcctgtaccgcagccccatgcctggggccgcctaccccaggcctggcatgctgcccggcagcaggatgaccccccagggccccagcatgggccccccaggctatggaggcaaccccagcgtgcggcccggcctggcccagagcggcatggaccagagcaggaagaggcctgccccccagcagatccagcaggtgcagcagcaggccgtgcagaacagaaaccacaatgccaagaagaagaagatggctgacaagatcctgccccagaggatccgggagctggtgcctgagagccaggcctacatggacctgctggcctttgagaggaagctggaccagaccatcatgaggaagaggctggacatccaggaggccctgaagaggcccatcaagcagaagaggaagctgcgcatcttcatcagcaacaccttcaacccagccaagagtgatgctgaagatggagagggcaccgtggcctcctgggagctgcgggtggagggccgcctgctggaggacagcgccctgagcaaatatgatgccaccaagcagaagaggaagttcagcagcttcttcaagagcctggtgattgagctggacaaggacctgtatggccctgacaaccacctggtggagtggcacaggacagccaccacccaggagacagatggcttccaggtgaagaggcctggagatgtgaatgtgcgctgcaccgtgctgctgatgctggactaccagcccccccagttcaagctggacccccggctggcccggctgctgggcatccacacccagaccaggcctgtgatcatccaggccctgtggcagtacatcaagacccacaagctgcaggacccccatgagcgggagtttgtgatctgtgacaagtacctgcagcagatctttgagagccagaggatgaagttcagcgagatcccccagaggctgcacgccctgctgatgcctcctgagcccatcatcatcaaccacgtgatctctgtggaccccaatgaccagaagaagacagcctgctatgacattgatgtggaggtggatgacaccctgaagacccagatgaacagcttcctgctgagcacagccagccagcaggagatcgccaccctggacaacaagatccacgagaccatcgagaccatcaaccagctgaagacccagcgggagttcatgctgagctttgcccgggacccccagggcttcatcaatgactggctgcagagccagtgccgggacctgaagaccatgacagatgtggtgggcaaccctgaggaggagaggagagctgagttctacttccagccctgggcccaggaggccgtgtgccgctacttctacagcaaggtgcagcagaggcggcaggagctggagcaggccctgggcatccggaacacctag

SEQ ID NO: 134904 - DNA, 1548 bp, Artificial Sequence
  derived and/or modified sequence
atggccgcccgggccggcttccagagcgtggcccccagcggcggcgccggagcctctggaggagctggcgctgcggccgctctgggacctgggggaactcccgggccccccgtgaggatggggcccgctcccggccaagggctttaccgtagcccaatgccaggggctgcttatccgagacctggcatgctgcccggctctcgaatgactccacaaggcccgagcatgggccccccaggctacggaggaaatcccagcgtgcggcccggactagctcaatccggcatggaccaatctcgcaaaagaccagctcctcagcaaattcagcaggttcaacaacaggcagtgcagaataggaatcataacgcaaagaagaagaagatggctgataagattctgcctcagaggatccgggagctggtgcccgaatcccaggcttatatggatctgctggcttttgagaggaagctggaccagactatcatgaggaagagactcgatatacaagaggcattaaaaaggcctatcaagcagaaaagaaaacttagaattttcatctctaacacattcaaccccgcaaagtccgatgccgaagacggcgagggtacagttgcatcgtgggaactgcgggtggaggggcgtctgctcgaggattctgctctgagtaaatatgatgccacgaaacagaagagaaagttttcatctttttttaaatccctcgtaattgagctggataaagacctgtacgggccagataaccacctggtggaatggcacagaaccgccaccacacaagagacggatgggttccaagtaaagcgtccaggcgatgtgaacgttcggtgcaccgtcttgctgatgcttgactatcagcccccacagttcaagctggatccacgcctcgcccgattactgggaatccatacccaaacacgccccgtaattattcaagcactctggcaatacattaaaacccataagctgcaggatcctcatgagagagagttcgtgatctgcgacaagtatctccaacagatcttcgaatcacagcggatgaagttttcggaaatcccccagcgcctgcatgctttgctgatgccgcctgagcccattatcattaaccacgtaatcagcgtcgacccgaacgatcagaaaaaaactgcatgctatgacatcgatgtggaggtggacgacaccctgaagacccagatgaacagtttcctgctgtccaccgccagtcaacaagaaattgccaccctggacaataaaatccacgagaccattgaaaccatcaaccaactcaagacgcagcgggagttcatgctgagtttcgctagagatccacagggattcattaatgactggttacaatcccagtgtagggatctcaaaaccatgactgatgtggtgggaaatccagaagaggaaagaagagctgagttttattttcagccctgggcccaagaggctgtttgccggtacttctactccaaggtgcagcaaagaaggcaagagctggaacaggcccttggaatccggaatacttag

SEQ ID NO: 134905 - DNA, 1548 bp, Artificial Sequence
  derived and/or modified sequence
atggccgctcgcgctggatttcagtcagttgcgccttccggaggcgctggcgcttctggcggagcgggagctgccgctgcccttggacccggtgggacaccaggcccaccagtacggatgggaccagccccaggccaaggcctataccgctcaccaatgccaggggcagcataccctcgccctgggatgctgcccggatcacggatgactccccaaggtccatccatgggcccacctggatacggcggaaatccctcggtgagaccgggtctggcccagtcaggtatggatcaaagccgtaaacgcccagcgcctcaacagattcagcaggtgcaacagcaggccgtccaaaatcgcaaccataatgctaagaaaaaaaaaatggccgataaaattttaccccagaggattagggaactggtcccagagagtcaagcgtatatggatctcttagcgttcgagaggaagcttgatcaaacaatcatgcgcaagaggcttgacatacaggaagcactcaaacgccctattaagcagaaacgcaaacttaggatttttatttcaaacactttcaaccccgcaaaatctgacgccgaggatggcgagggtacggtcgcctcttgggaattgcgagtagagggacggctgctggaagattcagctctgagcaaatacgacgccaccaaacaaaaacggaagtttagcagcttttttaaatctctggtcattgagctggataaggacttgtacgggccagataaccatctggtggaatggcaccggaccgcaactacccaggagacagatggatttcaagtcaaaagacccggagacgtgaacgtaagatgcacagtgctgctgatgctggattatcagcctcctcagtttaagcttgaccctcgcttagcgagactgctggggatccatacccagacaaggccagtcatcattcaggccctgtggcagtatattaaaactcataagctgcaggatccacatgagagagagttcgtgatatgcgacaagtatctgcagcagatttttgaaagccagcgcatgaaattttctgaaattccccaacgtcttcacgccctgctgatgccaccggagcctatcattatcaaccatgtcatctctgtcgacccaaatgaccaaaaaaaaaccgcttgttacgatatcgatgtggaagtggacgacactctgaagacacaaatgaattcctttctgctctccacagccagccagcaggaaatcgccacccttgacaataaaattcatgaaaccatagaaaccatcaaccagctgaaaactcagcgcgagttcatgctgtccttcgcaagagatccgcagggttttatcaatgactggctccaaagccagtgcagggacctgaagactatgacagacgtagtcgggaatcccgaggaagaacgcagagccgagttttatttccagccgtgggcccaggaggctgtgtgtaggtacttttatagtaaggtccagcagaggcgtcaggagctcgagcaggcccttggtataagaaatacttag

SEQ ID NO: 134906 - DNA, 3658 bp, Artificial Sequence
  derived and/or modified sequence
ttggaaagttaacgccatgcgccaagatgaagctattactccaagcccctcttcatcagagggctcgagttggggttgagactggggctgaggctgtggtccgtccccctttccaggtccttgtcttcctcccgtcggcctgggggcgcccgctcacgcggcctctctattgcagagctcttctctatggttttccctcccggaccgtgaaggcgggagggcgtggccagcacgccttttccgctagtcgccccgctctatcccatagtctcgctgccctgagcctcccgtgccggccggccggccgggggaacaggcgggcgctcggggggcgctcggggggcggggggagttccggttccggttctttgtgcggctgcatcggcggctccgggaagatggcggcccgggcgggtttccagtctgtggctccaagcggcggcgccggagcctcaggaggggcgggcgcggctgctgccttgggcccgggcggaactccggggcctcctgtgcgaatgggcccggctccgggtcaagggctgtaccgctccccgatgcccggagcggcctatccgagaccaggtatgttgccaggcagccgaatgacacctcagggaccttccatgggaccccctggctatggggggaacccttcagtccgacctggcctggcccagtcagggatggatcagtcccgcaagagacctgcccctcagcagatccagcaggtccagcagcaggcggtccaaaatcgaaaccacaatgcaaagaaaaagaagatggctgacaaaattctacctcaaaggattcgtgaactggtaccagaatcccaggcctatatggatctcttggcttttgaaaggaaactggaccagactatcatgaggaaacggctagatatccaagaggccttgaaacgtcccatcaagcaaaaacggaagctgcgaattttcatttctaacactttcaatccggctaagtcagatgccgaggatggggaagggacggtggcttcctgggagcttcgggtagaaggacggctcctggaggattcagccttgtccaaatatgatgccactaaacaaaagaggaagttctcttccttttttaagtccttggtgattgaactggacaaagacctgtatgggccagacaaccatctggtagaatggcacaggaccgccactacccaggagaccgatggctttcaggtgaagcggccgggagacgtgaatgtacggtgtactgtcctactgatgctggattaccagcctccccagtttaaattagacccccgcctagctcgactcctgggcatccatacccagactcgtccagtgatcatccaagcactgtggcaatatattaagacacataagctccaggaccctcacgagcgggagtttgtcatctgtgacaagtacctgcagcagatctttgagtctcaacgtatgaagttttcagagatccctcagcggctccatgccttgcttatgccaccagaacctatcatcattaatcatgtcatcagtgttgacccgaatgatcagaaaaagacagcttgttatgacattgatgttgaagtggatgacaccttgaagacccagatgaattcttttctgctgtccactgccagccaacaggagattgctactctagacaacaagatccatgagacaatagaaaccatcaaccagctgaagactcagcgggagttcatgctgagctttgccagagaccctcagggtttcatcaatgactggcttcagtcccagtgcagggacctcaagacaatgactgatgtggtgggtaacccagaggaggagcgccgagctgagttctacttccagccctgggctcaggaggctgtgtgccgatacttctactccaaggtgcagcagagacgacaagaattagagcaagccctgggaatccggaatacatagggcctctcccacagccctgattcgactgcaccaattcttgatttgggccctgtgctgcctgcctcatagtatctgccttggtcttgcttggggcgttccaggggatgctgttggttcaaggacaacaccagaatgaagagggtctcacaagacacctgttatcctcttctttcaccctatctcttcccacccccagcttccctttgccccacaaagttcccatgtgcctgtaccctcccctggtctacataggacctctagatagtgttagagagagaacatgtagtggtaatgagtgcttggaatggattgggcctcaggccaggtggtcttcaaggggaccagctaactgatcctgcccttcagagacccaggagttgggagctttcgctccttctccaagactcaggcctgtgggcactctataagctagttgatcttggctctcctgataacagaatccaatttccttccttccctccacaggtttggaacaaactctcccttcacttgttgccctgtagcactacagaaaccctggttcttgggctccactgagccccaggtcagtccccagccctctgggttggcctgctgtcagtgcttctctcactccttagttggggtccacatcagtattggagttttgttctttattgctccctcccagacactccctgtggctgccctttgtgattccctcagatctgccctaatcccgggcatttgggtgggggaatcttgcctttccctttcagagccccagggatctcatctggggaactgtcattgccagcagaggctgttccttcctgctgtttggagatgtgactcattcattcactcactccaccctgcctctgcatcccttaatggagaaacgggcctaaaaccaaacgggtaaaaagccctgggccatccctgtcttcctgtcccttgtctgcccagttgacacctactggtgacttctagggcactgaggagtgaaagcgcctagggctggagaatagcgctgagttgggtttgtgactcttccctctccctgcctcacaggattgtgactccccagcccctgccctcaaagcttcagacccctcaggtagcagcaggaccttgtgatcttggccccttggatctgagatggtttttgcatctttccaggagagcctcacattcttcttccaggttgtatcacccccgagttagcatatcccaggctcgcagactcaacacagcaagggtgggagacagctgggcacaaagggggaattccgttcagcatgggctctaaacccacagaactgacaaagcccctgcttccccaccccctcctcaggctcctgcgagcacacccccacccccaaatccctccctgttctacactggggacagcagaattttctccccgtcttccccttcctgccattttccctcccttgaaaggttgacactggacaaccttggggcagctgagccctggccgcctcctggctggaaccatgagaaggaagctcagtacttcccacagtgtccctgttgataactgtttttattaactgaattgtttttttcatggaccaaacttttttttgtactgtccccttattgatgttacccagttttaataaaagaatcttctgaaggatgggtcctcctacctactgtgagagagctcttccctgagctcttcttccttcaataccattagccac

SEQ ID NO: 134907 - protein, 435 aa, Artificial Sequence
  derived and/or modified sequence
MTPGLQHPPTVVQRPGMPSGARMPHQGAPMGPPGSPYMGSPAAPARSRSAKRRKMADKILPQRIRELVPESQAYMDLLAFERKLDQTIMRKRVDIQEALKRPMKQKRKLRLYISNTFNPAKPDAEDSDGSIASWELRVEGKLLDDPSKQKRKFSSFFKSLVIELDKDLYGPDNHLVEWHRTPTTQETDGFQVKRPGDLSVRCTLLLMLDYQPPQFKLDPRLARLLGLHTQSRSAIVQALWQYVKTNRLQDSHDKEYINGDKYFQQIFDCPRLKFSEIPQRLTALLLPPDPIVINHVISVDPSDQKKTACYDIDVEVEEPLKGQMSSFLLSTANQQEISALDSKIHETIESINQLKIQRDFMLSFSRDPKGYVQDLLRSQSRDLKVMTDVAGNPEEERRAEFYHQPWSQEAVSRYFYCKIQQRRQELEQSLVVRNT

SEQ ID NO: 134908 - protein, 470 aa, Artificial Sequence
  derived and/or modified sequence
MTPGLQHPPTVVQRPGMPSGARMPHQGAPMGPPGSPYMGSPAVRPGLAPAGMEPARKRAAPPPGQSQAQSQGQPVPTAPARSRSAKRRKMADKILPQRIRELVPESQAYMDLLAFERKLDQTIMRKRVDIQEALKRPMKQKRKLRLYISNTFNPAKPDAEDSDGSIASWELRVEGKLLDDPSKQKRKFSSFFKSLVIELDKDLYGPDNHLVEWHRTPTTQETDGFQVKRPGDLSVRCTLLLMLDYQPPQFKLDPRLARLLGLHTQSRSAIVQALWQYVKTNRLQDSHDKEYINGDKYFQQIFDCPRLKFSEIPQRLTALLLPPDPIVINHVISVDPSDQKKTACYDIDVEVEEPLKGQMSSFLLSTANQQEISALDSKIHETIESINQLKIQRDFMLSFSRDPKGYVQDLLRSQSRDLKVMTDVAGNPEEERRAEFYHQPWSQEAVSRYFYCKIQQRRQELEQSLVVRNT

SEQ ID NO: 134909 - protein, 139 aa, Artificial Sequence
  derived and/or modified sequence
MTPGLQHPPTVVQRPGMPSGARMPHQGAPMGPPGSPYMGSPAVRPGLAPAGMEPARKRAAPPPGQSQAQSQGQPVPTAPARSRSAKRRKMADKILPQRIRELVPESQAYMDLLAFERKLDQTIMRKRVDIQEALKRPMK

SEQ ID NO: 134910 - DNA, 1413 bp, Artificial Sequence
  derived and/or modified sequence
atgacccccggcctgcagcacccccccaccgtggtgcagagacccggcatgcccagcggcgccagaatgccccaccagggcgcccccatgggcccccccggcagcccctacatgggcagccccgccgtgagacccggcctggcccccgccggcatggagcccgccagaaagagagccgcccccccccccggccagagccaggcccagagccagggccagcccgtgcccaccgcccccgccagaagcagaagcgccaagagaagaaagatggccgacaagatcctgccccagagaatcagagagctggtgcccgagagccaggcctacatggacctgctggccttcgagagaaagctggaccagaccatcatgagaaagagagtggacatccaggaggccctgaagagacccatgaagcagaagagaaagctgagactgtacatcagcaacaccttcaaccccgccaagcccgacgccgaggacagcgacggcagcatcgccagctgggagctgagagtggagggcaagctgctggacgaccccagcaagcagaagagaaagttcagcagcttcttcaagagcctggtgatcgagctggacaaggacctgtacggccccgacaaccacctggtggagtggcacagaacccccaccacccaggagaccgacggcttccaggtgaagagacccggcgacctgagcgtgagatgcaccctgctgctgatgctggactaccagcccccccagttcaagctggaccccagactggccagactgctgggcctgcacacccagagcagaagcgccatcgtgcaggccctgtggcagtacgtgaagaccaacagactgcaggacagccacgacaaggagtacatcaacggcgacaagtacttccagcagatcttcgactgccccagactgaagttcagcgagatcccccagagactgaccgccctgctgctgccccccgaccccatcgtgatcaaccacgtgatcagcgtggaccccagcgaccagaagaagaccgcctgctacgacatcgacgtggaggtggaggagcccctgaagggccagatgagcagcttcctgctgagcaccgccaaccagcaggagatcagcgccctggacagcaagatccacgagaccatcgagagcatcaaccagctgaagatccagagagacttcatgctgagcttcagcagagaccccaagggctacgtgcaggacctgctgagaagccagagcagagacctgaaggtgatgaccgacgtggccggcaaccccgaggaggagagaagagccgagttctaccaccagccctggagccaggaggccgtgagcagatacttctactgcaagatccagcagagaagacaggagctggagcagagcctggtggtgagaaacacctag

SEQ ID NO: 134911 - DNA, 420 bp, Artificial Sequence
  derived and/or modified sequence
atgacccccggcctgcagcacccccccaccgtggtgcagagacccggcatgcccagcggcgccagaatgccccaccagggcgcccccatgggcccccccggcagcccctacatgggcagccccgccgtgagacccggcctggcccccgccggcatggagcccgccagaaagagagccgcccccccccccggccagagccaggcccagagccagggccagcccgtgcccaccgcccccgccagaagcagaagcgccaagagaagaaagatggccgacaagatcctgccccagagaatcagagagctggtgcccgagagccaggcctacatggacctgctggccttcgagagaaagctggaccagaccatcatgagaaagagagtggacatccaggaggccctgaagagacccatgaagtag

SEQ ID NO: 134912 - DNA, 1413 bp, Artificial Sequence
  derived and/or modified sequence
atgacaccaggcctgcagcacccccccacggtggttcagcgtccgggcatgcctagtggggcacggatgccacaccagggagccccaatgggtcccccaggcagcccttatatgggatcccctgcagtgaggccaggactggcgccagccgggatggaaccagcaagaaaacgcgcagctccacctcccggtcagtcccaggctcagtcgcagggtcagccagtgcccactgccccagccagatctaggagtgcaaagcgccgcaagatggctgataagatccttccacagagaattagggaattggtgccagagtctcaagcatatatggatctgctcgccttcgaacgcaagctggatcagacaatcatgcgcaagcgcgttgatatccaggaagccctgaaacgtcctatgaaacaaaaacgtaagctgagactttatattagcaatacattcaatccagccaagcctgatgccgaggatagcgacggcagcatcgcatcttgggaactgagggtggaagggaagctccttgacgacccaagcaagcagaaaagaaagttttccagcttctttaaaagtttggttattgaactggacaaagacctttatgggcctgacaatcatctcgtcgaatggcaccgaacaccgaccacccaggaaacggatggatttcaggtcaaacgacccggagaccttagcgtgaggtgcaccctgcttttgatgctagactatcagcccccacagtttaaactggacccacgtctcgcaagattactgggactgcatactcaaagtcggagtgccatagtgcaggcactgtggcagtacgtaaaaactaaccgcctccaggacagtcatgacaaggagtacatcaatggtgacaaatatttccagcaaatctttgattgcccccggttaaagttcagcgaaatcccacagcgtctgaccgccctgctcctccctcccgaccccatcgtgatcaaccacgtgattagtgtcgatccgtccgatcagaagaaaaccgcctgctacgacatcgatgtcgaggtggaagagcctctgaaaggccagatgtcctcttttctgcttagcaccgccaatcagcaggagatttccgccttggattcgaagatacacgagacaattgagagcattaatcagctgaagatccagcgcgattttatgttgtcatttagcagggacccgaaaggctatgtacaagatctcttgagatcacagagtcgtgacttgaaagtcatgaccgatgtcgctggaaatcctgaggaggaacggcgggctgaattctaccaccagccctggtcacaggaggctgtgtctagatacttttattgtaagatccagcagagaaggcaagaattggaacaatcgcttgtcgttcgcaacacttag

SEQ ID NO: 134913 - DNA, 1413 bp, Artificial Sequence
  derived and/or modified sequence
atgacccctggactgcaacacccgccaactgtcgtacagaggcccgggatgccatccggtgccaggatgccccaccagggagcccccatggggccacctgggtccccttacatgggatctccagccgtcagacctggccttgcacctgccggtatggagccggcccgaaagcgggccgcacctcccccaggccagagccaggcgcagtcgcaaggacagccagtcccaaccgctcccgccagaagtcggtcagctaagagacgcaagatggcagataaaattttacctcagcgcatacgcgagctagtccctgagagccaggcctacatggatctgctggcctttgagagaaagctggatcaaaccattatgaggaaaagggtggatatccaggaggcactgaagcgtcctatgaaacagaagaggaagttgagactctacatctctaatacatttaacccagcgaagcccgatgccgaggatagtgatggctcaattgcctcctgggaactcagagtggaaggcaagttgctcgacgaccctagcaaacagaagagaaaattttcgtcattttttaagtcactagtgatcgaactggacaaggacttatacggacctgacaaccatttagtggagtggcaccgaaccccaacaacacaggagacagatggatttcaagtgaaacgcccaggtgacctgagtgtgaggtgtacgctgttgctaatgctcgactaccagcctccccagttcaagctagatccgcggctcgcgcggctcctgggtctccatacccagtctaggagtgccattgtccaggctttatggcagtatgtgaaaacaaacagactccaggactctcacgataaggagtacatcaatggggacaagtacttccaacagatttttgattgtccacgtctgaagttttcagagattccccagagattgaccgcccttttattaccccccgaccccatagtcattaaccacgtcatcagcgtcgacccctctgatcagaagaaaaccgcttgctatgacatcgatgtagaggtagaggagcccctcaagggccaaatgagctctttcctgttatcaacggcaaatcagcaggagatcagtgctctggattcaaaaatacacgagaccattgagagcatcaaccagttgaaaatccagcgtgattttatgctgtcctttagtagggaccccaagggatatgtacaggatttgctgcggtcccagtcaagggacttgaaagtaatgaccgacgtggcagggaaccctgaggaagaaaggcgcgccgagttttatcaccagccatggagtcaagaggcagtgtcccgctacttctattgcaaaatccagcagaggagacaggaactcgaacagtccctggtggtgagaaacacctag

SEQ ID NO: 134914 - DNA, 420 bp, Artificial Sequence
  derived and/or modified sequence
atgactccagggcttcagcacccaccaacagtggtgcaacggccaggtatgccatccggcgcacggatgcctcatcagggggcccctatgggaccacccggttctccatatatgggcagccctgctgtcagaccggggctggctccggccggcatggaaccggcccgcaagcgcgccgcacctccaccgggacagtcgcaggctcagtctcagggacagccagtccccactgcaccggccaggtcccggagtgccaaacgcagaaagatggctgacaagatcctgccacaacgaatcagggagctagtcccagagagtcaagcttatatggacttactagcattcgaacgaaaattggatcagactattatgaggaagagggtagatatacaggaagccctgaagagaccgatgaaatag

SEQ ID NO: 134915 - DNA, 1413 bp, Artificial Sequence
  derived and/or modified sequence
atgaccccaggcctgcagcacccccccaccgtggtgcagaggcctggcatgcccagcggggccaggatgccccaccagggcgcccccatgggccccccaggcagcccctacatgggcagccctgctgtgcggcccggcctggccccagctggcatggagcccgccaggaagagagctgcccctcctcctggccagagccaggcccagagccagggccagcctgtgcccacagccccagcccggagccgcagcgccaagaggaggaagatggctgacaagatcctgccccagaggatccgggagctggtgcctgagagccaggcctacatggacctgctggcctttgagaggaagctggaccagaccatcatgaggaagagggtggacatccaggaggccctgaagaggcccatgaagcagaagaggaagctgcggctgtacatcagcaacaccttcaacccagccaagccagatgctgaggacagtgatggcagcatcgcctcctgggagctgcgggtggagggcaagctgctggatgaccccagcaagcagaagaggaagttcagcagcttcttcaagagcctggtgattgagctggacaaggacctgtatggccctgacaaccacctggtggagtggcacaggacccccaccacccaggagacagatggcttccaggtgaagaggcctggggacctgtctgtgcgctgcaccctgctgctgatgctggactaccagcccccccagttcaagctggacccccggctggcccggctgctgggcctgcacacccagagccgcagcgccatcgtgcaggccctgtggcagtatgtgaagaccaaccggctgcaggacagccatgacaaggagtacatcaatggagacaagtacttccagcagatctttgactgcccccggctgaagttcagcgagatcccccagaggctgacagccctgctgctgcccccagaccccatcgtcatcaaccacgtgatctctgtggaccccagcgaccagaagaagacagcctgctatgacattgatgtggaggtggaggagcccctgaagggccagatgagcagcttcctgctgagcacagccaaccagcaggagatcagcgccctggacagcaagatccacgagaccatcgagagcatcaaccagctgaagatccagagggacttcatgctgtccttcagccgggaccccaagggctacgtgcaggacctgctgcggagccagagccgggacctgaaggtgatgacagatgtggccggcaaccctgaggaggagcggcgggcagagttctaccaccagccctggagccaggaggccgtgagccgctacttctactgcaagatccagcagaggcggcaggagctggagcagagcctggtggtgaggaacacctag

SEQ ID NO: 134916 - DNA, 420 bp, Artificial Sequence
  derived and/or modified sequence
atgaccccaggcctgcagcacccccccaccgtggtgcagaggcctggcatgcccagcggggccaggatgccccaccagggcgcccccatgggccccccaggcagcccctacatgggcagccctgctgtgcggcccggcctggccccagctggcatggagcccgccaggaagagagctgcccctcctcctggccagagccaggcccagagccagggccagcctgtgcccacagccccagcccggagccgcagcgccaagaggaggaagatggctgacaagatcctgccccagaggatccgggagctggtgcctgagagccaggcctacatggacctgctggcctttgagaggaagctggaccagaccatcatgaggaagagggtggacatccaggaggccctgaagaggcccatgaagtag

SEQ ID NO: 134917 - DNA, 1413 bp, Artificial Sequence
  derived and/or modified sequence
atgacccccggcctgcagcacccccccaccgtggtgcagcggcccggtatgccaagtggggctagaatgcctcaccagggggctccgatggggccacctggcagcccctatatggggagccctgccgtccgccccgggttggcgcccgcaggcatggaaccagcccgaaaacgtgccgcccccccgccaggccaatctcaggcgcagagccagggacagcccgtccccacagcccccgcaagatcgcgatctgcaaagcgaaggaagatggccgacaaaattttacctcaaagaattagagagttggtgcctgaaagtcaggcatatatggacctgctggcttttgagaggaagctggatcagactatcatgcgcaagcgggtggatatccaggaagccctcaaacggcccatgaaacaaaaacgtaagctgaggctctatatatccaacacctttaaccccgctaaacccgacgccgaggacagcgacgggagtatcgcctcctgggagttaagagtggaggggaagttgctggacgacccctccaaacagaagagaaagttctcctcattcttcaaaagcctggtgatcgagctggataaagatttatatggcccggacaatcatcttgtggagtggcatcgcaccccaaccacccaagagaccgacggcttccaagtaaagaggccaggcgacttgagcgttcgctgcactctcctcttgatgctagattaccagccaccacagttcaaactggacccaaggcttgcccgcctgctgggcctgcacactcagtctcggtccgcaattgttcaggctctctggcagtatgtcaagacaaacagactgcaggattctcacgacaaggagtacatcaatggagacaaatatttccagcagatttttgactgcccgcggctgaagttctccgaaataccacagcgtttgaccgctctgttgttaccacctgatcccatcgtgataaaccatgtgatcagcgttgatccctccgatcaaaaaaagaccgcatgttacgatatcgacgtggaggttgaagagcctttaaagggacagatgtcttcatttctgttaagtacagcaaatcaacaggaaatttccgcactggatagtaaaatccacgaaacaatcgagtccatcaaccagctcaaaattcagcgcgactttatgctttcgttctcccgggatccaaagggatacgtacaagatctgttgagaagccaaagccgagatctcaaggtgatgactgacgtggccggaaaccccgaagaagagaggcgggctgagttttaccaccagccgtggtcccaggaggctgtctctaggtatttctattgcaaaattcagcagcggagacaggagctggagcagtccttggtcgtcaggaacacgtag

SEQ ID NO: 134918 - DNA, 1413 bp, Artificial Sequence
  derived and/or modified sequence
atgacccccggcctgcagcacccccccaccgtggtgcagcggcccgggatgccatcaggggcccgtatgccacaccagggggccccaatgggccctcccggatcaccatacatgggctcccccgctgttcgtccgggactggcgcccgccggtatggaaccagcaagaaaacgtgccgctccacccccgggccagtcacaggcccagtctcagggccagcccgtgcccacagctcctgctcggtctcgcagcgctaagcgcagaaagatggcggataaaattcttccacaaagaattcgcgaactggtgcccgagtcacaagcttacatggacctgctggccttcgagaggaagctcgatcagacaattatgaggaagagggtcgatattcaggaagcccttaagcgtccgatgaagcagaaacgcaagttaaggctgtacatcagcaatacctttaacccagccaagccagatgcggaggatagtgatgggtcaattgcatcctgggagctgcgcgtggagggaaaactgctggacgacccttcgaaacagaagaggaagtttagcagcttttttaagagcctggttatcgaactggataaggacctgtatgggcccgacaatcacttggtggagtggcaccgaactccaactactcaggagacggacggatttcaggtaaagcgacccggggacctgtccgttcgatgcactctactcctgatgttggactaccagcccccacagttcaaactcgatccacgcctggccaggctgttaggtttacacacccaatcccggagcgccatcgtccaggccctctggcagtatgtgaagaccaataggctgcaagatagccacgacaaggaatacatcaatggggataaatattttcagcagatttttgattgcccaagacttaaattttcagagataccgcagcgactgactgcactcctccttccaccagatcccattgtcatcaaccacgtgattagcgtggacccttcagatcagaagaaaactgcttgttatgacattgatgtggaagtcgaggagccactgaagggtcagatgtcatcctttctactttcaacagctaaccagcaggagatatcagccctggatagcaagatccacgaaacaatagagtctataaaccagctgaagatacagcgcgactttatgctcagtttcagccgggaccctaagggctatgtgcaggatctcctacggtctcaatcaagagatttgaaggtcatgacggacgttgctgggaaccctgaggaggagcggcgggcggagttctatcaccagccctggagccaggaggctgtgtcacgctatttttattgcaagatccagcagaggagacaggagctcgaacaaagtctggttgtacgaaacacttag

SEQ ID NO: 134919 - DNA, 420 bp, Artificial Sequence
  derived and/or modified sequence
atgacccccggcctgcagcacccccccaccgtggtgcagcggcccgggatgccatccggcgccaggatgcctcatcaaggcgcccccatgggacctcccgggtcgccctatatggggagtcctgcggtccgccccggactggcacctgccggcatggaaccagctcgaaaaagggcggcgccaccccccgggcaaagtcaggctcagagccaggggcaacctgtgcccaccgcccccgccaggtcacgctcggccaaaaggcggaaaatggctgataagatcctgcctcaacggatacgggaacttgttcccgagagtcaagcttacatggatctcctcgcttttgaacgtaaactggatcagaccatcatgcgcaagcgcgtagacattcaggaagccctgaagaggcccatgaaatag

SEQ ID NO: 134920 - DNA, 1413 bp, Artificial Sequence
  derived and/or modified sequence
atgaccccgggtctgcagcaccccccaactgtggtccagagacccggaatgccgtcaggcgctcgtatgccccaccaaggcgcacctatgggccctcctggctcaccctatatgggaagcccggctgttcgaccaggactggccccagctggtatggaaccagcccgaaaacgggcagccccaccccctggtcagagccaggcccagtcgcagggtcagcccgtacctacagcgccagcaaggagccggtccgccaaacgaaggaaaatggccgacaagatactcccccagcggataagggaactggttccggagtctcaggcctatatggacctgctggcctttgagcggaagttagaccagactatcatgcgcaaaagagtcgatattcaggaggccctgaaaaggcccatgaagcagaagcgcaaactgcgcttgtatatcagcaacaccttcaaccctgcgaagccagatgcagaggacagtgacggatcaatcgcatcatgggagcttagggttgaaggaaagctattggatgatccgtctaagcagaaaaggaagtttagcagtttttttaaatccctggtcatcgagctggataaggacctgtacggtcctgataaccacttggtcgagtggcaccggactccgactacacaggaaaccgatggattccaagtcaaaaggcccggagacctgtcagtacgatgtaccctgttgctgatgctggactaccaaccaccccagtttaagctggatcccaggttagccagacttctggggttgcacacccagtcacgctccgcaatcgtccaggcgttgtggcagtacgtgaaaaccaatcggttgcaggactctcacgataaggagtatattaacggcgacaagtattttcaacagatctttgactgtcctcgacttaaattcagcgaaattccacagagactaacggctcttctgttaccgcctgaccctattgtgatcaatcatgtgatttctgtagatccatccgaccagaagaaaaccgcctgctacgatattgacgtagaagttgaggagcctctgaaagggcagatgagtagttttctcctgtcgactgcaaaccaacaggagataagtgctttagattccaaaatacacgaaaccatcgaaagcattaaccagctgaagatccagagagacttcatgttgagcttctctagggatccgaagggctatgttcaggatttgctacggagtcagagtagagatctgaaggtcatgacagatgtcgccggaaaccccgaagaggagcggagagccgagttttaccaccagccctggtcacaagaagcagtaagtcgctacttctactgtaaaattcagcagcgacggcaggaactagagcagtcactggtcgtgaggaatacctag

SEQ ID NO: 134921 - DNA, 1413 bp, Artificial Sequence
  derived and/or modified sequence
atgactcccggattgcagcaccctcctacggtggtgcagcggcctggcatgccatctggggctcgaatgccccaccagggtgctccaatgggcccacccggatccccctatatgggatctcctgcagtgcgcccaggtctggccccagcaggaatggagccggctagaaaaagggccgctcccccaccaggtcagtcacaggcacagagtcagggtcagcccgtgccaacagcacctgcacggtctaggtcagctaagcgccgaaagatggccgacaaaatcttgccacaaaggattagagaactggttccagaaagccaagcatacatggatctcctcgcctttgagaggaaactggaccagactattatgagaaagagggtggacatccaggaggccttgaaacggccaatgaagcagaaaagaaagttgaggctctacatttcaaacacctttaatcccgctaagccagacgcggaggactcagacggcagtattgccagttgggaactgcgcgtggaaggcaagctgttggatgatccatctaaacagaagagaaaattcagttctttctttaagagcttggttatcgaattggataaagacttgtacggcccagataatcacctcgtggagtggcaccgcacacctactacccaagagactgacgggttccaggtgaagagaccaggcgaccttagcgtcaggtgtactctactcctcatgcttgactaccagcctccacaatttaaactagatcctcggctcgcacggcttctgggtcttcatacccagagtagaagtgccatagtgcaggctctgtggcagtacgtcaaaaccaaccgcctgcaagatagtcatgataaagagtatattaatggcgacaagtactttcagcagattttcgactgccctcggcttaaattttctgagatcccacaacgcctcacagccctcttgttgccccctgaccccatagtgatcaaccatgtcatatcagtcgacccaagcgaccagaagaagaccgcctgctacgatattgacgtcgaggtagaggagcccctcaaaggccagatgtcttctttccttttatcaacagccaaccagcaggaaataagtgccctggattccaagatccacgagactatcgagtccattaaccaactgaagattcagcgggatttcatgcttagcttctcccgtgatcccaaaggatacgtgcaagacctgttacggtcgcagagtcgggaccttaaagtgatgaccgacgtggccggtaatcctgaggaagaaaggcgggctgagttctaccaccagccatggtctcaggaggctgtgagccgctatttctactgcaaaatccagcagcggagacaggagctggaacaatccctggtggtgcggaacacatag

SEQ ID NO: 134922 - DNA, 420 bp, Artificial Sequence
  derived and/or modified sequence
atgacacctggacttcagcatccgcctaccgtggtgcagcgcccaggaatgccgagcggcgctcgtatgccgcatcagggtgcaccaatgggtccacccggtagtccttatatgggatcaccagcagtgagacccggtttagccccagcaggcatggagccagctcggaaaagagctgccccacccccagggcagtcacaagcccagtctcaaggacaaccggtgcctactgcacccgcaaggtccaggagcgcaaaacgacgaaaaatggcggacaagatcctgccgcagcgcatcagggagctcgtgcccgaatcccaagcctacatggatctactcgcttttgagcgtaaactggaccagacaatcatgagaaaaagagttgacatccaagaagccctaaaacgacccatgaaatag

SEQ ID NO: 134923 - DNA, 1669 bp, Artificial Sequence
  derived and/or modified sequence
ctggcatcttcctcccctcctcctttccagatcctcagaatggcccttggtgctgcaggcgcggtgggctccgggcccaggcaccgagggggcactggatgactctccaggtgcaggaccctgccatctatgactccaggtcttcagcacccacccaccgtggtacagcgccccgggatgccgtctggagcccggatgccccaccagggggcgcccatgggccccccgggctccccgtacatgggcagccccgccgtgcgacccggcctggcccccgcgggcatggagcccgcccgcaagcgagcagcgcccccgcccgggcagagccaggcacagagccagggccagccggtgcccaccgcccccgcgcggagccgcagtgccaagaggaggaagatggctgacaaaatcctccctcaaaggattcgggagctggtccccgagtcccaggcttacatggacctcttggcatttgagaggaaactggatcaaaccatcatgcggaagcgggtggacatccaggaggctctgaagaggcccatgaagcaaaagcggaagctgcgactctatatctccaacacttttaaccctgcgaagcctgatgctgaggattccgacggcagcattgcctcctgggagctacgggtggaggggaagctcctggatgatcccagcaaacagaagcggaagttctcttctttcttcaagagtttggtcatcgagctggacaaagatctttatggccctgacaaccacctcgttgagtggcatcggacacccacgacccaggagacggacggcttccaggtgaaacggcctggggacctgagtgtgcgctgcacgctgctcctcatgctggactaccagcctccccagttcaaactggatccccgcctagcccggctgctggggctgcacacacagagccgctcagccattgtccaggccctgtggcagtatgtgaagaccaacaggctgcaggactcccatgacaaggaatacatcaatggggacaagtatttccagcagatttttgattgtccccggctgaagttttctgagattccccagcgcctcacagccctgctattgccccctgacccaattgtcatcaaccatgtcatcagcgtggacccttcagaccagaagaagacggcgtgctatgacattgacgtggaggtggaggagccattaaaggggcagatgagcagcttcctcctatccacggccaaccagcaggagatcagtgctctggacagtaagatccatgagacgattgagtccataaaccagctcaagatccagagggacttcatgctaagcttctccagagaccccaaaggctatgtccaagacctgctccgctcccagagccgggacctcaaggtgatgacagatgtagccggcaaccctgaagaggagcgccgggctgagttctaccaccagccctggtcccaggaggccgtcagtcgctacttctactgcaagatccagcagcgcaggcaggagctggagcagtcgctggttgtgcgcaacacctaggagcccaaaaataagcagcacgacggaactttcagccgtgtcccgggccccagcattttgccccgggctccagcatcactcctctgccaccttggggtgtggggctggattaaaagtcattcatctg

SEQ ID NO: 134924 - DNA, 2018 bp, Artificial Sequence
  derived and/or modified sequence
gtgcgcgcccacgtgcatgcgcgtgtgtggtcctagtgtaggtgatgtctgcggccacacaggatgctgactgcgtgtgtgactcgtgggcgtgcagatgcaagcacaggcctacgacacatctgtgtacaggctgaagatcacaacgggtctggccagggcccgccgagggcctccgagctggcgagcacaccgacggctggatggggcgacgcttcctgctccggtccctaactcattattaagctcctcgctctttgcagacgctccctgcgcctcccccgctccgggctgcagcggcgcaggcgccgggccgagccgagcgccgagcagggagcgggcggccgcgctccgggccggggtcccgggggagcagatcctcagaatggcccttggtgctgcaggcgcggtgggctccgggcccaggcaccgagggggcactggatgactctccaggtgcaggaccctgccatctatgactccaggtcttcagcacccacccaccgtggtacagcgccccgggatgccgtctggagcccggatgccccaccagggggcgcccatgggccccccgggctccccgtacatgggcagccccgccgtgcgacccggcctggcccccgcgggcatggagcccgcccgcaagcgagcagcgcccccgcccgggcagagccaggcacagagccagggccagccggtgcccaccgcccccgcgcggagccgcagtgccaagaggaggaagatggctgacaaaatcctccctcaaaggattcgggagctggtccccgagtcccaggcttacatggacctcttggcatttgagaggaaactggatcaaaccatcatgcggaagcgggtggacatccaggaggctctgaagaggcccatgaagcaaaagcggaagctgcgactctatatctccaacacttttaaccctgcgaagcctgatgctgaggattccgacggcagcattgcctcctgggagctacgggtggaggggaagctcctggatgatcccagcaaacagaagcggaagttctcttctttcttcaagagtttggtcatcgagctggacaaagatctttatggccctgacaaccacctcgttgagtggcatcggacacccacgacccaggagacggacggcttccaggtgaaacggcctggggacctgagtgtgcgctgcacgctgctcctcatgctggactaccagcctccccagttcaaactggatccccgcctagcccggctgctggggctgcacacacagagccgctcagccattgtccaggccctgtggcagtatgtgaagaccaacaggctgcaggactcccatgacaaggaatacatcaatggggacaagtatttccagcagatttttgattgtccccggctgaagttttctgagattccccagcgcctcacagccctgctattgccccctgacccaattgtcatcaaccatgtcatcagcgtggacccttcagaccagaagaagacggcgtgctatgacattgacgtggaggtggaggagccattaaaggggcagatgagcagcttcctcctatccacggccaaccagcaggagatcagtgctctggacagtaagatccatgagacgattgagtccataaaccagctcaagatccagagggacttcatgctaagcttctccagagaccccaaaggctatgtccaagacctgctccgctcccagagccgggacctcaaggtgatgacagatgtagccggcaaccctgaagaggagcgccgggctgagttctaccaccagccctggtcccaggaggccgtcagtcgctacttctactgcaagatccagcagcgcaggcaggagctggagcagtcgctggttgtgcgcaacacctaggagcccaaaaataagcagcacgacggaactttcagccgtgtcccgggccccagcattttgccccgggctccagcatcactcctctgccaccttggggtgtggggctggattaaaagtcattcatctgaca

SEQ ID NO: 134925 - DNA, 613 bp, Artificial Sequence
  derived and/or modified sequence
aaatgcttggcaggctccctgcccgctggctgcttagggaggtgctcccacttcccccgccgttgcctgagctctctagggctccttcactctgcagatcctcagaatggcccttggtgctgcaggcgcggtgggctccgggcccaggcaccgagggggcactggatgactctccaggtgcaggaccctgccatctatgactccaggtcttcagcacccacccaccgtggtacagcgccccgggatgccgtctggagcccggatgccccaccagggggcgcccatgggccccccgggctccccgtacatgggcagccccgccgtgcgacccggcctggcccccgcgggcatggagcccgcccgcaagcgagcagcgcccccgcccgggcagagccaggcacagagccagggccagccggtgcccaccgcccccgcgcggagccgcagtgccaagaggaggaagatggctgacaaaatcctccctcaaaggattcgggagctggtccccgagtcccaggcttacatggacctcttggcatttgagaggaaactggatcaaaccatcatgcggaagcgggtggacatccaggaggctctgaagaggcccatgaag

SEQ ID NO: 134926 - protein, 177 aa, Artificial Sequence
  derived and/or modified sequence
  misc_feature (1)..(1): Xaa can be any naturally occurring amino acid
XMKHTATARFQRNHRLISEILSESVVPDVRSVVTTARMQVLKRQVQSLMVHQRKLEAELLQIEERHQEKKRKFLESTDSFNNELKRLCGLKVEVDMEKIAAEIAQAEEQARKRQEEREKEAAEQAERSQSSIVPEEEQAANKGEEKKDDENIPMETEKNCQLCPRKTLTSRYTDFPD

SEQ ID NO: 134927 - protein, 411 aa, Artificial Sequence
  derived and/or modified sequence
MSKRPSYAPPPTPAPATQMPSTPGFVGYNPYSHLAYNNYRLGGNPGTNSRVTASSGITIPKPPKPPDKPLMPYMRYSRKVWDQVKASNPDLKLWEIGKIIGGMWRDLTDEEKQEYLNEYEAEKIEYNESMKAYHNSPAYLAYINAKSRAEAALEEESRQRQSRMEKGEPYMSIQPAEDPDDYDDGFSMKHTATARFQRNHRLISEILSESVVPDVRSVVTTARMQVLKRQVQSLMVHQRKLEAELLQIEERHQEKKRKFLESTDSFNNELKRLCGLKVEVDMEKIAAEIAQAEEQARKRQEEREKEAAEQAERSQSSIVPEEEQAANKGEEKKDDENIPMETEETHLEETTESQQNGEEGTSTPEDKESGQEGVDSMAEEGTSDSNTGSESNSATVEEPPTDPIPEDEKKE

SEQ ID NO: 134928 - protein, 328 aa, Artificial Sequence
  derived and/or modified sequence
MSKRPSYAPPPTPAPATASSGITIPKPPKPPDKPLMPYMRYSRKVWDQVKASNPDLKLWEIGKIIGGMWRDLTDEEKQEYLNEYEAEKIEYNESMKAYHNSPAYLAYINAKSRAEAALEEESRQRQSRMEKGEPYMSIQPAEDPDDYDDGFSMKHTATARFQRNHRLISEILSESVVPDVRSVVTTARMQVLKRQVQSLMVHQRKLEAELLQIEERHQEKKRKFLESTDSFNNELKRLCGLKVEVDMEKIAAEIAQAEEQARKRQEEREKEAAEQAERSQSSIVPEEEQAANKGEEKKDDENIPMETEKNCQLCPRKTLTSRYTDFPD

SEQ ID NO: 134929 - protein, 189 aa, Artificial Sequence
  derived and/or modified sequence
  misc_feature (1)..(1): Xaa can be any naturally occurring amino acid
XAEDPDDYDDGFSMKHTATARFQRNHRLISEILSESVVPDVRSVVTTARMQVLKRQVQSLMVHQRKLEAELLQIEERHQEKKRKFLESTDSFNNELKRLCGLKVEVDMEKIAAEIAQAEEQARKRQEEREKEAAEQAERSQSSIVPEEEQAANKGEEKKDDENIPMETEKNCQLCPRKTLTSRYTDFPD

SEQ ID NO: 134930 - protein, 393 aa, Artificial Sequence
  derived and/or modified sequence
MPSTPGFVGYNPYSHLAYNNYRLGGNPGTNSRVTASSGITIPKPPKPPDKPLMPYMRYSRKVWDQVKASNPDLKLWEIGKIIGGMWRDLTDEEKQEYLNEYEAEKIEYNESMKAYHNSPAYLAYINAKSRAEAALEEESRQRQSRMEKGEPYMSIQPAEDPDDYDDGFSMKHTATARFQRNHRLISEILSESVVPDVRSVVTTARMQVLKRQVQSLMVHQRKLEAELLQIEERHQEKKRKFLESTDSFNNELKRLCGLKVEVDMEKIAAEIAQAEEQARKRQEEREKEAAEQAERSQSSIVPEEEQAANKGEEKKDDENIPMETEETHLEETTESQQNGEEGTSTPEDKESGQEGVDSMAEEGTSDSNTGSESNSATVEEPPTDPIPEDEKKE

SEQ ID NO: 134931 - protein, 157 aa, Artificial Sequence
  derived and/or modified sequence
LSESVVPDVRSVVTTARMQVLKRQVQSLMVHQRKLEAELLQIEERHQEKKRKFLESTDSFNNELKRLCGLKVEVDMEKIAAEIAQAEEQARKRQEEREKEAAEQAERSQSSIVPEEEQAANKGEEKKDDENIPMETEKNCQLCPRKTLTSRYTDFPD

SEQ ID NO: 134932 - protein, 341 aa, Artificial Sequence
  derived and/or modified sequence
MPYMRYSRKVWDQVKASNPDLKLWEIGKIIGGMWRDLTDEEKQEYLNEYEAEKIEYNESMKAYHNSPAYLAYINAKSRAEAALEEESRQRQSRMEKGEPYMSIQPAEDPDDYDDGFSMKHTATARFQRNHRLISEILSESVVPDVRSVVTTARMQVLKRQVQSLMVHQRKLEAELLQIEERHQEKKRKFLESTDSFNNELKRLCGLKVEVDMEKIAAEIAQAEEQARKRQEEREKEAAEQAERSQSSIVPEEEQAANKGEEKKDDENIPMETEETHLEETTESQQNGEEGTSTPEDKESGQEGVDSMAEEGTSDSNTGSESNSATVEEPPTDPIPEDEKKE

SEQ ID NO: 134933 - DNA, 2425 bp, Artificial Sequence
  derived and/or modified sequence
gctccggacgcgaggggcggggcgagcgcgggacaaagggaagcgaagccggagctgcgggcgctttttctgcccgcggtgtctcagattcattcttaaggaactgagaacttaatcttccaaaatgtcaaaaagaccatcttatgccccacctcccaccccagctcctgcaacacaaatgcccagcacaccagggtttgtgggatacaatccatacagtcatctcgcctacaacaactacaggctgggagggaacccgggcaccaacagccgggtcacggcatcctctggtatcacgattccaaaacccccaaagccaccagataagccgctgatgccctacatgaggtacagcagaaaggtctgggaccaagtaaaggcttccaaccctgacctaaagttgtgggagattggcaagattattggtggcatgtggcgagatctcactgatgaagaaaaacaagaatatttaaacgaatacgaagcagaaaagatagagtacaatgaatctatgaaggcctatcataattcccccgcgtaccttgcttacataaatgcaaaaagtcgtgcagaagctgctttagaggaagaaagtcgacagagacaatctcgcatggagaaaggagaaccgtacatgagcattcagcctgctgaagatccagatgattatgatgatggcttttcaatgaagcatacagccaccgcccgtttccagagaaaccaccgcctcatcagtgaaattcttagtgagagtgtggtgccagacgttcggtcagttgtcacaacagctagaatgcaggtcctcaaacggcaggtccagtccttaatggttcatcagcgaaaactagaagctgaacttcttcaaatagaggaacgacaccaggagaagaagaggaaattcctggaaagcacagattcatttaacaatgaacttaaaaggttgtgcggtctgaaagtagaagtggatatggagaaaattgcagctgagattgcacaggcagaggaacaggcccgcaaaaggcaggaggaaagggagaaggaggccgcagagcaagctgagcgcagtcagagcagcatcgttcctgaggaagaacaagcagctaacaaaggcgaggagaagaaagacgacgagaacattccgatggagacagaggagacacaccttgaagaaacaacagagagccaacagaatggtgaagaaggcacgtctactcctgaggacaaggagagtgggcaggagggggtcgacagtatggcagaggaaggaaccagtgatagtaacactggctcggagagcaacagtgcaacagtggaggagccaccaacagatcccataccagaagatgagaaaaaagaataagtgttgccttgttttgtgtgttctaaatactttttttaatgaaaaaatgttttttggttttaatggtgttacgtggtttgtgtattaattttttttcttgtccatatcacaccaccaaaggcttttggaccatttagcatcatgagcctaatggctcagtcagtcacctttcttaagtgttgtgaagatggctcttttctttggatcttgtttctagccctcaactgctgaaagcctcagaatttagattaattgagaaaacacccacctcttttagagaattatcctttgatgctgcagaatctactcttacaatgccttcctacagctcactggggtgcttaccaaagccatagctttaaaccttcccagtccccatcagtagcttcctgaaagtctcctctcttgtttacttctgcaaagggtagcttcttaaaaacgtgatcatgtatgagtatgtatttgttcacttacccttttttacttttaatcaatgtcagataccaagagttgtgttaagctgagtgtagtgtgtaactaactacacttggatcttactgatccagaaatagtccccatagttagagtagttacttatgaagtggttattaaagtgaacacagcacatatacattatctatactgctttttgttatgattaatactgggtatgttctggtaaatccatccttattgtatagaaaaaaaattacttttttaccaggttttccaaagacagaatagatcacaaagctcaaggaatttaatattcttgtaatggactagataattcaaactgattagcccattccagaagaaaaacagctgggaattaagttaatccacttgaaattgttttacaataatcagaacatccaaacctcaaggctcaggatcccatagaccagagcccacctttttgataaacttagtaaagtcttggagactagaagcaagatagtttgtgacacataagcttcccaaaaactagaatagatttttactgaatagtggtatatctgatggtatatgtttcttaaaggtccaaatgtaataaaaaaaaaa

SEQ ID NO: 134934 - DNA, 534 bp, Artificial Sequence
  derived and/or modified sequence
tgaatgaagcacactgcaacagcacggttccagaggaaccatcgactaatatctgaaatcctttccgaaagtgtggtgcccgacgtgcggtctgtggttacaacagcgcggatgcaggttctgaaaagacaagtccaaagcttgatggttcaccagagaaagctggaagccgagttgctgcaaatcgaggagcgacatcaggagaagaagagaaagtttttagaatcaaccgactcctttaacaatgagttgaagcggctttgtggactgaaggtcgaggtggacatggaaaaaattgccgccgaaattgcacaagccgaggaacaggcccgcaaacgccaggaagagcgcgaaaaagaagctgccgagcaagctgagagatcacaaagctcgatagtgcccgaagaggagcaggccgctaacaagggcgaggaaaaaaaggacgacgagaatattcctatggagacagagaaaaattgccagctctgcccaaggaaaacgctcacctctagatataccgactttcccgactag

SEQ ID NO: 134935 - DNA, 1236 bp, Artificial Sequence
  derived and/or modified sequence
atgtcaaagcgcccttcttatgccccacctcccacccccgctcctgccactcagatgccgtctacaccgggattcgtcggatataatccgtacagccacctagcatataataattatcggcttggcggcaaccctgggacgaactctcgggtaaccgcatcttcgggtattaccatcccgaagccccccaagccccccgataagccactgatgccttacatgaggtatagtaggaaagtatgggatcaggttaaggccagcaacccagatttgaagctgtgggaaatcggaaaaatcatcggtggaatgtggagagacctcaccgacgaggaaaagcaggaatacctgaatgagtacgaggcagagaaaatcgagtacaacgagtccatgaaagcctaccacaattcaccagcctatctagcctacatcaacgccaagtccagagcagaagctgcccttgaagaggaatccagacaacggcagtctcgcatggagaagggggagccctatatgtctatccagcctgcggaagaccctgacgattatgacgacggcttcagcatgaaacatactgccactgcaaggttccagcgcaaccatcgcttaatctccgagattctgagtgaatccgtcgtgcctgatgtcaggtccgtggtgactacagcacgcatgcaagtactcaagcgacaagtgcaatcgctcatggttcaccagagaaagctagaggccgagttgcttcagattgaggaacggcaccaggagaagaagcgtaaatttctggaaagcaccgattcatttaataacgagttaaaacgactttgcgggcttaaggtggaggtggatatggaaaagattgcggccgagatcgcccaggctgaggagcaggcacggaagaggcaagaagagagggagaaagaggccgcagaacaagccgaacgttcccagagctctatcgtccccgaggaggagcaggctgcaaataagggcgaggagaagaaagatgacgaaaacatacccatggagacggaagaaacacatttggaagaaaccaccgagtctcaacagaacggagaggaaggcacttctaccccagaggacaaagagtccggtcaggagggcgttgattcgatggccgaagaggggacttctgatagcaacaccggctccgagtcaaatagtgccacagtagaggagcctcctaccgatccaattcctgaggatgagaagaaggagtag

SEQ ID NO: 134936 - DNA, 987 bp, Artificial Sequence
  derived and/or modified sequence
atgtcgaaacgcccaagctacgctccaccccctacccccgctcctgctacagcttctagcggcataactatccccaagccacccaaaccacctgataagcccctgatgccatacatgaggtacagtcgcaaggtttgggaccaagtgaaggctagcaaccctgatttgaaactgtgggaaattggtaagatcatcggaggtatgtggcgagacctgacagatgaggagaaacaagagtacctcaacgagtacgaggctgaaaagatagagtataacgagagcatgaaggcataccacaattcccctgcctacctcgcttacattaatgccaagtctagagccgaggcagcactcgaggaagagagtcgtcaacgtcagtcccgcatggaaaaaggagaaccttatatgtccattcagcctgccgaggatcctgatgattacgatgatggattttctatgaagcacactgctaccgctcgatttcagagaaaccatcgcctgatttcggagattcttagtgagagcgttgtgccagatgtcagatcagtggtgactaccgcacggatgcaggtccttaaacgccaggtgcagtctctaatggtgcatcaacggaagctggaagctgaactccttcaaatagaagaacgccatcaggagaaaaagagaaagtttctggaaagtaccgactcatttaataacgagctgaagagactgtgcggtctcaaagtcgaagttgacatggaaaagatcgctgcagagatcgcccaggccgaggagcaagcccggaagcggcaggaggagcgcgaaaaagaagccgccgagcaagccgagagatcccagtctagcattgtgcccgaagaggaacaggccgcaaacaagggggaggagaagaaggacgatgagaacattcctatggaaactgaaaaaaattgtcagctgtgccctcgtaagaccctcacctccagatatacggacttcccagactag

SEQ ID NO: 134937 - DNA, 570 bp, Artificial Sequence
  derived and/or modified sequence
tgagccgaggaccctgatgactatgatgacggcttcagcatgaagcacaccgctacagcgcgattccagcgcaatcatcgccttatcagcgagatcctttccgagtcggtcgttcccgatgtcaggagtgtagtaactacagcccggatgcaagtgctgaagaggcaggtacagtccctgatggtacaccagcggaagttagaggctgagctccttcagatcgaggagcgccaccaggagaagaagaggaaatttctggaaagcacagactcttttaacaatgagttaaagcggctatgcggactgaaggtggaggttgacatggagaagatagcagccgagattgcccaggccgaagagcaagccaggaagagacaggaggagcgcgagaaggaggctgcagagcaggcagagaggagccagtccagtatagtgccagaggaggaacaggccgccaataaaggagaggaaaagaaggatgatgagaatattccaatggagacggagaagaactgccagctctgcccaaggaagacactgacatccaggtacactgatttcccagactag

SEQ ID NO: 134938 - DNA, 1182 bp, Artificial Sequence
  derived and/or modified sequence
atgcccagcacccctggctttgtcggctacaatccatactcccatttggcttacaacaactacaggctgggaggcaaccccgggacgaatagcagggtgaccgcaagtagtggaatcaccatccccaagccccccaagccacctgacaagccgctgatgccatatatgaggtactctcgtaaagtatgggaccaagtcaaggcatcaaatcctgacctcaagctgtgggaaatcggaaagatcatcggaggcatgtggcgcgatcttaccgatgaagaaaagcaggaatacctcaatgaatacgaggcggaaaaaatcgagtataatgagtccatgaaggcgtaccacaactctccagcatatctcgcctatattaatgccaaatcacgggctgaggctgctctggaggaggagagccggcaaagacagagtaggatggagaagggcgagccatatatgtctattcaacctgccgaagacccagatgactacgacgacggctttagtatgaaacataccgccacggcgaggttccagcggaaccatcggcttatttccgagattttatcagagagcgtggttcccgatgtcaggtctgtggtgacaacagcaaggatgcaggtcttgaaacgccaagtgcagagcctgatggtgcatcagaggaagttggaggccgagttacttcagattgaggagagacaccaagagaagaaacgtaagttcctggagtcaactgattcctttaataatgaactgaagaggctgtgcgggctgaaggtggaggtggacatggaaaagatagccgcagagatagctcaggcagaagaacaagcacggaaacggcaagaagaacgcgaaaaggaagctgcagagcaggcagagcgttctcagtcgtcaatcgtgcctgaagaggagcaagccgccaacaaaggcgaggagaagaaggacgatgagaatatccctatggaaacagaagagacgcatctggaagaaaccactgagagccaacagaatggcgaagaaggaactagtacccctgaagacaaagagagcgggcaagagggtgtggactctatggcggaggaaggcacttcggattccaacaccggctcggagagtaactcagcaacagttgaggagccaccaacagaccccataccggaggacgaaaagaaggaatag

SEQ ID NO: 134939 - DNA, 474 bp, Artificial Sequence
  derived and/or modified sequence
ctctcagagtcagtcgtgcccgacgtcaggtccgtggtaactaccgccagaatgcaagttctcaagcggcaggtgcagtctctgatggtccatcagagaaagctcgaggcagagctcctccagatcgaggagaggcatcaggaaaaaaaacgaaaatttctggagagtacagactcattcaataacgaactcaagcgcctatgtggactgaaagtggaggtggacatggaaaagatagccgccgaaatcgcgcaggcggaagagcaggccaggaaaaggcaggaagaacgcgaaaaggaggcagccgagcaggcggagcgatcccagtcatccatcgtaccggaagaggagcaggctgcgaataaaggcgaagaaaaaaaggacgatgagaacattcctatggagactgaaaagaactgtcagctgtgtcctcgcaagacgctgacttcacgttacacggacttcccggattag

SEQ ID NO: 134940 - DNA, 1026 bp, Artificial Sequence
  derived and/or modified sequence
atgccctatatgagatattctagaaaagtttgggaccaagtgaaagccagtaacccagatcttaaactgtgggaaattggcaagattataggtggcatgtggcgtgacttgaccgacgaggaaaagcaggaatatttgaatgaatatgaggcggaaaagattgagtacaacgaatcgatgaaagcctatcacaacagccccgcatatctcgcttacatcaatgccaagtcaagggccgaggccgccctggaagaagagagccggcagaggcaatcacgtatggagaagggcgagccatacatgtcaatacaacccgccgaagatccagatgattacgacgatggcttctccatgaagcacaccgcaacggcaaggttccagcgcaaccatagactgatttccgaaatactcagcgagtctgtggtgccagacgtgcggagcgttgttacaacagcaaggatgcaggtcttgaaacggcaggtgcagagtctaatggtccaccaacgcaaactggaggcggagctattgcagatcgaagaacggcaccaggaaaaaaaacgcaagttcctggagtcaaccgacagctttaataatgagcttaagaggttgtgtggactcaaggtggaagttgacatggaaaaaattgccgcagagatagcccaggcggaagaacaggcgagaaaacgacaagaagaaagggagaaggaggccgcggagcaagccgagcgcagccagtcatctatcgtaccagaggaggagcaggctgccaacaagggagaggaaaagaaagatgatgaaaacatccccatggaaacggaagagacacatctggaagagaccacggagtcgcagcagaacggagaggagggcacatccacccccgaggataaggaatctggacaggagggagttgacagcatggctgaagaggggacaagcgactcaaacaccggaagcgaaagcaacagcgctaccgtcgaggagccaccgacagaccctatccctgaagatgagaagaaagaatag

SEQ ID NO: 134941 - DNA, 534 bp, Artificial Sequence
  derived and/or modified sequence
tgaatgaagcacacagccacagcccgcttccagaggaaccacaggctcatcagcgagatcctgtctgagagcgtggtgcctgatgtgcgctctgtggtgaccacagccaggatgcaggtgctgaagaggcaggtgcagagcctgatggtgcaccagaggaagctggaggccgagctgctgcagatcgaggagcggcaccaggagaagaagaggaagttcctggagagcacagacagcttcaacaatgagctgaagaggctgtgtggcctgaaggtggaggtggacatggagaagattgctgctgagatcgcccaggccgaggagcaggccaggaagaggcaggaggagcgggagaaggaggccgctgagcaggccgagaggagccagagcagcatcgtgcctgaggaggagcaggccgccaacaagggggaggagaagaaggatgatgagaacatccccatggagacagagaagaactgccagctgtgccccaggaagaccctgaccagccgctacacagacttcccagactag

SEQ ID NO: 134942 - DNA, 1236 bp, Artificial Sequence
  derived and/or modified sequence
atgagcaagaggcccagctatgcccccccacccaccccagccccagccacccagatgcccagcaccccaggctttgtgggctacaacccctacagccacctggcctacaacaactaccgcctgggcggcaaccctggcaccaacagccgggtgacagccagcagcggcatcaccatccccaagccacccaagcccccagacaagcccctgatgccctacatgagatacagcaggaaggtgtgggaccaggtgaaggccagcaacccagacctgaagctgtgggagatcggcaagatcatcggcggcatgtggagggacctgacagatgaggagaagcaggagtacctgaatgaatatgaagctgagaagattgagtacaatgaatccatgaaggcctaccacaacagccctgcctacctggcctacatcaatgccaagagcagagctgaggccgccctggaggaggagagccggcagaggcagagcaggatggagaagggggagccctacatgagcatccagcctgcagaagatcctgatgattatgatgatggcttctccatgaagcacacagccacagcccgcttccagaggaaccacaggctcatcagcgagatcctgtctgagagcgtggtgcctgatgtgcgctctgtggtgaccacagccaggatgcaggtgctgaagaggcaggtgcagagcctgatggtgcaccagaggaagctggaggccgagctgctgcagatcgaggagcggcaccaggagaagaagaggaagttcctggagagcacagacagcttcaacaatgagctgaagaggctgtgtggcctgaaggtggaggtggacatggagaagattgctgctgagatcgcccaggccgaggagcaggccaggaagaggcaggaggagcgggagaaggaggccgctgagcaggccgagaggagccagagcagcatcgtgcctgaggaggagcaggccgccaacaagggggaggagaagaaggatgatgagaacatccccatggagacagaggagacccacctggaggagaccacagagagccagcagaatggagaggagggcaccagcaccccagaggacaaggagagcggccaggagggcgtggacagcatggccgaggagggcaccagtgacagcaacacaggcagcgagagcaacagcgccaccgtggaggagcccccaacagaccccatcccagaagatgagaagaaggagtag

SEQ ID NO: 134943 - DNA, 987 bp, Artificial Sequence
  derived and/or modified sequence
atgagcaagaggcccagctatgcccccccacccaccccagccccagccacagccagcagcggcatcaccatccccaagccacccaagcccccagacaagcccctgatgccctacatgagatacagcaggaaggtgtgggaccaggtgaaggccagcaacccagacctgaagctgtgggagatcggcaagatcattggaggcatgtggagggacctgacagatgaggagaagcaggagtacctgaatgaatatgaggccgagaagattgagtacaatgaatccatgaaggcctaccacaacagccctgcctacctggcctacatcaatgccaagagcagagctgaggccgccctggaggaggagagccggcagaggcagagcaggatggagaagggggagccctacatgagcatccagcctgctgaggaccctgatgattatgatgatggcttctccatgaagcacacagccacagcccgcttccagaggaaccacaggctcatcagcgagatcctgtctgagagcgtggtgcctgatgtgcgctctgtggtgaccacagccaggatgcaggtgctgaagaggcaggtgcagagcctgatggtgcaccagaggaagctggaggccgagctgctgcagatcgaggagcggcaccaggagaagaagaggaagttcctggagagcacagacagcttcaacaatgagctgaagaggctgtgtggcctgaaggtggaggtggacatggagaagattgctgctgagatcgcccaggccgaggagcaggccaggaagaggcaggaggagcgggagaaggaggccgctgagcaggccgagaggagccagagcagcatcgtgcctgaggaggagcaggccgccaacaagggggaggagaagaaggatgatgagaacatccccatggagacagagaagaactgccagctgtgccccaggaagaccctgaccagccgctacacagacttcccagactag

SEQ ID NO: 134944 - DNA, 570 bp, Artificial Sequence
  derived and/or modified sequence
tgagcagaagatcctgatgattatgatgatggcttctccatgaagcacacagccacagcccgcttccagaggaaccacaggctcatcagcgagatcctgtctgagagcgtggtgcctgatgtgcgctctgtggtgaccacagccaggatgcaggtgctgaagaggcaggtgcagagcctgatggtgcaccagaggaagctggaggccgagctgctgcagatcgaggagcggcaccaggagaagaagaggaagttcctggagagcacagacagcttcaacaatgagctgaagaggctgtgtggcctgaaggtggaggtggacatggagaagattgctgctgagatcgcccaggccgaggagcaggccaggaagaggcaggaggagcgggagaaggaggccgctgagcaggccgagaggagccagagcagcatcgtgcctgaggaggagcaggccgccaacaagggggaggagaagaaggatgatgagaacatccccatggagacagagaagaactgccagctgtgccccaggaagaccctgaccagccgctacacagacttcccagactag

SEQ ID NO: 134945 - DNA, 1182 bp, Artificial Sequence
  derived and/or modified sequence
atgcccagcaccccaggctttgtgggctacaacccctacagccacctggcctacaacaactaccgcctgggcggcaaccctggcaccaacagccgggtgacagccagcagcggcatcaccatccccaagccacccaagcccccagacaagcccctgatgccctacatgagatacagcaggaaggtgtgggaccaggtgaaggccagcaacccagacctgaagctgtgggagatcggcaagatcatcggcggcatgtggagggacctgacagatgaggagaagcaggagtacctgaatgaatatgaagctgagaagattgagtacaatgaatccatgaaggcctaccacaacagccctgcctacctggcctacatcaatgccaagagcagagctgaggccgccctggaggaggagagccggcagaggcagagcaggatggagaagggggagccctacatgagcatccagcctgcagaagatcctgatgattatgatgatggcttctccatgaagcacacagccacagcccgcttccagaggaaccacaggctcatcagcgagatcctgtctgagagcgtggtgcctgatgtgcgctctgtggtgaccacagccaggatgcaggtgctgaagaggcaggtgcagagcctgatggtgcaccagaggaagctggaggccgagctgctgcagatcgaggagcggcaccaggagaagaagaggaagttcctggagagcacagacagcttcaacaatgagctgaagaggctgtgtggcctgaaggtggaggtggacatggagaagattgctgctgagatcgcccaggccgaggagcaggccaggaagaggcaggaggagcgggagaaggaggccgctgagcaggccgagaggagccagagcagcatcgtgcctgaggaggagcaggccgccaacaagggggaggagaagaaggatgatgagaacatccccatggagacagaggagacccacctggaggagaccacagagagccagcagaatggagaggagggcaccagcaccccagaggacaaggagagcggccaggagggcgtggacagcatggccgaggagggcaccagtgacagcaacacaggcagcgagagcaacagcgccaccgtggaggagcccccaacagaccccatcccagaagatgagaagaaggagtag

SEQ ID NO: 134946 - DNA, 474 bp, Artificial Sequence
  derived and/or modified sequence
ctgtctgagagcgtggtgcctgatgtgcgctctgtggtgaccacagccaggatgcaggtgctgaagaggcaggtgcagagcctgatggtgcaccagaggaagctggaggccgagctgctgcagatcgaggagcggcaccaggagaagaagaggaagttcctggagagcacagacagcttcaacaatgagctgaagaggctgtgtggcctgaaggtggaggtggacatggagaagattgctgctgagatcgcccaggccgaggagcaggccaggaagaggcaggaggagcgggagaaggaggccgctgagcaggccgagaggagccagagcagcatcgtgcctgaggaggagcaggccgccaacaagggggaggagaagaaggatgatgagaacatccccatggagacagagaagaactgccagctgtgccccaggaagaccctgaccagccgctacacagacttcccagactag

SEQ ID NO: 134947 - DNA, 1026 bp, Artificial Sequence
  derived and/or modified sequence
atgccctacatgagatacagcaggaaggtgtgggaccaggtgaaggccagcaacccagacctgaagctgtgggagatcggcaagatcatcggcggcatgtggagggacctgacagatgaggagaagcaggagtacctgaatgaatatgaagctgagaagattgagtacaatgaatccatgaaggcctaccacaacagccctgcctacctggcctacatcaatgccaagagcagagctgaggccgccctggaggaggagagccggcagaggcagagcaggatggagaagggggagccctacatgagcatccagcctgcagaagatcctgatgattatgatgatggcttctccatgaagcacacagccacagcccgcttccagaggaaccacaggctcatcagcgagatcctgtctgagagcgtggtgcctgatgtgcgctctgtggtgaccacagccaggatgcaggtgctgaagaggcaggtgcagagcctgatggtgcaccagaggaagctggaggccgagctgctgcagatcgaggagcggcaccaggagaagaagaggaagttcctggagagcacagacagcttcaacaatgagctgaagaggctgtgtggcctgaaggtggaggtggacatggagaagattgctgctgagatcgcccaggccgaggagcaggccaggaagaggcaggaggagcgggagaaggaggccgctgagcaggccgagaggagccagagcagcatcgtgcctgaggaggagcaggccgccaacaagggggaggagaagaaggatgatgagaacatccccatggagacagaggagacccacctggaggagaccacagagagccagcagaatggagaggagggcaccagcaccccagaggacaaggagagcggccaggagggcgtggacagcatggccgaggagggcaccagtgacagcaacacaggcagcgagagcaacagcgccaccgtggaggagcccccaacagaccccatcccagaagatgagaagaaggagtag

SEQ ID NO: 134948 - DNA, 534 bp, Artificial Sequence
  derived and/or modified sequence
tgaatgaagcacaccgccaccgcccggttccagcggaaccaccggctgatctcagagatactgagcgaatctgtggtgcctgacgtaagaagtgtggtgacaaccgccagaatgcaggtgcttaagcgtcaggtccaatctctaatggtccaccagcgcaagttggaagccgaattactgcagatcgaagagaggcaccaggagaaaaaaaggaaattcctcgaaagtacggactcgttcaataacgagctaaaacgcctctgcggcctcaaggtagaagtggatatggaaaagattgctgcagagatcgcccaggcagaggagcaggctagaaaacgacaggaggaacgtgagaaggaggccgcagaacaagcagagcgtagccaaagtagtatcgtgcccgaggaagagcaggctgctaacaagggagaggagaaaaaggacgatgagaacattcccatggagacagaaaagaactgtcagctgtgtccccgaaaaacactcacctcccgctacacagactttcctgactag

SEQ ID NO: 134949 - DNA, 1236 bp, Artificial Sequence
  derived and/or modified sequence
atgagcaagcggcccagctacgcccccccccccacccccgcccccgcaacacagatgccctcaacccccgggtttgtgggttataacccttattctcacctggcatacaacaattatcgattgggaggtaaccccggaacaaattctcgcgttacggcctcttccggcattacaatacccaaaccacccaaaccccctgataagcccttgatgccatacatgcgatactccagaaaggtgtgggaccaagtgaaggcctccaaccctgatctgaagttgtgggaaattggtaagatcattggcggcatgtggcgggacctgaccgacgaggaaaaacaggagtacctgaatgagtacgaagcggaaaagattgaatacaacgaatcaatgaaggcttaccataactctcctgcatatctcgcatacatcaatgccaagtcccgcgcggaggctgccctagaggaagagtcccggcagcgccagagccgaatggaaaagggtgaaccctatatgagcatccagccagccgaagacccagacgactatgacgatggattctctatgaaacataccgctacggcccgttttcagagaaatcatagacttatcagcgagatcttgagtgagtccgttgtcccagatgtccgctccgtggtgaccacagctcgcatgcaggtgcttaagagacaggtgcaatccctaatggtgcaccaacggaagctcgaagcagaactgctgcaaatcgaagagcggcatcaggagaaaaaacggaagttcctggaatccacagactcctttaacaacgagctgaagcgcctgtgtgggctgaaagtggaggttgacatggaaaaaatcgcagcagaaattgcccaggccgaggagcaggctaggaaacgccaagaagagcgcgagaaagaagccgctgaacaggcagagaggtcgcagtcttccattgtgccagaggaagaacaggcagcaaataagggagaggaaaagaaggatgacgaaaacatcccaatggaaacagaagagactcatctggaggagactactgaatcacagcagaacggcgaggagggaacatccaccccagaggacaaagagagtggtcaagagggtgtggactccatggcagaggagggaacaagtgactctaacacagggtcagaaagcaacagtgccaccgtggaggagccacctactgaccctatcccggaggatgaaaagaaggaatag

SEQ ID NO: 134950 - DNA, 987 bp, Artificial Sequence
  derived and/or modified sequence
atgagcaagcggcccagctacgcccccccccccacccccgcccccgctaccgcatctagcggcataaccattcccaagcccccgaaacccccagacaaaccactcatgccctatatgaggtattcacggaaagtctgggatcaggtaaaggcttcgaatccagacttaaaattgtgggagattggtaagattattggaggcatgtggcgcgacctgacagacgaggaaaagcaggaatacctgaacgaatatgaggccgaaaagatcgagtataatgagagcatgaaggcataccataatagcccagcatacttagcatacattaatgccaagtcccgagccgaggcggcccttgaggaggagtctagacaaagacaaagcagaatggagaaaggagaaccatacatgtctatacagcccgctgaggatcccgacgattatgacgatggattctcaatgaagcacaccgctaccgctcgcttccaacgaaatcataggttgattagcgaaatactgtcagagtcagttgtcccagatgtcagaagcgtagtgactacagccagaatgcaggtgcttaaacggcaggtacagtctctcatggtccaccagagaaaactcgaagccgagcttttgcagattgaagagcgacaccaggagaagaagcgaaagtttcttgaatccacagacagcttcaacaacgaactgaagcgactgtgcgggctgaaagtcgaagtggacatggagaaaatagccgccgaaatcgcccaggccgaggagcaggcccgcaagcgccaggaagagcgggaaaaagaggccgccgaacaggccgagaggtcacagtcgtcaatcgtccctgaggaagagcaagcagccaataagggcgaagagaagaaagacgatgaaaacatccccatggaaaccgagaagaattgtcagctttgcccgcgaaagacacttacttccagatacacagactttcctgactag

SEQ ID NO: 134951 - DNA, 570 bp, Artificial Sequence
  derived and/or modified sequence
tgagccgaggaccccgacgactacgacgacggcttcagcatgaagcacacagccacggcgaggttccagcgaaatcacaggttgatcagcgaaatcctgagtgaatccgtggttcccgatgtgcggtctgtggtgacaacggccaggatgcaggtgttgaagcgccaggtgcagtctctgatggtccaccagaggaaacttgaagcagagctgttgcaaatcgaggaacgtcaccaagaaaaaaagcgtaagttcttggaaagtacagattcattcaataacgagctgaagcgcctgtgcggtctgaaagtcgaagttgatatggaaaaaattgcagctgaaatcgcgcaagcagaggagcaggctcggaagcgccaggaagagcgcgagaaggaagcagcagagcaggccgagcgctctcagtctagtatcgtcccggaagaggaacaggcagcaaacaaaggagaggaaaagaaggatgacgaaaacatcccaatggaaaccgagaagaattgtcagctttgtccacggaagactctcaccagtcgatatacagatttcccagactag

SEQ ID NO: 134952 - DNA, 1182 bp, Artificial Sequence
  derived and/or modified sequence
atgcccagcacccccggcttcgtgggctacaacccctacagccacttggcatacaataactaccggctgggaggaaaccctggaacaaatagccgggtcaccgcttcgagcggtatcactatccctaaaccaccaaagccacccgataagcccctgatgccctacatgaggtattcccgtaaggtttgggaccaagtgaaagcctctaaccccgatctgaagttatgggaaatcgggaagatcatcggcggcatgtggagagacctgactgatgaggaaaagcaggagtatctcaacgaatacgaagctgaaaaaatcgagtataacgagtccatgaaagcataccacaattcgccagcctacttagcttacattaatgctaagtctcgggccgaagctgccttggaagaggagtctcggcagcggcagagtcggatggagaagggagaaccctatatgagcatacagcccgctgaagatcccgacgattacgatgatggcttttcaatgaagcacactgctacggctagattccagcgtaatcatagactcatctcagagatcctcagcgaatccgtggtgcccgacgttagatcagtcgttaccactgcgcgaatgcaggtgctgaaacgacaagtgcagtcccttatggtccaccagagaaagttggaagcggagcttctgcagatcgaagagcggcaccaggagaagaaacggaagttcctcgagtcaacagactcatttaataacgaattaaaaagactgtgcggcctgaaggttgaagtggacatggagaaaattgccgccgaaatcgcccaggcagaagagcaggctaggaagcgccaggaggaaagggagaaagaggctgcagagcaggctgaaaggtcacaatcttctatcgttccagaggaggagcaggcagccaataaaggggaggaaaagaaggatgatgaaaatatcccaatggagaccgaagagacacatctcgaggaaacaacagaaagccagcagaatggcgaggaaggcacttcaacccctgaggataaagagagcggccaggagggggtcgattccatggcggaagagggaaccagcgatagtaataccggttcagaatcaaattccgctacggtggaagaacccccaaccgaccctattccggaggatgagaagaaggaatag

SEQ ID NO: 134953 - DNA, 474 bp, Artificial Sequence
  derived and/or modified sequence
ctgagcgagagcgtggtgcccgacgtgcggagcgtggtgaccaccgcgcggatgcaagtcttgaaacgccaagtccagagtttgatggtccaccagcgcaagctggaagccgaactcctgcagatcgaggaacggcaccaggagaaaaagaggaaatttcttgagtccactgattcattcaataacgagctgaaacgcctatgtggcctaaaggtagaggtcgacatggagaaaatcgctgcagagatcgcccaagctgaggaacaggcacggaaacgtcaggaggagagagagaaagaggctgctgagcaggcggaacggtcccaatctagtatcgtgcccgaggaggagcaggccgccaataagggagaggagaaaaaagacgacgagaacattccaatggagactgagaagaactgccagttatgtccacggaagacattgacctcgcgctataccgacttccctgactag

SEQ ID NO: 134954 - DNA, 1026 bp, Artificial Sequence
  derived and/or modified sequence
atgccctacatgcggtacagccggaaggtgtgggaccaggtgaaggctagtaatcctgatctgaagctgtgggagattggaaagataatcggtggcatgtggcgcgacctgactgacgaagagaagcaagagtacctcaacgaatacgaggcagagaagatagagtacaatgaaagcatgaaggcataccacaacagtccggcctatctggcttatatcaacgccaagtcccgggccgaggctgctctggaggaggagagtaggcagcgccagagtcgcatggagaaaggagagccgtacatgtcaattcagccggcggaggatcctgatgactatgacgatggattcagcatgaagcacactgccaccgccaggttccaacgtaatcatagactgatcagcgaaattttatctgagagcgtcgtgcccgatgtacggagcgtggtgaccaccgcaagaatgcaggtcttgaaacggcaggtgcagagcctgatggtgcatcagagaaagctcgaggccgaactcctgcaaatcgaagaacgccatcaggaaaaaaagagaaaattccttgagagcacagactccttcaataatgagctcaagcggctgtgcggcctgaaagttgaagtggacatggagaagattgccgctgagatcgctcaggctgaggagcaggcaagaaaacgccaagaggagagggagaaggaggcagccgaacaggctgagcggtcccagtcctcgattgtcccagaggaggagcaggctgctaataagggtgaggaaaagaaagacgacgagaatatacctatggagaccgaagaaacacacttggaagagaccacagagagccagcagaatggagaggagggtacatcaacaccagaggacaaggagtcaggacaggagggcgtggacagcatggccgaggaaggaacatcagacagcaatacagggagtgagagtaattctgcaactgttgaggagccccctacagacccaatccccgaagacgagaaaaaagaatag

SEQ ID NO: 134955 - DNA, 631 bp, Artificial Sequence
  derived and/or modified sequence
aatgaagcatacagccaccgcccgtttccagagaaaccaccgcctcatcagtgaaattcttagtgagagtgtggtgccagacgttcggtcagttgtcacaacagctagaatgcaggtcctcaaacggcaggtccagtccttaatggttcatcagcgaaaactagaagctgaacttcttcaaatagaggaacgacaccaggagaagaagaggaaattcctggaaagcacagattcatttaacaatgaacttaaaaggttgtgcggtctgaaagtagaagtggatatggagaaaattgcagctgagattgcacaggcagaggaacaggcccgcaaaaggcaggaggaaagggagaaggaggccgcagagcaagctgagcgcagtcagagcagcatcgttcctgaggaagaacaagcagctaacaaaggcgaggagaagaaagacgacgagaacattccgatggagacagaaaaaaattgccagctctgtcctagaaaaacccttacttctaggtatactgattttcctgattaaaagcatccctcaaggaaacagcccagcatgactttaaacaaagtgtctaaaagaccaaccttatattatttctacaactgctttctcctcgtttaatcc

SEQ ID NO: 134956 - DNA, 5840 bp, Artificial Sequence
  derived and/or modified sequence
tggcttagaaacctgggacgattacaccctaaaagcgcttggaaaaactgcagaactcgtgctgattttcgccaaagctactcccccgccgtgagggcaggaagccctgcgaggcgcctgcgaggacgcaaacgccgcgaagcaagtcctccacgcctccatcccaggtttagtgaagtgtagactctgacccacagcctaaaggaaagcaagaccggagtcggggagggcccctccaggagcgggctcagcgggagtctggccgaactgcttgctgccacagtggttccgcggcctcgcgctgagcgccatccgccgtctcccaccgcggcccccaccgcccctccgcaaggctcggcacctcccgccacttcctcggtcgctgcggcggctccggctcctcacagccgctaaacccaggcctattctgtgttaggtcgggcctcctcggccctcttcgccgtgacgaatcagcgcccggctgggaaagtatcaaaattcggggagttttgaggatccaatgggtcctgaaaaaaatccctgagtgtgctaagcatcaccgcatcttcactagaaggttagtttttctaaagagggtcgggtggggcccggaaaaaaaaaaaaattaagaagagtgtggaaagtgcgagtgcggaagctccggacgcgaggggcggggcgagcgcgggacaaagggaagcgaagccggagctgcgggcgctttttctgcccgcggtgtctcagattcattcttaaggaactgagaacttaatcttccaaaatgtcaaaaagaccatcttatgccccacctcccaccccagctcctgcaacacaaatgcccagcacaccagggtttgtgggatacaatccatacagtcatctcgcctacaacaactacaggctgggagggaacccgggcaccaacagccgggtcacggcatcctctggtatcacgattccaaaacccccaaagccaccagataagccgctgatgccctacatgaggtacagcagaaaggtctgggaccaagtaaaggcttccaaccctgacctaaagttgtgggagattggcaagattattggtggcatgtggcgagatctcactgatgaagaaaaacaagaatatttaaacgaatacgaagcagaaaagatagagtacaatgaatctatgaaggcctatcataattcccccgcgtaccttgcttacataaatgcaaaaagtcgtgcagaagctgctttagaggaagaaagtcgacagagacaatctcgcatggagaaaggagaaccgtacatgagcattcagcctgctgaagatccagatgattatgatgatggcttttcaatgaagcatacagccaccgcccgtttccagagaaaccaccgcctcatcagtgaaattcttagtgagagtgtggtgccagacgttcggtcagttgtcacaacagctagaatgcaggtcctcaaacggcaggtccagtccttaatggttcatcagcgaaaactagaagctgaacttcttcaaatagaggaacgacaccaggagaagaagaggaaattcctggaaagcacagattcatttaacaatgaacttaaaaggttgtgcggtctgaaagtagaagtggatatggagaaaattgcagctgagattgcacaggcagaggaacaggcccgcaaaaggcaggaggaaagggagaaggaggccgcagagcaagctgagcgcagtcagagcagcatcgttcctgaggaagaacaagcagctaacaaaggcgaggagaagaaagacgacgagaacattccgatggagacagaggagacacaccttgaagaaacaacagagagccaacagaatggtgaagaaggcacgtctactcctgaggacaaggagagtgggcaggagggggtcgacagtatggcagaggaaggaaccagtgatagtaacactggctcggagagcaacagtgcaacagtggaggagccaccaacagatcccataccagaagatgagaaaaaagaataagtgttgccttgttttgtgtgttctaaatactttttttaatgaaaaaatgttttttggttttaatggtgttacgtggtttgtgtattaattttttttcttgtccatatcacaccaccaaaggcttttggaccatttagcatcatgagcctaatggctcagtcagtcacctttcttaagtgttgtgaagatggctcttttctttggatcttgtttctagccctcaactgctgaaagcctcagaatttagattaattgagaaaacacccacctcttttagagaattatcctttgatgctgcagaatctactcttacaatgccttcctacagctcactggggtgcttaccaaagccatagctttaaaccttcccagtccccatcagtagcttcctgaaagtctcctctcttgtttacttctgcaaagggtagcttcttaaaaacgtgatcatgtatgagtatgtatttgttcacttacccttttttacttttaatcaatgtcagataccaagagttgtgttaagctgagtgtagtgtgtaactaactacacttggatcttactgatccagaaatagtccccatagttagagtagttacttatgaagtggttattaaagtgaacacagcacatatacattatctatactgctttttgttatgattaatactgggtatgttctggtaaatccatccttattgtatagaaaaaaaattacttttttaccaggttttccaaagacagaatagatcacaaagctcaaggaatttaatattcttgtaatggactagataattcaaactgattagcccattccagaagaaaaacagctgggaattaagttaatccacttgaaattgttttacaataatcagaacatccaaacctcaaggctcaggatcccatagaccagagcccacctttttgataaacttagtaaagtcttggagactagaagcaagatagtttgtgacacataagcttcccaaaaactagaatagatttttactgaatagtggtatatctgatggtatatgtttcttaaaggtccaaatgtaataaaaaaaaaaatgaaaaaaaggtctcagtgtttttaatgcactacatatttgtatgcaagacaagcatccagtttttttctgtaatgcagtgacagtgtggaatgaccactcagccattataaatttgtgtactcagggcccttgtctcacccaactatctctataaactgctgcagtagcttatttgtacaagacacttgtgaaaatcagttttcttacattatagtcattgtcacatatggaagttggtctttgattccaaaagtaaagggaatatgtttctacattaacaggaatatggagaaatctgtaacgtttgaattatctttgaaagaatggctaaatgataaatgttaagtcctgtgcctatatggagaggactctgtaccagcatgagttaatttaagtggattcactgctattcagttcatagcacattagtgactaggaatgtgtgttcagcctcctgagagaggaggggaggaagcttgatactgggtggaaacaactcttgacatctgtttccttgtgtgtcaaagaacgaatttgtatcaaatagatctgttttgagctttggccattatttggctaagaacttcagccatctcatctcagacaaattggacagcctctttgatacattttctagtagtcaaaatggggcagatgtagtttaatatgggtggaaaactgccccagcaagataccaggttatttactgtggtatcgaaagctctaagagaatggaagtggttcttttgcccggctggaaatagcagtgggaagacaagtctatccagaccaagcctgtccatacaacactggcaatcagttgatgagggaattaagtcagatgggagacgtctcaatctgtcgcccaggttggagtgcagtggtggcgatctcagctcactgcaacctccacctcccaggttcaagcaattctctctgcctcagcctctagagcagctgggattacaggctctcgccaccatgcccggttaatttttgtattttttagtagagatggggtttcaccatgttagccaggctgatcttgaactcgtgacctcaggtgatccgcctgcctcagtctcccaaagtgctgggattacaggcgtgagccactgtgcccggcctcagttgggatttgacagctctgaacctcagcaggggaagattgatgtaaaaatccacttggtcagagtgatatatgtagacttgatgtttgagatggttctcagtttagagaatgtgggatatggtagaggtctttgtttttttcccatgtcccaaaaggtgctgggcaagtagcttgaactcgagcctgttttaattataaaatagatcaaactgctctttcttggtgcccttactgctccttgatttttagtgcatttattttgagtatgaatgcataaagtctgagggcctaaattttgttaattttttttaacaaatgggagaggggaatcctcgatagtcacccaattttcctttttttttgagacagtctgactgttgcccaggctggagtgtaatggcgccatctcggctcactgcaacatccagctcctgggtttcagcaattctcctgcctcagcctcctgagtagctgggattacaggcgcccgccaccacgcccggctaatttttgtatttttagtagagacaggattttgccatgtttgccagcctggtctcgaactcttgacctcctgatccaccctcctctgcctcccaaagtgctgggattacaggcgtgagccaccgcgcccagccccatagtcccccaattttctaacagttttaaattctgtaacttctcctgtctgtaaacaaggctgtcttttcaaatggctctcctacaggatgtgataattatctattctataaagccgaggtttggagaggtaaatagctatttcacattaacacaataatgtcaatgccctatggaaaagataaaatacttggactatattttaaaggggaatctggggtcatgcatattgaagtttaactagatccctccagatttttggttttgatcctacacatttagatactagttttggattttagacagttggtgctgacagtgtgaaactcctattgcctgcagttaaattgaagctttggtttctcgtgaacaggcagtgaagctggtattatactttaagtcctcatttcagaaatagtttccctccacccccaagcactaccacacatggtctccccacctggtttcagctagtgcattagttttatcttgttttttaccgctgggcaaaccttgctggaacaacaactgacttcatgatttgcacatttggagggcttaacgtctttgcaaatgaaaaatccactgtacaataacaagctcaaaggaactcggagcctttttagaagaaatcgtgctgaattataatgtggcttactgcaataatgtttctttgatcaggatggaaaggaaaatactgagtttagcagaaaacgatgtctaaatgtatttgtaatgatacaattgtttataaatgttttactattaggttgaaccataagaaattgccagtgtacaatttcatctacaaaatgactggcttaacctaaattctgcattttatactccaagaataagctcttcgtggcagctttctaagtgtgaaatgatggaactttctatttgccagaatgacctacacttctctaatagtttatctcatattgttagccaaacgctgattaaaatgcaaatttcaaacta

SEQ ID NO: 134957 - DNA, 1307 bp, Artificial Sequence
  derived and/or modified sequence
caaagggaagcgaagccggagctgcgggcgctttttctgcccgcggtgtctcagattcattcttaaggaactgagaacttaatcttccaaaatgtcaaaaagaccatcttatgccccacctcccaccccagctcctgcaacagcatcctctggtatcacgattccaaaacccccaaagccaccagataagccgctgatgccctacatgaggtacagcagaaaggtctgggaccaagtaaaggcttccaaccctgacctaaagttgtgggagattggcaagattattggtggcatgtggcgagatctcactgatgaagaaaaacaagaatatttaaacgaatacgaagcagaaaagatagagtacaatgaatctatgaaggcctatcataattcccccgcgtaccttgcttacataaatgcaaaaagtcgtgcagaagctgctttagaggaagaaagtcgacagagacaatctcgcatggagaaaggagaaccgtacatgagcattcagcctgctgaagatccagatgattatgatgatggcttttcaatgaagcatacagccaccgcccgtttccagagaaaccaccgcctcatcagtgaaattcttagtgagagtgtggtgccagacgttcggtcagttgtcacaacagctagaatgcaggtcctcaaacggcaggtccagtccttaatggttcatcagcgaaaactagaagctgaacttcttcaaatagaggaacgacaccaggagaagaagaggaaattcctggaaagcacagattcatttaacaatgaacttaaaaggttgtgcggtctgaaagtagaagtggatatggagaaaattgcagctgagattgcacaggcagaggaacaggcccgcaaaaggcaggaggaaagggagaaggaggccgcagagcaagctgagcgcagtcagagcagcatcgttcctgaggaagaacaagcagctaacaaaggcgaggagaagaaagacgacgagaacattccgatggagacagaaaaaaattgccagctctgtcctagaaaaacccttacttctaggtatactgattttcctgattaaaagcatccctcaagaggagacacaccttgaagaaacaacagagagccaacagaatggtgaagaaggcacgtctactcctgaggacaaggagagtgggcaggagggggtcgacagtatggcagaggaaggaaccagtgatagtaacactggctcggagagcaacagtgcaacagtggaggagccaccaacagatcccataccagaagatgagaaaaaagaataagtgttg

SEQ ID NO: 134958 - DNA, 943 bp, Artificial Sequence
  derived and/or modified sequence
ctgctgaagatccagatgattatgatgatggcttttcaatgaagcatacagccaccgcccgtttccagagaaaccaccgcctcatcagtgaaattcttagtgagagtgtggtgccagacgttcggtcagttgtcacaacagctagaatgcaggtcctcaaacggcaggtccagtccttaatggttcatcagcgaaaactagaagctgaacttcttcaaatagaggaacgacaccaggagaagaagaggaaattcctggaaagcacagattcatttaacaatgaacttaaaaggttgtgcggtctgaaagtagaagtggatatggagaaaattgcagctgagattgcacaggcagaggaacaggcccgcaaaaggcaggaggaaagggagaaggaggccgcagagcaagctgagcgcagtcagagcagcatcgttcctgaggaagaacaagcagctaacaaaggcgaggagaagaaagacgacgagaacattccgatggagacagaaaaaaattgccagctctgtcctagaaaaacccttacttctaggtatactgattttcctgattaaaagcatccctcaagaggagacacaccttgaagaaacaacagagagccaacagaatggtgaagaaggcacgtctactcctgaggacaaggagagtgggcaggagggggtcgacagtatggcagaggaaggaaccagtgatagtaacactggctcggagagcaacagtgcaacagtggaggagccaccaacagatcccataccagaagatgagaaaaaagaataagtgttgccttgttttgtgtgttctaaatactttttttaatgaaaaaatgttttttggttttaatggtgttacgtggtttgtgtattaattttttttcttgtccatatcacaccaccaaaggcttttggaccatttagcatcatgagcctaa

SEQ ID NO: 134959 - DNA, 1569 bp, Artificial Sequence
  derived and/or modified sequence
aggggcggggcgagcgcgggacaaagggaagcgaagccggagctgcgggcgctttttctgcccgcggcaaatgcccagcacaccagggtttgtgggatacaatccatacagtcatctcgcctacaacaactacaggctgggagggaacccgggcaccaacagccgggtcacggcatcctctggtatcacgattccaaaacccccaaagccaccagataagccgctgatgccctacatgaggtacagcagaaaggtctgggaccaagtaaaggcttccaaccctgacctaaagttgtgggagattggcaagattattggtggcatgtggcgagatctcactgatgaagaaaaacaagaatatttaaacgaatacgaagcagaaaagatagagtacaatgaatctatgaaggcctatcataattcccccgcgtaccttgcttacataaatgcaaaaagtcgtgcagaagctgctttagaggaagaaagtcgacagagacaatctcgcatggagaaaggagaaccgtacatgagcattcagcctgctgaagatccagatgattatgatgatggcttttcaatgaagcatacagccaccgcccgtttccagagaaaccaccgcctcatcagtgaaattcttagtgagagtgtggtgccagacgttcggtcagttgtcacaacagctagaatgcaggtcctcaaacggcaggtccagtccttaatggttcatcagcgaaaactagaagctgaacttcttcaaatagaggaacgacaccaggagaagaagaggaaattcctggaaagcacagattcatttaacaatgaacttaaaaggttgtgcggtctgaaagtagaagtggatatggagaaaattgcagctgagattgcacaggcagaggaacaggcccgcaaaaggcaggaggaaagggagaaggaggccgcagagcaagctgagcgcagtcagagcagcatcgttcctgaggaagaacaagcagctaacaaaggcgaggagaagaaagacgacgagaacattccgatggagacagaggagacacaccttgaagaaacaacagagagccaacagaatggtgaagaaggcacgtctactcctgaggacaaggagagtgggcaggagggggtcgacagtatggcagaggaaggaaccagtgatagtaacactggctcggagagcaacagtgcaacagtggaggagccaccaacagatcccataccagaagatgagaaaaaagaataagtgttgccttgttttgtgtgttctaaatactttttttaatgaaaaaatgttttttggttttaatggtgttacgtggtttgtgtattaattttttttcttgtccatatcacaccaccaaaggcttttggaccatttagcatcatgagcctaatggctcagtcagtcacctttcttaagtgttgtgaagatggctcttttctttggatcttgtttctagccctcaactgctgaaagcctcagaatttagattaattgagaaaacacccacctcttttagagaattatcctttgatgctgcagaatctactcttacaatg

SEQ ID NO: 134960 - DNA, 536 bp, Artificial Sequence
  derived and/or modified sequence
cttagtgagagtgtggtgccagacgttcggtcagttgtcacaacagctagaatgcaggtcctcaaacggcaggtccagtccttaatggttcatcagcgaaaactagaagctgaacttcttcaaatagaggaacgacaccaggagaagaagaggaaattcctggaaagcacagattcatttaacaatgaacttaaaaggttgtgcggtctgaaagtagaagtggatatggagaaaattgcagctgagattgcacaggcagaggaacaggcccgcaaaaggcaggaggaaagggagaaggaggccgcagagcaagctgagcgcagtcagagcagcatcgttcctgaggaagaacaagcagctaacaaaggcgaggagaagaaagacgacgagaacattccgatggagacagaaaaaaattgccagctctgtcctagaaaaacccttacttctaggtatactgattttcctgattaaaagcatccctcaaggtaaaaaataataataataacttgtataaataaaacttacataaagta

SEQ ID NO: 134961 - DNA, 1644 bp, Artificial Sequence
  derived and/or modified sequence
gtgtctcagattcattcttaaggaactgagaacttaatcttccaaaatgtcaagcatcctctggtatcacgattccaaaacccccaaagccaccagataagccgctgatgccctacatgaggtacagcagaaaggtctgggaccaagtaaaggcttccaaccctgacctaaagttgtgggagattggcaagattattggtggcatgtggcgagatctcactgatgaagaaaaacaagaatatttaaacgaatacgaagcagaaaagatagagtacaatgaatctatgaaggcctatcataattcccccgcgtaccttgcttacataaatgcaaaaagtcgtgcagaagctgctttagaggaagaaagtcgacagagacaatctcgcatggagaaaggagaaccgtacatgagcattcagcctgctgaagatccagatgattatgatgatggcttttcaatgaagcatacagccaccgcccgtttccagagaaaccaccgcctcatcagtgaaattcttagtgagagtgtggtgccagacgttcggtcagttgtcacaacagctagaatgcaggtcctcaaacggcaggtccagtccttaatggttcatcagcgaaaactagaagctgaacttcttcaaatagaggaacgacaccaggagaagaagaggaaattcctggaaagcacagattcatttaacaatgaacttaaaaggttgtgcggtctgaaagtagaagtggatatggagaaaattgcagctgagattgcacaggcagaggaacaggcccgcaaaaggcaggaggaaagggagaaggaggccgcagagcaagctgagcgcagtcagagcagcatcgttcctgaggaagaacaagcagctaacaaaggcgaggagaagaaagacgacgagaacattccgatggagacagaggagacacaccttgaagaaacaacagagagccaacagaatggtgaagaaggcacgtctactcctgaggacaaggagagtgggcaggagggggtcgacagtatggcagaggaaggaaccagtgatagtaacactggctcggagagcaacagtgcaacagtggaggagccaccaacagatcccataccagaagatgagaaaaaagaataagtgttgccttgttttgtgtgttctaaatactttttttaatgaaaaaatgttttttggttttaatggtgttacgtggtttgtgtattaattttttttcttgtccatatcacaccaccaaaggcttttggaccatttagcatcatgagcctaatggctcagtcagtcacctttcttaagtgttgtgaagatggctcttttctttggatcttgtttctagccctcaactgctgaaagcctcagaatttagattaattgagaaaacacccacctcttttagagaattatcctttgatgctgcagaatctactcttacaatgccttcctacagctcactggggtgcttaccaaagccatagctttaaaccttcccagtccccatcagtagcttcctgaaagtctcctctcttgtttacttctgcaaagggtagcttcttaaaaacgtgatcatgtatgagtatgtatttgttcacttacccttttttacttttaatcaatgtcagataccaagagt

SEQ ID NO: 134962 - DNA, 534 bp, Artificial Sequence
  derived and/or modified sequence
taaatgaagcacactgccacagcgaggtttcaacggaatcacaggcttatctccgaaattctgtcagaatcggtggtccctgacgttaggagcgttgtgactactgctagaatgcaggttctgaaacggcaagtgcagtcgctgatggtccatcagcgcaaactcgaggccgaactcctgcaaattgaggagcgtcatcaagaaaaaaagcgtaagttccttgagtcaaccgatagttttaataatgagctcaaacgcctgtgcggccttaaggttgaagtggacatggagaagatcgctgctgaaatcgcccaggcagaggagcaggctaggaaacgccaagaggagagagaaaaagaggctgccgaacaggcggagaggtcacagtccagcattgtgccggaggaggagcaagctgccaacaagggagaagaaaaaaaagacgatgaaaacattcctatggaaaccgagaaaaattgtcaactttgtccacgcaagaccctgacaagccgttacacagatttccccgactag

SEQ ID NO: 134963 - DNA, 1236 bp, Artificial Sequence
  derived and/or modified sequence
atgtccaaaagacctagctatgctccgccacctacaccagcacccgctacccagatgcctagtacccctggttttgtgggatacaacccttactcccacctagcctacaacaactatcggctcggaggtaacccgggaactaattccagggtgacagcttcctccggcattacgatacccaaaccccctaagccgcctgataagccactgatgccctacatgaggtactctcggaaggtatgggatcaggtgaaagcttccaacccggacctgaaactgtgggaaatcgggaagattatcggtggtatgtggcgcgatttaacagacgaagagaagcaggaataccttaacgagtatgaagccgagaaaattgagtacaatgaatcaatgaaggcctaccacaattctcctgcctacctggcctatatcaacgctaaatcaagagccgaggcagcacttgaggaggagtcaaggcagcggcaatctagaatggagaagggagagccttacatgtctatccaaccagcagaggaccctgatgattacgatgacggcttcagtatgaaacacaccgccactgcaagatttcagagaaaccataggctcatctccgagattttaagtgagtccgtggttcctgacgtacggagcgttgtgactacagctcggatgcaggtgctgaaacgtcaagtgcagtctcttatggtgcaccagaggaaactcgaagccgaactgttgcaaatcgaggagcgccaccaggaaaagaagcgcaaatttctggaatccaccgacagcttcaacaacgaactgaagcgcctgtgcgggctgaaggtggaggtagacatggaaaagattgccgcagaaattgcccaggccgaggagcaggctagaaagcgacaggaggaacgggaaaaggaagctgctgagcaagcggaacgctcccagtcatccatagtgcccgaggaggagcaggccgcaaacaaaggagaagagaagaaagacgatgagaacattccaatggagaccgaggagacccacctggaggagacaacagaatcacagcaaaatggcgaggagggtacatctactcccgaggataaagaatctgggcaagaaggagtggattccatggcggaggagggcacatccgatagcaacactggctctgaaagcaacagcgccaccgtcgaagagccccctaccgaccccattcctgaggacgagaagaaagagtag

SEQ ID NO: 134964 - DNA, 987 bp, Artificial Sequence
  derived and/or modified sequence
atgagtaaacgacctagctacgcaccccctcctacccctgcacccgcaacagctagctctggcatcactattcctaagccacctaagccaccggacaaaccactcatgccatacatgcgctacagcagaaaggtgtgggaccaagttaaagcaagcaatcccgatttaaagctttgggagatcgggaaaataattggcggtatgtggagggacttgactgatgaagagaagcaagagtatcttaatgagtacgaagcggaaaaaattgaatacaatgagagcatgaaagcgtatcataactcacctgcttatctggcctacatcaacgccaagagccgagccgaggcggctttagaagaagagagccgccagcgtcaaagtcgtatggagaaaggcgagccctatatgagcatccagcctgcagaggatcccgatgactatgacgacgggttttctatgaagcacactgcaactgccagattccagagaaaccatcgtctgatcagtgaaatcctaagtgagagtgtggtgcccgatgtccggagcgtggttaccacggctcgaatgcaggtactgaaacggcaagtgcagagtcttatggtccaccagcgcaagctggaagccgaattgctgcagattgaagagcgacatcaagaaaaaaagagaaaattcttagagtccaccgactcctttaataacgaactgaagaggttatgcgggttaaaagtggaggtggatatggaaaagattgccgcagaaatcgctcaggctgaggagcaggcccgtaagaggcaggaggaacgcgagaaggaggccgctgagcaggccgagcgctctcagtcctcaattgtgccggaggaagaacaggccgcaaataaaggggaggagaaaaaagatgatgaaaacatccctatggaaaccgagaagaattgccagctgtgcccaagaaagaccctaaccagtagatacactgattttcctgattag

SEQ ID NO: 134965 - DNA, 570 bp, Artificial Sequence
  derived and/or modified sequence
tgagcggaagatccagacgattacgatgacggcttcagtatgaagcacactgctactgcacggttccagagaaatcatagactgatctctgaaatcctaagcgagtccgtcgtccctgatgtgagatccgtagtgaccaccgcgaggatgcaggtgttgaagcggcaggtgcagagtctgatggtccatcagcggaagctggaagcagagctcctgcaaatcgaggagagacatcaggaaaagaagcgcaaattcctcgaatcaacagactccttcaacaatgagcttaaaagactctgcggacttaaggtcgaggtggatatggagaagatcgctgccgaaatcgcgcaggctgaagaacaggcgcgaaaaagacaggaggagagagagaaggaggctgcagaacaggccgagagatcacagtcctccattgtgcccgaggaagagcaggctgcaaacaagggagaagaaaagaaggatgatgaaaacattcctatggagacggaaaagaattgccagctctgcccacgcaaaaccctgacctctaggtacaccgacttccccgattag

SEQ ID NO: 134966 - DNA, 1182 bp, Artificial Sequence
  derived and/or modified sequence
atgcccagcacacccggatttgtgggatacaacccatactcacacctcgcgtataataattatcgcctagggggtaaccccggtacaaacagccgcgtcacggcttctagtggcatcacgatacctaagccaccaaaacctcccgataagccactgatgccttacatgcgctactctcggaaggtatgggaccaggtcaaggcatccaatcccgacctgaagctgtgggaaattgggaagattatcggcggaatgtggcgggatctgactgatgaagaaaaacaagagtacctgaacgagtatgaagctgagaagatagagtacaatgaaagcatgaaggcctaccataattccccagcgtatttagcttatattaatgccaaatccagggcagaagcagctctagaggaggaaagtcgtcaaagacagagccggatggagaaaggagagccatatatgtccatccaaccggcagaggatcccgatgattacgatgatggattctcgatgaaacacactgcgactgcccgatttcagaggaatcatcgcctgatttccgaaatcttgagtgagtcggttgtgcccgacgtgcggtctgtggtcaccaccgcgagaatgcaagtgctgaagaggcaggtgcagagcctgatggtacatcagcggaagctcgaggctgagctcttgcagattgaagagcgccatcaggagaagaagcgaaagttcctcgagtcaaccgactcctttaataacgaactcaagaggctgtgcggcctgaaagttgaagttgatatggagaagattgctgccgaaatcgcccaggcggaagagcaggcacggaagaggcaggaggagagagagaaagaggcagcagagcaggccgagcggtctcagtcatcaatcgttccagaggaggaacaggccgcaaataagggcgaggagaagaaagatgacgaaaatattccgatggagaccgaggaaacacacctggaggagaccactgagagccaacagaacggtgaggaaggcacctccaccccagaggacaaggagtccggccaggaaggggtggactcaatggccgaagaaggcacctcagatagcaacactgggtctgagtctaactcagcgactgtagaggagcccccaaccgatccaattcctgaggatgagaaaaaggaatag

SEQ ID NO: 134967 - DNA, 474 bp, Artificial Sequence
  derived and/or modified sequence
ctttccgagtccgttgtacccgatgtccggagcgtggtgacgaccgcccgtatgcaggtgctgaagcgccaagtgcagagcctgatggtgcaccagaggaagctagaggccgagctgctccagatcgaggagcggcatcaggagaaaaaacgcaagtttctagaatcaaccgactcctttaataacgaactgaaacgtctttgtggcctcaaggtggaagtggacatggagaagattgctgctgaaatcgctcaagccgaggagcaagcaaggaagcgtcaggaagaacgagagaaggaggccgctgagcaggctgaacgatcccagtcctcaattgtcccagaagaggaacaggccgcaaataagggggaagaaaagaaggatgatgagaatatcccgatggagactgagaagaattgtcagttgtgtcctcgcaaaaccctaacctctcggtacactgactttccggactag

SEQ ID NO: 134968 - DNA, 1026 bp, Artificial Sequence
  derived and/or modified sequence
atgccttacatgcgatattcccgcaaggtttgggaccaagtgaaggctagcaatccggaccttaagctgtgggagatcggaaaaatcatagggggaatgtggcgagacttgacggacgaggagaagcaggagtatcttaacgagtatgaggctgaaaagatagaatataatgagagcatgaaagcttaccataactcccccgcatatctggcctacatcaacgctaaaagtagagctgaggcagcgttagaggaggaatcccgccagcgccagagccggatggaaaagggagaaccttatatgtccattcaaccagccgaagatcccgatgactatgacgacggtttctccatgaagcataccgcaactgcacgcttccagagaaaccaccgactcattagtgagattctgtcagagtcagtcgttcctgacgtgaggagtgttgtgaccactgctagaatgcaggtcctgaagaggcaggttcagagtctaatggtccatcagcggaagttggaggctgagcttctgcagattgaggaacgacaccaggaaaaaaagcggaagtttcttgagtccaccgacagctttaacaacgagctaaaacggctgtgcggcctaaaggtggaagtggacatggagaaaatcgcggctgagatagctcaggctgaggagcaggcccgaaagaggcaggaggaacgggagaaagaagccgctgagcaggccgagcgaagccagagctctatcgtgcctgaggaggagcaggccgcaaacaagggcgaggagaaaaaggatgacgagaacatccccatggagactgaagaaacgcacctcgaggaaaccactgaatcacagcagaatggagaggaggggacaagcacgccagaggacaaagaatcaggacaggaaggggttgatagcatggcagaagaaggaacatccgattctaacacaggcagtgagagtaacagtgccactgtcgaggagccacctactgaccccatacccgaggacgaaaaaaaggaatag

SEQ ID NO: 134969 - DNA, 534 bp, Artificial Sequence
  derived and/or modified sequence
tgaatgaagcacaccgccaccgccagattccagagaaaccacagactgatcagcgagatcctgagcgagagcgtggtgcccgacgtgagaagcgtggtgaccaccgccagaatgcaggtgctgaagagacaggtgcagagcctgatggtgcaccagagaaagctggaggccgagctgctgcagatcgaggagagacaccaggagaagaagagaaagttcctggagagcaccgacagcttcaacaacgagctgaagagactgtgcggcctgaaggtggaggtggacatggagaagatcgccgccgagatcgcccaggccgaggagcaggccagaaagagacaggaggagagagagaaggaggccgccgagcaggccgagagaagccagagcagcatcgtgcccgaggaggagcaggccgccaacaagggcgaggagaagaaggacgacgagaacatccccatggagaccgagaagaactgccagctgtgccccagaaagaccctgaccagcagatacaccgacttccccgactag

SEQ ID NO: 134970 - DNA, 1236 bp, Artificial Sequence
  derived and/or modified sequence
atgagcaagagacccagctacgcccccccccccacccccgcccccgccacccagatgcccagcacccccggcttcgtgggctacaacccctacagccacctggcctacaacaactacagactgggcggcaaccccggcaccaacagcagagtgaccgccagcagcggcatcaccatccccaagccccccaagccccccgacaagcccctgatgccctacatgagatacagcagaaaggtgtgggaccaggtgaaggccagcaaccccgacctgaagctgtgggagatcggcaagatcatcggcggcatgtggagagacctgaccgacgaggagaagcaggagtacctgaacgagtacgaggccgagaagatcgagtacaacgagagcatgaaggcctaccacaacagccccgcctacctggcctacatcaacgccaagagcagagccgaggccgccctggaggaggagagcagacagagacagagcagaatggagaagggcgagccctacatgagcatccagcccgccgaggaccccgacgactacgacgacggcttcagcatgaagcacaccgccaccgccagattccagagaaaccacagactgatcagcgagatcctgagcgagagcgtggtgcccgacgtgagaagcgtggtgaccaccgccagaatgcaggtgctgaagagacaggtgcagagcctgatggtgcaccagagaaagctggaggccgagctgctgcagatcgaggagagacaccaggagaagaagagaaagttcctggagagcaccgacagcttcaacaacgagctgaagagactgtgcggcctgaaggtggaggtggacatggagaagatcgccgccgagatcgcccaggccgaggagcaggccagaaagagacaggaggagagagagaaggaggccgccgagcaggccgagagaagccagagcagcatcgtgcccgaggaggagcaggccgccaacaagggcgaggagaagaaggacgacgagaacatccccatggagaccgaggagacccacctggaggagaccaccgagagccagcagaacggcgaggagggcaccagcacccccgaggacaaggagagcggccaggagggcgtggacagcatggccgaggagggcaccagcgacagcaacaccggcagcgagagcaacagcgccaccgtggaggagccccccaccgaccccatccccgaggacgagaagaaggagtag

SEQ ID NO: 134971 - DNA, 987 bp, Artificial Sequence
  derived and/or modified sequence
atgagcaagagacccagctacgcccccccccccacccccgcccccgccaccgccagcagcggcatcaccatccccaagccccccaagccccccgacaagcccctgatgccctacatgagatacagcagaaaggtgtgggaccaggtgaaggccagcaaccccgacctgaagctgtgggagatcggcaagatcatcggcggcatgtggagagacctgaccgacgaggagaagcaggagtacctgaacgagtacgaggccgagaagatcgagtacaacgagagcatgaaggcctaccacaacagccccgcctacctggcctacatcaacgccaagagcagagccgaggccgccctggaggaggagagcagacagagacagagcagaatggagaagggcgagccctacatgagcatccagcccgccgaggaccccgacgactacgacgacggcttcagcatgaagcacaccgccaccgccagattccagagaaaccacagactgatcagcgagatcctgagcgagagcgtggtgcccgacgtgagaagcgtggtgaccaccgccagaatgcaggtgctgaagagacaggtgcagagcctgatggtgcaccagagaaagctggaggccgagctgctgcagatcgaggagagacaccaggagaagaagagaaagttcctggagagcaccgacagcttcaacaacgagctgaagagactgtgcggcctgaaggtggaggtggacatggagaagatcgccgccgagatcgcccaggccgaggagcaggccagaaagagacaggaggagagagagaaggaggccgccgagcaggccgagagaagccagagcagcatcgtgcccgaggaggagcaggccgccaacaagggcgaggagaagaaggacgacgagaacatccccatggagaccgagaagaactgccagctgtgccccagaaagaccctgaccagcagatacaccgacttccccgactag

SEQ ID NO: 134972 - DNA, 570 bp, Artificial Sequence
  derived and/or modified sequence
tgagccgaggaccccgacgactacgacgacggcttcagcatgaagcacaccgccaccgccagattccagagaaaccacagactgatcagcgagatcctgagcgagagcgtggtgcccgacgtgagaagcgtggtgaccaccgccagaatgcaggtgctgaagagacaggtgcagagcctgatggtgcaccagagaaagctggaggccgagctgctgcagatcgaggagagacaccaggagaagaagagaaagttcctggagagcaccgacagcttcaacaacgagctgaagagactgtgcggcctgaaggtggaggtggacatggagaagatcgccgccgagatcgcccaggccgaggagcaggccagaaagagacaggaggagagagagaaggaggccgccgagcaggccgagagaagccagagcagcatcgtgcccgaggaggagcaggccgccaacaagggcgaggagaagaaggacgacgagaacatccccatggagaccgagaagaactgccagctgtgccccagaaagaccctgaccagcagatacaccgacttccccgactag

SEQ ID NO: 134973 - DNA, 1182 bp, Artificial Sequence
  derived and/or modified sequence
atgcccagcacccccggcttcgtgggctacaacccctacagccacctggcctacaacaactacagactgggcggcaaccccggcaccaacagcagagtgaccgccagcagcggcatcaccatccccaagccccccaagccccccgacaagcccctgatgccctacatgagatacagcagaaaggtgtgggaccaggtgaaggccagcaaccccgacctgaagctgtgggagatcggcaagatcatcggcggcatgtggagagacctgaccgacgaggagaagcaggagtacctgaacgagtacgaggccgagaagatcgagtacaacgagagcatgaaggcctaccacaacagccccgcctacctggcctacatcaacgccaagagcagagccgaggccgccctggaggaggagagcagacagagacagagcagaatggagaagggcgagccctacatgagcatccagcccgccgaggaccccgacgactacgacgacggcttcagcatgaagcacaccgccaccgccagattccagagaaaccacagactgatcagcgagatcctgagcgagagcgtggtgcccgacgtgagaagcgtggtgaccaccgccagaatgcaggtgctgaagagacaggtgcagagcctgatggtgcaccagagaaagctggaggccgagctgctgcagatcgaggagagacaccaggagaagaagagaaagttcctggagagcaccgacagcttcaacaacgagctgaagagactgtgcggcctgaaggtggaggtggacatggagaagatcgccgccgagatcgcccaggccgaggagcaggccagaaagagacaggaggagagagagaaggaggccgccgagcaggccgagagaagccagagcagcatcgtgcccgaggaggagcaggccgccaacaagggcgaggagaagaaggacgacgagaacatccccatggagaccgaggagacccacctggaggagaccaccgagagccagcagaacggcgaggagggcaccagcacccccgaggacaaggagagcggccaggagggcgtggacagcatggccgaggagggcaccagcgacagcaacaccggcagcgagagcaacagcgccaccgtggaggagccccccaccgaccccatccccgaggacgagaagaaggagtag

SEQ ID NO: 134974 - DNA, 474 bp, Artificial Sequence
  derived and/or modified sequence
ctgagcgagagcgtggtgcccgacgtgagaagcgtggtgaccaccgccagaatgcaggtgctgaagagacaggtgcagagcctgatggtgcaccagagaaagctggaggccgagctgctgcagatcgaggagagacaccaggagaagaagagaaagttcctggagagcaccgacagcttcaacaacgagctgaagagactgtgcggcctgaaggtggaggtggacatggagaagatcgccgccgagatcgcccaggccgaggagcaggccagaaagagacaggaggagagagagaaggaggccgccgagcaggccgagagaagccagagcagcatcgtgcccgaggaggagcaggccgccaacaagggcgaggagaagaaggacgacgagaacatccccatggagaccgagaagaactgccagctgtgccccagaaagaccctgaccagcagatacaccgacttccccgactag

SEQ ID NO: 134975 - DNA, 1026 bp, Artificial Sequence
  derived and/or modified sequence
atgccctacatgagatacagcagaaaggtgtgggaccaggtgaaggccagcaaccccgacctgaagctgtgggagatcggcaagatcatcggcggcatgtggagagacctgaccgacgaggagaagcaggagtacctgaacgagtacgaggccgagaagatcgagtacaacgagagcatgaaggcctaccacaacagccccgcctacctggcctacatcaacgccaagagcagagccgaggccgccctggaggaggagagcagacagagacagagcagaatggagaagggcgagccctacatgagcatccagcccgccgaggaccccgacgactacgacgacggcttcagcatgaagcacaccgccaccgccagattccagagaaaccacagactgatcagcgagatcctgagcgagagcgtggtgcccgacgtgagaagcgtggtgaccaccgccagaatgcaggtgctgaagagacaggtgcagagcctgatggtgcaccagagaaagctggaggccgagctgctgcagatcgaggagagacaccaggagaagaagagaaagttcctggagagcaccgacagcttcaacaacgagctgaagagactgtgcggcctgaaggtggaggtggacatggagaagatcgccgccgagatcgcccaggccgaggagcaggccagaaagagacaggaggagagagagaaggaggccgccgagcaggccgagagaagccagagcagcatcgtgcccgaggaggagcaggccgccaacaagggcgaggagaagaaggacgacgagaacatccccatggagaccgaggagacccacctggaggagaccaccgagagccagcagaacggcgaggagggcaccagcacccccgaggacaaggagagcggccaggagggcgtggacagcatggccgaggagggcaccagcgacagcaacaccggcagcgagagcaacagcgccaccgtggaggagccccccaccgaccccatccccgaggacgagaagaaggagtag

SEQ ID NO: 134976 - protein, 423 aa, Artificial Sequence
  derived and/or modified sequence
MKPNFSLRLRIFNLNCWGIPYLSKHRADRMRRLGDFLNQESFDLALLEEVWSEQDFQYLRQKLSPTYPAAHHFRSGIIGSGLCVFSKHPIQELTQHIYTLNGYPYMIHHGDWFSGKAVGLLVLHLSGMVLNAYVTHLHAEYNRQKDIYLAHRVAQAWELAQFIHHTSKKADVVLLCGDLNMHPEDLGCCLLKEWTGLHDAYLETRDFKGSEEGNTMVPKNCYVSQQELKPFPFGVRIDYVLYKAVSGFYISCKSFETTTGFDPHRGTPLSDHEALMATLFVRHSPPQQNPSSTHGPAERSPLMCVLKEAWTELGLGMAQARWWATFASYVIGLGLLLLALLCVLAAGGGAGEAAILLWTPSVGLVLWAGAFYLFHVQEVNGLYRAQAELQHVLGRAREAQDLGPEPQPALLLGQQEGDRTKEQ

SEQ ID NO: 134977 - DNA, 1272 bp, Artificial Sequence
  derived and/or modified sequence
atgaagcccaacttcagcctgagactgagaatcttcaacctgaactgctggggcatcccctacctgagcaagcacagagccgacagaatgagaagactgggcgacttcctgaaccaggagagcttcgacctggccctgctggaggaggtgtggagcgagcaggacttccagtacctgagacagaagctgagccccacctaccccgccgcccaccacttcagaagcggcatcatcggcagcggcctgtgcgtgttcagcaagcaccccatccaggagctgacccagcacatctacaccctgaacggctacccctacatgatccaccacggcgactggttcagcggcaaggccgtgggcctgctggtgctgcacctgagcggcatggtgctgaacgcctacgtgacccacctgcacgccgagtacaacagacagaaggacatctacctggcccacagagtggcccaggcctgggagctggcccagttcatccaccacaccagcaagaaggccgacgtggtgctgctgtgcggcgacctgaacatgcaccccgaggacctgggctgctgcctgctgaaggagtggaccggcctgcacgacgcctacctggagaccagagacttcaagggcagcgaggagggcaacaccatggtgcccaagaactgctacgtgagccagcaggagctgaagcccttccccttcggcgtgagaatcgactacgtgctgtacaaggccgtgagcggcttctacatcagctgcaagagcttcgagaccaccaccggcttcgacccccacagaggcacccccctgagcgaccacgaggccctgatggccaccctgttcgtgagacacagccccccccagcagaaccccagcagcacccacggccccgccgagagaagccccctgatgtgcgtgctgaaggaggcctggaccgagctgggcctgggcatggcccaggccagatggtgggccaccttcgccagctacgtgatcggcctgggcctgctgctgctggccctgctgtgcgtgctggccgccggcggcggcgccggcgaggccgccatcctgctgtggacccccagcgtgggcctggtgctgtgggccggcgccttctacctgttccacgtgcaggaggtgaacggcctgtacagagcccaggccgagctgcagcacgtgctgggcagagccagagaggcccaggacctgggccccgagccccagcccgccctgctgctgggccagcaggagggcgacagaaccaaggagcagtag

SEQ ID NO: 134978 - DNA, 1272 bp, Artificial Sequence
  derived and/or modified sequence
atgaaacccaacttctcactgcggctcaggatcttcaacctgaattgctggggaatcccctacttgtccaaacaccgggcagataggatgcggcgtttgggcgatttccttaaccaagagagtttcgatctagccctccttgaggaagtttggtccgaacaggacttccagtacctgagacagaagctttctcccacctacccagccgcccaccactttcgatccggaatcatcggctccgggctctgtgtgtttagcaaacaccccatccaggagctcactcagcatatctatacactcaatggctacccgtacatgattcaccacggggactggttctctggtaaggccgtcggactgcttgtcctccacctgagtggcatggttctcaacgcttatgtaacccacctgcatgctgaatataacaggcagaaagacatatatctcgcccaccgtgtggcacaagcatgggagctggcccagttcatccatcacacttccaaaaaagctgatgtggtcttgctttgcggcgatctgaatatgcatccagaggatttgggctgctgtctgctgaaggagtggacaggacttcacgatgcttatctcgagacgcgcgattttaaaggtagcgaggaaggcaacaccatggtgcccaagaattgttacgtatctcagcaggaactgaagccttttcccttcggcgtgaggatcgactacgtgttgtacaaggcagtctccgggttttacatcagttgcaaatcattcgagaccactacaggcttcgacccgcaccgggggactcccttgtctgatcacgaagccctgatggcaacactgttcgtacggcattctcccccacagcagaatcctagttctacgcacggtcctgccgagagaagcccgctgatgtgtgtgctcaaggaggcatggaccgagctcgggttgggcatggctcaagcccgctggtgggccaccttcgccagttacgtgattggtttgggactacttttgcttgctcttttatgcgtgctcgctgcgggcggtggagccggcgaggctgcaattctgctgtggacaccgtctgtgggcttggtcttgtgggccggcgcgttttacctgttccatgtgcaggaagtaaatggactctatagggctcaagccgaactgcagcacgtgctgggaagagccagggaggcgcaggatcttggaccagagccgcagcctgccttattgctgggccaacaggagggagaccggactaaggaacagtag

SEQ ID NO: 134979 - DNA, 1272 bp, Artificial Sequence
  derived and/or modified sequence
atgaagcccaacttcagcctgcggctgcgcatcttcaacctgaactgctggggcatcccctacctgagcaagcacagagctgacaggatgaggcggctgggggacttcctgaaccaggagagctttgacctggccctgctggaggaggtgtggagcgagcaggacttccagtacctgcggcagaagctgagccccacctacccagctgcccaccacttccgcagcggcatcatcggcagcggcctgtgtgtgttcagcaagcaccccatccaggagctgacccagcacatctacaccctgaatggctacccctacatgatccaccacggggactggttcagcggcaaggctgtgggcctgctggtgctgcacctgagcggcatggtgctgaatgcctacgtgacccacctgcatgctgagtacaaccggcagaaggacatctacctggcccaccgggtggcccaggcctgggagctggcccagttcatccaccacaccagcaagaaggcagatgtggtgctgctgtgtggggacctgaacatgcaccctgaggacctgggctgctgcctgctgaaggagtggacaggcctgcatgatgcctacctggagacccgggacttcaagggcagcgaggagggcaacaccatggtgcccaagaactgctacgtgtcccagcaggagctgaagcccttcccctttggagtgagaattgattatgtgctgtacaaggctgtgtctggcttctacatcagctgcaagagctttgagaccaccactggatttgacccccaccggggcacccccctgagtgaccacgaggccctgatggccaccctgtttgtgcgccacagccccccccagcagaaccccagcagcacccacggccctgctgagaggagccccctgatgtgtgtgctgaaggaggcctggacagagctgggcctgggcatggcccaggcccgctggtgggccacctttgccagctatgtgattggcctgggcctgctgctgctggccctgctgtgtgtgctggccgccggcggcggggccggggaggccgccatcctgctgtggaccccatctgtgggcctggtgctgtgggccggggccttctacctgttccacgtgcaggaggtgaatggcctgtaccgggcccaggccgagctgcagcacgtgctgggccgggcccgggaggcccaggacctgggccctgagccccagcctgccctgctgctgggccagcaggagggggacaggaccaaggagcagtag

SEQ ID NO: 134980 - DNA, 1272 bp, Artificial Sequence
  derived and/or modified sequence
atgaagcccaacttcagcctgcggctgcggatcttcaacctgaactgctgggggataccgtatctttcaaaacaccgtgccgacagaatgcgtcgcttaggtgatttccttaaccaggaatcatttgacttggcactgctcgaggaagtgtggtcagaacaggactttcaataccttaggcagaagctctctcctacatatcctgcagcacaccacttccgaagtggcatcatcggttctggactgtgtgtgttctctaaacatccgattcaggagctcacacaacacatatatacactgaatggctatccctacatgattcaccacggagactggttcagtggcaaggccgtgggcttactggttctgcatcttagcggcatggtattgaatgcctacgtcacccacctgcacgcggaatacaacagacagaaagacatatatctcgcccaccgggtagcacaggcttgggagttagcccagttcattcatcatacctcaaagaaagcggacgtggtgctactgtgtggcgatctgaacatgcacccagaggacttgggatgctgtctgctgaaggagtggactggacttcacgacgcctacctcgagacacgagactttaagggctcagaggagggcaacacgatggttccgaaaaactgttacgtttctcagcaggagctgaagcctttccccttcggggtccggattgactatgtactttacaaggccgtgagtggcttctacatcagctgcaaaagctttgaaactaccactggatttgacccgcacagggggactccacttagtgatcatgaggccctaatggcaaccctgtttgttcgacactcgccacctcaacagaacccctcatcaacccatggacccgcagaacgttcaccgctgatgtgcgttttaaaggaggcctggaccgagctcgggctcggcatggcgcaagcgagatggtgggcgacctttgccagctacgtaatcggactgggactgctgctgctggcccttctctgtgtgctcgcagccggcggcggggccggagaagccgctatactgctgtggactccatccgtggggttagttctgtgggccggggctttctacttgttccacgtacaggaggtcaacgggctgtatcgggcccaggcggaacttcagcacgtcctaggcagggcccgtgaggcccaggatctcgggcctgaaccacagccagctcttctcctgggccagcaagagggcgacagaactaaagagcagtag

SEQ ID NO: 134981 - DNA, 1272 bp, Artificial Sequence
  derived and/or modified sequence
atgaagccgaacttctctttacggctgcgcatctttaatctcaattgctggggcattccatacctgagcaagcatcgggcagatcgcatgagaagactgggcgatttccttaaccaggagagcttcgatttggcgctgctcgaagaggtgtggagtgagcaggactttcaatatcttcggcagaagctttcgccaacataccctgctgcccaccacttcagaagtggcatcatcgggagtggtctgtgcgtctttagcaagcatccaatccaggagcttacgcagcacatttacactctaaatggttacccctatatgattcaccatggagattggttttcaggcaaggccgtgggcctgcttgtcctccatttgtctggaatggtgctcaacgcctacgtgactcatctccacgcagaatacaatcggcagaaagatatttatctcgcccacagggtggctcaagcatgggagctggcccagtttatacaccacacctctaagaaggccgacgttgtgctcctctgcggggatcttaacatgcaccctgaagacctgggctgctgcctgctcaaggaatggaccggacttcacgacgcctatctggagacccgggatttcaagggatcagaggagggtaatactatggttcctaagaactgctacgtgtcacagcaggagttgaaaccgttcccgtttggcgtccgcatcgactacgttttgtataaggcggtgtccggattctacattagctgcaaaagtttcgagacaaccacaggctttgatccacaccgcggaactcccctcagtgatcacgaagccttaatggccacactctttgtgcggcacagtcctccccagcagaacccttccagcacacacggtcctgctgagcggagtccgctcatgtgcgtgctgaaggaggcctggaccgagctgggactggggatggcccaggccagatggtgggcaacttttgccagctacgtcataggacttgggctgctcctgctagcccttctgtgtgtactggccgctgggggtggagctggcgaggctgcaattctgttatggactcctagtgtggggctggtactgtgggcaggagccttctacctattccatgttcaggaagtcaatgggctctacagggctcaggccgaactccagcatgtgctggggagagcaagagaagcacaggacttggggcctgaacctcagccagccctcctgctgggtcaacaggaaggtgataggacgaaggaacagtag

SEQ ID NO: 134982 - DNA, 1645 bp, Artificial Sequence
  derived and/or modified sequence
gcggccgcgaccgccggggacgagcttggaggaaaaggaaccgggagccgcccacccgggggcgctctccggacccccagggtcctagcgcgcggcccttaccgagcctgggcgcccggatttcggcagcggatcgcctttccgggttggcggcccgcctgattgggaacagccggccggttgccgggggaacgcgggagtcgggcccgacctgagccacgcgggcttggtgcccacctgtgcgcgccgcctgcgaagaaggaacggtctggggagaaggcgccgccggccgcccccgtccccaccgcggccgtcgctggagagttcgagccgcctagcgcccctggagctccccaaccatgaagcccaacttctccctgcgactgcggatcttcaacctcaactgctggggcattccgtacttgagcaagcaccgggccgaccgcatgaggcgcctgggagactttctgaaccaggagagcttcgacctggctttgctggaggaggtgtggagtgagcaggacttccagtacctgagacagaagctgtcacctacctacccagctgcacaccacttccggagcggaatcattggcagtggcctctgtgtcttctccaaacatccaatccaggagcttacccagcacatctacactctcaatggctacccctacatgatccatcatggtgactggttcagtgggaaggctgtggggctgctggtgctccatctaagtggcatggtgctcaacgcctatgtgacccatctccatgccgaatacaatcgacagaaggacatctacctagcacatcgtgtggcccaagcttgggaattggcccagttcatccaccacacatccaagaaggcagacgtggttctgttgtgtggagacctcaacatgcacccagaagacctgggctgctgcctgctgaaggagtggacagggcttcatgatgcctatcttgaaactcgggacttcaagggctctgaggaaggcaacacaatggtacccaagaactgctacgtcagccagcaggagctgaagccatttccctttggtgtccgcattgactacgtgctttacaaggcagtttctgggttttacatctcctgtaagagttttgaaaccactacaggctttgaccctcacaggggcacccccctctctgatcatgaagccctgatggctactctgtttgtgaggcacagccccccacagcagaaccccagctctacccacggaccagcagagaggtcgccgttgatgtgtgtgctaaaggaggcctggacggagctgggtctgggcatggctcaggctcgctggtgggccaccttcgctagctatgtgattggcctggggctgcttctcctggcactgctgtgtgtcctggcggctggaggaggggccggggaagctgccatactgctctggacccccagtgtagggctggtgctgtgggcaggtgcattctacctcttccacgtacaggaggtcaatggcttatatagggcccaggctgagctccagcatgtgctaggaagggcaagggaggcccaggatctgggcccagagcctcagccagccctactcctggggcagcaggagggggacagaactaaagaacaataaagcttggcccttta

SEQ ID NO: 134983 - protein, 206 aa, Artificial Sequence
  derived and/or modified sequence
MAEDADMRNELEEMQRRADQLADESLESTRRMLQLVEESKDAGIRTLVMLDEQGEQLDRVEEGMNHINQDMKEAEKNLKDLGKCCGLFICPCNKLKSSDAYKKAWGNNQDGVVASQPARVVDEREQMAISGGFIRRVTNDARENEMDENLEQVSGIIGNLRHMALDMGNEIDTQNRQIDRIMEKADSNKTRIDEANQRATKMLGSG

SEQ ID NO: 134984 - DNA, 621 bp, Artificial Sequence
  derived and/or modified sequence
atggccgaggacgccgacatgagaaacgagctggaggagatgcagagaagagccgaccagctggccgacgagagcctggagagcaccagaagaatgctgcagctggtggaggagagcaaggacgccggcatcagaaccctggtgatgctggacgagcagggcgagcagctggacagagtggaggagggcatgaaccacatcaaccaggacatgaaggaggccgagaagaacctgaaggacctgggcaagtgctgcggcctgttcatctgcccctgcaacaagctgaagagcagcgacgcctacaagaaggcctggggcaacaaccaggacggcgtggtggccagccagcccgccagagtggtggacgagagagagcagatggccatcagcggcggcttcatcagaagagtgaccaacgacgccagagagaacgagatggacgagaacctggagcaggtgagcggcatcatcggcaacctgagacacatggccctggacatgggcaacgagatcgacacccagaacagacagatcgacagaatcatggagaaggccgacagcaacaagaccagaatcgacgaggccaaccagagagccaccaagatgctgggcagcggctag

SEQ ID NO: 134985 - DNA, 621 bp, Artificial Sequence
  derived and/or modified sequence
atggcggaggatgccgatatgagaaacgagctggaagaaatgcagcgtcgggccgaccagctggcagatgaatccctggagtcaacaagacggatgctgcagctggttgaagaaagtaaggacgccggaataagaaccctcgttatgctcgacgagcagggcgaacagctcgaccgggtggaagaaggcatgaaccacattaatcaggacatgaaggaagccgaaaaaaacctgaaagatctgggcaagtgttgtgggctgttcatctgcccttgtaacaagctaaagagctcggacgcctacaaaaaagcctggggaaataatcaggacggggtcgtcgcatcccagcccgctagagttgtggacgagcgggagcaaatggcaatctcgggtgggttcatccgaagggtgactaacgacgccagggagaatgagatggatgagaacttagagcaggttagcggaattattggcaaccttaggcacatggcactggacatgggcaatgaaatcgatacacagaatcggcaaatcgatcgaattatggagaaggctgattctaacaagactcgaatagacgaagccaaccagagggccaccaaaatgctcggtagcggttag

SEQ ID NO: 134986 - DNA, 621 bp, Artificial Sequence
  derived and/or modified sequence
atggctgaagatgctgacatgagaaatgagctggaggagatgcagaggagagctgaccagctggctgatgagagcctggagagcaccaggaggatgctgcagctggtggaggagagcaaggatgctggcatccgcaccctggtgatgctggatgagcagggcgagcagctggacagagtggaggagggcatgaaccacatcaaccaggacatgaaggaggccgagaagaacctgaaggacctgggcaagtgctgcggcctcttcatctgcccctgcaacaagctgaagagcagtgatgcctacaagaaggcctggggcaacaaccaggatggagtggtggccagccagcctgcccgggtggtggatgagcgggagcagatggccatcagcggcggcttcatcagaagagtgaccaatgatgccagagaaaatgagatggatgagaacctggagcaggtgtctggcatcatcggcaacctgcggcacatggccctggacatgggaaatgaaattgacacccagaaccggcagattgaccgcatcatggagaaggctgacagcaacaagaccagaattgatgaggccaaccagagggccaccaagatgctgggcagcggctag

SEQ ID NO: 134987 - DNA, 621 bp, Artificial Sequence
  derived and/or modified sequence
atggccgaggacgccgacatgcggaacgagctggaggagatgcagaggagagctgaccagctggccgatgagagtctcgaaagcactaggcggatgctgcagctagtggaggagtctaaggacgccggaatacgtaccctggtgatgctggacgaacaaggagaacagctggatcgggtagaggaaggtatgaaccacatcaatcaggacatgaaggaagccgagaagaacctgaaagatctcggaaagtgctgcggtttatttatctgcccttgcaataagctgaaaagttccgacgcctacaagaaggcgtgggggaacaatcaagatggtgtggtggcatcacagccagcccgggttgtagacgaacgggaacagatggccatttcgggcggttttatacgcagggtcaccaatgatgcaagggagaacgagatggatgaaaatcttgaacaggtgagcgggattatagggaaccttagacacatggccctggacatggggaacgaaatagatacccaaaacagacagattgataggatcatggagaaagctgactcaaataagacccggatcgacgaagcaaaccaaagagccaccaagatgctcgggtctggctag

SEQ ID NO: 134988 - DNA, 621 bp, Artificial Sequence
  derived and/or modified sequence
atggccgaggatgcggacatgaggaatgagctggaagaaatgcagcgacgggcagaccagctggcagacgaaagtctggagagcacacgccgaatgctgcaattggtcgaggagagcaaagatgccggaattagaacactggtgatgctcgatgagcagggagagcagctagaccgcgtcgaggaagggatgaatcatattaatcaggatatgaaagaagccgagaaaaatctgaaagacctaggaaagtgttgtgggctgtttatctgcccctgtaataaactgaagtctagcgatgcctataagaaagcttggggtaacaaccaggacggggtggtagcatcacagcccgctagagttgtggacgagagggagcagatggccatttccgggggatttataagacgcgttacgaacgacgcccgtgagaacgagatggatgaaaacttagaacaagtatcaggcataattggaaatctcagacatatggctctagacatgggaaacgaaatcgacactcagaataggcagatcgaccgtattatggaaaaagccgattctaataaaacacggattgatgaggccaaccaacgcgctactaaaatgctgggcagtgggtag

SEQ ID NO: 134989 - DNA, 2050 bp, Artificial Sequence
  derived and/or modified sequence
tttgatgagggcagagctcacgttgcattgaagacgaaacctcggggaggtcaggcgctgtctttccttccctccctgctcggcggctccaccacagttgcaacctgcagaggcccggagaacacaaccctcccgagaagcccaggtccagagccaaacccgtcactgaccccccagcccaggcgcccagccactccccaccgctaccatggccgaagacgcagacatgcgcaatgagctggaggagatgcagcgaagggctgaccagttggctgatgagtcgctggaaagcacccgtcgtatgctgcaactggttgaagagagtaaagatgctggtatcaggactttggttatgttggatgaacaaggagaacaactcgatcgtgtcgaagaaggcatgaaccatatcaaccaagacatgaaggaggctgagaaaaatttaaaagatttagggaaatgctgtggccttttcatatgtccttgtaacaagcttaaatcaagtgatgcttacaaaaaagcctggggcaataatcaggacggagtggtggccagccagcctgctcgtgtagtggacgaacgggagcagatggccatcagtggcggcttcatccgcagggtaacaaatgatgcccgagaaaatgaaatggatgaaaacctagagcaggtgagcggcatcatcgggaacctccgtcacatggccctggatatgggcaatgagatcgatacacagaatcgccagatcgacaggatcatggagaaggctgattccaacaaaaccagaattgatgaggccaaccaacgtgcaacaaagatgctgggaagtggttaagtgtgcccacccgtgttctcctccaaatgctgtcgggcaagatagctccttcatgcttttctcatggtattatctagtaggtctgcacacataacacacatcagtccacccccattgtgaatgttgtcctgtgtcatctgtcagcttcccaacaatactttgtgtcttttgttctctcttggtctctttctttccaaaggttgtacatagtggtcatttggtggctctaactccttgaggtcttgagtttcatttttcattttctctcctcggtggcatttgctgaataacaacaatttaggaatgctcaatgtgctgttgattctttcaatccacagtattgttcttgtaaaactgtgacattccacagagttactgccacggtcctttgagtgtcaggctctgaatctctcaaaatgtgccgtctttggttcctcatggctgttatctgtctttatgatttcatgattagacaatgtggaattacataacaggcattgcactaaaagtgatgtgatttatgcatttatgcatgagaactaaatagatttttagattcctacttaaacaaaaactttccatgacagtagcatactgatgagacaacacacacacacacaaaacaacagcaacaacaacagaacaacaacaaagcatgctcagtattgagacactgtcaagattaagttataccagcaaaagtgcagtagtgtcacttttttcctgtcaatatatagagacttctaaatcataatcatccttttttaaaaaaaagaattttaaaaaagatggatttgacacactcaccatttaatcatttccagcaaaatatatgtttggctgaaattatgtcaaatggatgtaatatagggtttgtttgctgcttttgatggctatgttttggagagagcaatcttgctgtgaaacagtgtggatgtaaattttataaggctgactcttactaaccaccatttcccctgtggtttgttatcagtacaattctttgttgcttaatctagagctatgcacaccaaattgctgagatgtttagtagctgataaagaaaccttttaaaaaaataatataaatgaatgaaatataaactgtgagataaatatcattatagcatgtaatattaaattcctcctgtctcctctgtcagtttgtgaagtgattgacattttgtagctagtttaaaattattaaaaattatagactcca

SEQ ID NO: 134990 - protein, 368 aa, Artificial Sequence
  derived and/or modified sequence
MGTPPGLQTDCEALLSRFQETDSVRFEDFTELWRNMKFGTIFCGRMRNLEKNMFTKEALALAWRYFLPPYTFQIRVGALYLLYGLYNTQLCQPKQKIRVALKDWDEVLKFQQDLVNAQHFDAAYIFRKLRLDRAFHFTAMPKLLSYRMKKKIHRAEVTEEFKDPSDRVMKLITSDVLEEMLNVHDHYQNMKHVISVDKSKPDKALSLIKDDFFDNIKNIVLEHQQWHKDRKNPSLKSKTNDGEEKMEGNSQETERCERAESLAKIKSKAFSVVIQASKSRRHRQVKLDSSDSDSASGQGQVKATRKKEKKERLKPAGRKMSLRNKGNVQNIHKEDKPLSLSMPVITEEEENESLSGTEFTASKKRRKH

SEQ ID NO: 134991 - DNA, 2684 bp, Artificial Sequence
  derived and/or modified sequence
acgccgtagggggcgggccgttcgggcttggtttcctgggcgaccaccgctggctagtccgttagaggcgtgcgggcttcggaggcgtgcgggcttcgggtgccatggggactcctcccggcctgcagaccgactgcgaggcgctgctcagccgcttccaggagacggacagtgtacgcttcgaggacttcacggagctctggagaaacatgaagttcgggactatcttctgtggcagaatgagaaatttagaaaagaacatgtttacaaaagaagctttagctttggcttggcgatattttttacctccatacaccttccagatcagagttggtgctttgtatctgctatatggattatataatacccaactgtgtcaaccaaaacaaaagatcagagttgccctgaaggattgggatgaagttttaaaatttcagcaagatttagtaaatgcacagcattttgatgcagcttatatttttaggaagctacgactagacagagcatttcactttacagcaatgcccaaattgctgtcatataggatgaagaaaaaaattcaccgagctgaagttacagaagaatttaaggacccaagtgatcgtgtgatgaaacttatcacttctgatgtattagaggaaatgctgaatgttcatgatcattatcagaacatgaaacatgtaatttcagttgataagtccaagccagataaagccctcagcttgataaaggatgatttttttgacaatattaagaacatagttttggagcatcagcagtggcacaaagacagaaagaatccatccttaaagtcaaaaactaatgatggagaagaaaaaatggaaggaaattcacaagaaacggagagatgtgaaagggcagaatcattagcgaaaataaaatcaaaggccttttcagttgtcatacaggcatccaaatcaagaaggcatcgtcaagtcaaactcgactcttctgactctgattctgcatctggtcaagggcaagtcaaagcaactaggaaaaaagagaagaaagaaagattgaaaccagcaggaaggaagatgtctctcagaaacaaaggcaatgtgcagaatatacacaaggaagataaacctttaagtctgagtatgcctgtaattacagaagaagaagagaatgaaagtttgagtggaacagagttcactgcatccaagaagaggagaaaacactgaacaaagagcctggtgtagtttttaattttgagttttctgacagaagaaaagattgatattttgtgtattgaacaggaagactgccagtattaaaaaaatccttctgggaatctgtaggttatttcttggaaattgcaatacgtagttctagaataaaagtacaaaaaattagaataagaattctttaacattttctttaatgatttgcataaatggagataaaacttgtatttagtatgtaatagaaaaaattctgttattcgcagattgttactatttcctataaggttttgtgatactatactgtcctaatacagtctggtaatactattctattttatttaaaatattttttattgaaatattaatgtttattacatgcaaataactattttgtatctacagtcggataatggattttttattttgtatatttattctattttgtatattgttaagtgcaataaagtttttgccttgctttattttttaatacataaaacttacattctcataacgtgattgataacttaggaagttcacaatgtattttctacttctgcaattaaatattctttagtgcttgtttattattactaaatactaattaagtactaacaagtacttaaatactaatgtattaagtatttaagtactttctaataaaatctttaacaataataatgtaaatttcagaatgtgtctctggtacagaatagttgatattaacagaaaaaaaaaaatctgtagcttcatgaatatgccactctgttaatttcttgttccagacattttaatagagattgcttgagccatgttgtttgaattgctgccaatagcagaccatatccctatcatgttgttggctcaactgttttttttttttccctaatagagatggagtatcgctatgttgctcaggctggtcttgaactcctgggctcaagctatcctcctgcctcagcctcccaaagtactgggattataggtgtgagctactgtacccagccttaacctgtttcacagttgattatacttcatgctgttttccagcatggtattattaagggatttaaagtttgggttgcatgcctgtaatcccagcattttgggaggccgaggtgggcggatcacgaggtcaggagatcgagaccatcgtgactaacacagtgaaaccccgtctctaataaaaatacgaaaaattagccaggcgtggtggcgggcgcctgtaatcccagctactcgggaagctgaggcaggagaatggtgtgaacccagtgagccgagatcgtgccactgcactccagcctgggcaacagagtgagacttcgtctcaaaaaaaaaaaaaagtttgggttgaagatcaaattcgtgatatctctatatctaatctttaaaaatcagaatgctaatgctgacgcaaataaaattttcatttattagcaaaaaaaaaaaaaaaaaaaaaaaaaaaaa

SEQ ID NO: 134992 - DNA, 1107 bp, Artificial Sequence
  derived and/or modified sequence
atgggaactcccccaggtctccaaaccgactgtgaggccctgctgagtcggtttcaggaaacggacagtgtccgcttcgaggactttacagaattatggagaaatatgaagtttgggacgatcttctgtggcagaatgcgcaacttagaaaagaatatgttcactaaagaagctctggccctggcctggcgctattttcttccaccatacaccttccagatcagggtgggagccctctatttactgtatggcctctataacacccagctgtgtcaaccaaagcagaaaatccgcgttgcgctcaaagactgggatgaggtcttgaagttccaacaggacttggtgaacgctcagcatttcgacgccgcctacatattcagaaagctgcgacttgacagggcttttcacttcaccgccatgcctaaattactgtcatacagaatgaagaagaaaatccaccgcgctgaggtgacagaagagttcaaggaccctagtgatcgcgtaatgaagctcattacatcagatgtgctagaggagatgctcaatgtgcacgatcattaccaaaatatgaagcacgtcatttccgttgataagtccaagcccgacaaggctctctccctgatcaaagacgacttttttgacaacataaaaaatattgtgctggagcatcagcagtggcataaggacagaaagaatccctcactcaagtccaagaccaatgatggagaagagaaaatggagggaaactctcaggaaaccgagcgctgtgaacgcgccgagagtttggcaaaaattaaatcaaaagccttttccgtagttattcaggcctccaaatcacgccggcacaggcaagtgaaactggactcatccgactctgatagtgccagcggccagggccaggtaaaagctacgcgcaagaaggagaaaaaggaaaggctgaagccagctgggcgtaagatgtcactacgaaataagggaaacgtgcaaaacatccacaaagaagataagccactatcactcagcatgccagtgatcaccgaggaagaggaaaacgagagcctgagcggaaccgagtttactgcgtccaagaaacgtcgtaaacactag

SEQ ID NO: 134993 - DNA, 1107 bp, Artificial Sequence
  derived and/or modified sequence
atgggcaccccacctggcctgcagacagactgtgaggccctgctgagccgcttccaggagacagattctgtgcgctttgaggacttcacagagctgtggaggaacatgaagtttggcaccatcttctgtggccgcatgaggaacctggagaagaacatgttcaccaaggaggccctggccctggcctggagatacttcctgcccccctacaccttccagatccgggtgggcgccctgtacctgctgtatggcctgtacaacacccagctgtgccagcccaagcagaagatccgggtggccctgaaggactgggatgaggtgctgaagttccagcaggacctggtgaatgcccagcactttgatgctgcctacatcttcaggaagctgcggctggaccgggccttccacttcaccgccatgcccaagctgctgagctacaggatgaagaagaagatccacagagctgaggtgacagaggagttcaaggaccccagcgacagagtgatgaagctgatcaccagtgatgtgctggaggagatgctgaatgtgcatgaccactaccagaacatgaagcacgtgatctctgtggacaagagcaagccagacaaggccctgagcctcatcaaggatgacttctttgacaacatcaagaacatcgtgctggagcaccagcagtggcacaaggacaggaagaaccccagcctgaagagcaagaccaatgatggagaggagaagatggagggcaacagccaggagacagagcgctgtgaaagagctgagagcctggccaagatcaagagcaaggccttctctgtggtgatccaggccagcaagagccgccgccaccggcaggtgaagctggacagcagtgacagcgacagcgccagcggccagggccaggtgaaggccaccaggaagaaggagaagaaggagcggctgaagccagctggcaggaagatgagcctgagaaataaaggaaatgtgcagaacatccacaaggaggacaagcccctgagcctgtccatgcctgtgatcacagaggaggaggagaatgaaagcctgtctggaacagagttcaccgccagcaagaagaggaggaagcactag

SEQ ID NO: 134994 - DNA, 1107 bp, Artificial Sequence
  derived and/or modified sequence
atgggcaccccccccggcctgcagaccgactgcgaggccctgctgtcacgattccaggagacagatagtgtccgatttgaggatttcacggaattgtggcgaaacatgaagttcggtacgattttctgcggtcgaatgaggaatctcgaaaagaatatgtttaccaaagaggccttggcactagcatggcgatatttcctacccccatataccttccagatcagagttggcgctctctatctgttatacggcctatacaatacccaactttgccagccaaaacagaaaatccgcgtggcgctgaaagactgggatgaagttctgaagtttcagcaagacctggttaacgcccaacactttgacgccgcttatatttttcgaaaactgcggctcgacagggcttttcacttcacggcaatgccaaagctcttgtcttacaggatgaagaagaagatccatagagccgaggtaacagaagaatttaaagacccaagcgatagagtgatgaaactgatcacctcagacgtgctggaggagatgctgaatgtgcatgatcattaccaaaacatgaagcatgtgatatctgtagacaagagtaaaccggataaggcgttgtcactgatcaaggacgattttttcgataacataaaaaatatcgtgctggagcaccagcagtggcacaaggatagaaaaaacccctctctcaaatcaaagactaacgacggcgaggagaaaatggagggcaacagtcaagaaactgagcgctgtgaacgggcagagtcactggcaaagatcaaatctaaggcgttcagtgtggtgatccaagcttctaaatccagacgtcacaggcaggtgaagctggactcctcagatagcgattctgccagcggacagggacaggtcaaggccacccggaaaaaagaaaaaaaagaaagacttaagcccgctggaaggaagatgtcgcttagaaacaagggtaacgttcaaaacattcataaagaagacaagcccttgtccctgagtatgcccgttataacggaagaggaagagaacgagtcactgtcaggcactgagtttaccgctagtaagaagaggaggaaacattag

SEQ ID NO: 134995 - DNA, 2656 bp, Artificial Sequence
  derived and/or modified sequence
acgccgtagggggcgggccgttcgggcttggtttcctgggcgaccaccgctggctagtccgttagaggcgtgcgggcttcggaggcgtgcgggcttcgggtgccatggggactcctcccggcctgcagaccgactgcgaggcgctgctcagccgcttccaggagacggacagtgtacgcttcgaggacttcacggagctctggagaaacatgaagttcgggactatcttctgtggcagaatgagaaatttagaaaagaacatgtttacaaaagaagctttagctttggcttggcgatattttttacctccatacaccttccagatcagagttggtgctttgtatctgctatatggattatataatacccaactgtgtcaaccaaaacaaaagatcagagttgccctgaaggattgggatgaagttttaaaatttcagcaagatttagtaaatgcacagcattttgatgcagcttatatttttaggaagctacgactagacagagcatttcactttacagcaatgcccaaattgctgtcatataggatgaagaaaaaaattcaccgagctgaagttacagaagaatttaaggacccaagtgatcgtgtgatgaaacttatcacttctgatgtattagaggaaatgctgaatgttcatgatcattatcagaacatgaaacatgtaatttcagttgataagtccaagccagataaagccctcagcttgataaaggatgatttttttgacaatattaagaacatagttttggagcatcagcagtggcacaaagacagaaagaatccatccttaaagtcaaaaactaatgatggagaagaaaaaatggaaggaaattcacaagaaacggagagatgtgaaagggcagaatcattagcgaaaataaaatcaaaggccttttcagttgtcatacaggcatccaaatcaagaaggcatcgtcaagtcaaactcgactcttctgactctgattctgcatctggtcaagggcaagtcaaagcaactaggaaaaaagagaagaaagaaagattgaaaccagcaggaaggaagatgtctctcagaaacaaaggcaatgtgcagaatatacacaaggaagataaacctttaagtctgagtatgcctgtaattacagaagaagaagagaatgaaagtttgagtggaacagagttcactgcatccaagaagaggagaaaacactgaacaaagagcctggtgtagtttttaattttgagttttctgacagaagaaaagattgatattttgtgtattgaacaggaagactgccagtattaaaaaaatccttctgggaatctgtaggttatttcttggaaattgcaatacgtagttctagaataaaagtacaaaaaattagaataagaattctttaacattttctttaatgatttgcataaatggagataaaacttgtatttagtatgtaatagaaaaaattctgttattcgcagattgttactatttcctataaggttttgtgatactatactgtcctaatacagtctggtaatactattctattttatttaaaatattttttattgaaatattaatgtttattacatgcaaataactattttgtatctacagtcggataatggattttttattttgtatatttattctattttgtatattgttaagtgcaataaagtttttgccttgctttattttttaatacataaaacttacattctcataacgtgattgataacttaggaagttcacaatgtattttctacttctgcaattaaatattctttagtgcttgtttattattactaaatactaattaagtactaacaagtacttaaatactaatgtattaagtatttaagtactttctaataaaatctttaacaataataatgtaaatttcagaatgtgtctctggtacagaatagttgatattaacagaaaaaaaaaaatctgtagcttcatgaatatgccactctgttaatttcttgttccagacattttaatagagattgcttgagccatgttgtttgaattgctgccaatagcagaccatatccctatcatgttgttggctcaactgttttttttttttccctaatagagatggagtatcgctatgttgctcaggctggtcttgaactcctgggctcaagctatcctcctgcctcagcctcccaaagtactgggattataggtgtgagctactgtacccagccttaacctgtttcacagttgattatacttcatgctgttttccagcatggtattattaagggatttaaagtttgggttgcatgcctgtaatcccagcattttgggaggccgaggtgggcggatcacgaggtcaggagatcgagaccatcgtgactaacacagtgaaaccccgtctctaataaaaatacgaaaaattagccaggcgtggtggcgggcgcctgtaatcccagctactcgggaagctgaggcaggagaatggtgtgaacccagtgagccgagatcgtgccactgcactccagcctgggcaacagagtgagacttcgtctcaaaaaaaaaaaaaagtttgggttgaagatcaaattcgtgatatctctatatctaatctttaaaaatcagaatgctaatgctgacgcaaataaaattttcatttattagca

SEQ ID NO: 134996 - DNA, 1107 bp, Artificial Sequence
  derived and/or modified sequence
atggggacacccccaggccttcaaacagactgcgaggccttattgtcccgtttccaagaaactgactcggttaggttcgaggattttacagaactgtggaggaacatgaaatttggtaccatcttttgcggtagaatgagaaaccttgaaaagaacatgttcacaaaagaggccttggccctagcatggcggtacttccttcctccatacaccttccagatcagggtcggcgctctctacttgctgtacgggctgtataacacccaactttgtcagccaaagcagaaaatcagagtcgcactcaaggactgggatgaagtgctaaaatttcagcaggacttagtcaacgcccagcactttgacgccgcatatatatttcgcaaactccgtctcgatagggcatttcacttcaccgcaatgccaaagctactgtcttaccgaatgaaaaagaaaattcacagagctgaggtgactgaggagttcaaggacccttccgatagggttatgaaactgataacctcagacgtcctggaggagatgctgaatgtgcacgatcattaccagaacatgaaacatgtaatctcagtagacaagagtaagcccgataaagcactttctcttatcaaagacgatttctttgacaatataaaaaacatagttctggagcatcaacagtggcacaaagacaggaaaaacccatcccttaagtcaaagacaaacgatggcgaggagaaaatggaagggaatagtcaggagactgagcggtgcgagcgggcagagtccctcgcaaagataaaaagcaaagccttctccgttgtgattcaagcctccaaaagtaggcggcatcgacaagtgaagctggacagctccgactctgactccgcgagcggacagggtcaggtgaaggcaacccgcaagaaagaaaaaaaagagagactgaagcctgccggacgaaaaatgtccctgcggaataaagggaatgtgcagaatatccacaaagaagacaaaccgctctctttatctatgccagtgattaccgaggaagaagagaacgaaagtctctcgggaacagagtttactgcctccaagaaacgacgaaagcattag

SEQ ID NO: 134997 - DNA, 1107 bp, Artificial Sequence
  derived and/or modified sequence
atgggcaccccccccggcctgcagaccgactgcgaggccctgctgagcagattccaggagaccgacagcgtgagattcgaggacttcaccgagctgtggagaaacatgaagttcggcaccatcttctgcggcagaatgagaaacctggagaagaacatgttcaccaaggaggccctggccctggcctggagatacttcctgcccccctacaccttccagatcagagtgggcgccctgtacctgctgtacggcctgtacaacacccagctgtgccagcccaagcagaagatcagagtggccctgaaggactgggacgaggtgctgaagttccagcaggacctggtgaacgcccagcacttcgacgccgcctacatcttcagaaagctgagactggacagagccttccacttcaccgccatgcccaagctgctgagctacagaatgaagaagaagatccacagagccgaggtgaccgaggagttcaaggaccccagcgacagagtgatgaagctgatcaccagcgacgtgctggaggagatgctgaacgtgcacgaccactaccagaacatgaagcacgtgatcagcgtggacaagagcaagcccgacaaggccctgagcctgatcaaggacgacttcttcgacaacatcaagaacatcgtgctggagcaccagcagtggcacaaggacagaaagaaccccagcctgaagagcaagaccaacgacggcgaggagaagatggagggcaacagccaggagaccgagagatgcgagagagccgagagcctggccaagatcaagagcaaggccttcagcgtggtgatccaggccagcaagagcagaagacacagacaggtgaagctggacagcagcgacagcgacagcgccagcggccagggccaggtgaaggccaccagaaagaaggagaagaaggagagactgaagcccgccggcagaaagatgagcctgagaaacaagggcaacgtgcagaacatccacaaggaggacaagcccctgagcctgagcatgcccgtgatcaccgaggaggaggagaacgagagcctgagcggcaccgagttcaccgccagcaagaagagaagaaagcactag

SEQ ID NO: 134998 - protein, 134 aa, Artificial Sequence
  derived and/or modified sequence
MDVFMKGLSMAKEGVVAAAEKTKQGVTEAAEKTKEGVLYVGSKTREGVVQGVASVAEKTKEQASHLGGAVFSGAGNIAAATGLVKREEFPTDLKPEEVAQEAAEEPLIEPLMEPEGESYEDPPQEEYQEYEPEA

SEQ ID NO: 134999 - DNA, 405 bp, Artificial Sequence
  derived and/or modified sequence
atggacgtgttcatgaagggcctgagcatggccaaggagggcgtggtggccgccgccgagaagaccaagcagggcgtgaccgaggccgccgagaagaccaaggagggcgtgctgtacgtgggcagcaagaccagagagggcgtggtgcagggcgtggccagcgtggccgagaagaccaaggagcaggccagccacctgggcggcgccgtgttcagcggcgccggcaacatcgccgccgccaccggcctggtgaagagagaggagttccccaccgacctgaagcccgaggaggtggcccaggaggccgccgaggagcccctgatcgagcccctgatggagcccgagggcgagagctacgaggaccccccccaggaggagtaccaggagtacgagcccgaggcctag

SEQ ID NO: 135000 - DNA, 405 bp, Artificial Sequence
  derived and/or modified sequence
atggatgtgtttatgaagggactatctatggcaaaggaaggtgtggtggccgcagcagaaaagaccaaacaaggggtcacggaagccgcagagaaaacgaaggagggtgtactttatgtgggctctaagactagagagggggttgtccagggcgtggccagcgtagccgaaaagacgaaggaacaagctagccaccttggtggcgccgtcttcagtggagctggaaatattgctgctgccacggggctggtgaagcgtgaggagtttccgacggatctgaagcctgaggaggtcgcgcaagaagcagctgaagaaccactgattgaacctctcatggagcctgaaggtgagagctacgaggaccccccacaggaagagtaccaggaatacgagcctgaagcttag

SEQ ID NO: 135001 - DNA, 405 bp, Artificial Sequence
  derived and/or modified sequence
atggatgttttcatgaaggggctatccatggccaaggaaggtgtggtcgctgccgctgagaaaacaaagcaaggcgtgactgaggcagccgaaaagaccaaagagggggtgttatatgtgggctcaaagacaagagaaggagttgtgcagggagtggccagcgttgctgaaaaaaccaaagaacaagcctcccacctaggcggtgccgtatttagtggggcaggaaacatcgccgccgcaaccggtcttgtgaaacgtgaagagtttccaacagatcttaagccggaggaagttgcccaggaagcagcggaggagccccttatcgaacctcttatggagccagagggcgaatcctatgaggacccaccacaggaagaatatcaggagtacgaaccagaggcctag

SEQ ID NO: 135002 - DNA, 405 bp, Artificial Sequence
  derived and/or modified sequence
atggatgtgtttatgaagggcctaagtatggccaaagagggcgtggttgctgccgccgaaaaaacgaaacagggcgtgacagaagctgcagagaagactaaggagggggtgctctatgtcggatcgaaaacacgcgagggagtggttcagggggtggctagcgtcgctgaaaaaacaaaggaacaggccagtcacctgggcggagctgttttttcaggtgccggcaatattgctgcagccacaggcctggtgaaacgggaggaatttccaactgacctgaaacccgaggaggtggcccaagaagccgctgaagagcccttgatcgagccactaatggagcctgagggcgagagctatgaggatcctccgcaggaagagtatcaggaatacgagccagaggcgtag

SEQ ID NO: 135003 - DNA, 405 bp, Artificial Sequence
  derived and/or modified sequence
atggacgtttttatgaagggcctgtccatggccaaggagggcgtagtcgccgcggcagagaaaactaagcagggggtcacggaagcggccgaaaagactaaagagggcgtcctctatgttgggtctaaaacaagggaaggggtagtgcagggcgtggcaagtgtagcagagaagaccaaggaacaggcttctcacctcggaggggctgttttctcaggggccgggaacattgccgccgccactgggctggtcaaaagggaggaattccccaccgatcttaagcccgaagaagttgcgcaggaagccgctgaagagccccttattgagccacttatggagcccgagggagaaagctacgaagacccaccacaagaagagtaccaggagtacgagcccgaagcctag

SEQ ID NO: 135004 - DNA, 405 bp, Artificial Sequence
  derived and/or modified sequence
atggatgtgttcatgaagggcctgtccatggccaaggagggcgtggtggccgctgctgagaagaccaagcagggcgtgacagaagctgctgagaagaccaaggagggcgtgctgtatgtgggcagcaagacccgggagggcgtggtgcagggcgtggcctctgtggccgagaagaccaaggagcaggccagccacctgggcggcgctgtgttcagcggggccggcaacattgctgctgccaccggcctggtgaagcgggaggagttccccacagacctgaagccagaggaggtggcccaggaggccgctgaggagcccctcatcgagcccctgatggagcctgagggggagagctatgaggaccccccccaggaggagtaccaggagtatgagcctgaggcctag

SEQ ID NO: 135005 - DNA, 405 bp, Artificial Sequence
  derived and/or modified sequence
atggacgtgttcatgaagggcctgagcatggccaaggagggcgtggtcgccgctgcagaaaaaaccaagcagggtgtgacagaggcagctgagaagacaaaagagggggtgctctatgtgggcagcaaaactcgcgaaggcgttgtgcagggagttgcttcagtagccgagaaaacgaaggaacaagcttctcatctcgggggggctgtgtttagtggcgcaggaaacatagcggctgcgaccggccttgtgaaacgggaggagttccctactgacctgaagccagaggaagtagcccaggaggcagcagaagagccgttaatcgaacccctcatggagcccgaaggcgaatcctatgaagatcccccccaggaggagtaccaagagtatgaaccagaagcctag

SEQ ID NO: 135006 - DNA, 405 bp, Artificial Sequence
  derived and/or modified sequence
atggacgtgttcatgaagggcctgagcatggccaaggagggcgtggtggccgcagcagagaagacgaaacaaggagtcacagaagccgcggagaaaactaaggaaggggtgttgtacgtgggaagcaaaacccgagaaggcgtggtccaaggagtggccagcgtagctgaaaaaacaaaagaacaagcttcgcacctgggcggagctgtgtttagtggcgcgggaaacatcgcagcagcaaccggccttgtgaagcgggaggaattccccactgatctgaaacccgaagaagtggctcaagaagctgctgaggagccactgatcgagccgttgatggaacctgagggcgaatcatacgaggatccaccccaggaggagtatcaggaatacgaacctgaagcttag

SEQ ID NO: 135007 - DNA, 405 bp, Artificial Sequence
  derived and/or modified sequence
atggacgtgttcatgaagggcctgagcatggccaaggagggcgtggtggccgcagccgaaaaaaccaaacagggagtgacagaagctgccgagaaaacaaaagaaggcgtcctgtatgtgggcagcaagactcgggagggcgtcgtgcagggggtcgcgtccgtggccgagaagactaaggaacaagcgtcccacctgggtggggccgtgttctccggtgcgggcaacatcgccgctgccacagggttggtgaagcgagaggaatttccaacggaccttaaacccgaggaggtggcacaagaggcagcagaagaacccctgatcgaaccgctgatggagcccgaaggcgaaagctacgaggatccacctcaagaggagtatcaggaatacgaaccagaggcctag

SEQ ID NO: 135008 - DNA, 405 bp, Artificial Sequence
  derived and/or modified sequence
atggacgtgttcatgaagggcctgagcatggccaaggagggcgtggtcgcagccgcagagaagacgaagcaaggcgtaacagaggccgcggagaagaccaaagaaggggtgctgtatgtgggatctaaaacgcgggaaggggttgttcagggcgttgcgtctgttgctgagaagactaaggaacaggcctcacacctcggaggagctgtgttcagcggggcaggcaatatcgctgccgcaactggtctcgtgaaacgcgaggagttccccaccgacctcaaaccggaagaagtcgcacaggaagccgccgaagaacctctgatcgagccactgatggagccagagggggagtcgtatgaagacccccctcaggaagagtatcaagagtatgagccagaggcctag

SEQ ID NO: 135009 - DNA, 405 bp, Artificial Sequence
  derived and/or modified sequence
atggacgttttcatgaagggcttatccatggcaaaggagggtgttgtggctgccgcagagaagaccaagcagggtgtcacagaggctgcagaaaagactaaagagggggtgctttatgtcgggagtaagacccgggagggagtggtacaaggggtggcctccgtcgccgaaaagacaaaggaacaggccagccatctcggcggtgccgtgttctcaggcgcaggcaacatcgccgctgccacaggacttgtcaagagagaagaatttcccaccgacctcaagcctgaggaggtcgcccaagaggccgcagaagagcccttgattgaacccttgatggaacctgagggcgaatcctatgaagatccacctcaggaggaataccaggagtatgagcccgaggcctag

SEQ ID NO: 135010 - DNA, 405 bp, Artificial Sequence
  derived and/or modified sequence
atggacgtgttcatgaaaggattgagcatggccaaggagggtgtcgtcgcggcagctgaaaaaaccaagcagggcgtgacggaggccgctgagaaaaccaaagagggcgtattgtatgttgggtccaagacaagagagggagtcgtgcagggcgtggcaagcgtcgcggaaaagaccaaggaacaggccagccacctcggcggagccgtctttagcggagcaggtaatatcgctgccgcaactggtctcgttaaaagggaagaattccctacggacttgaaacctgaggaggtggcacaagaagccgctgaagaacctttgattgaacccttaatggaacccgaaggggagagttatgaagatcctcctcaggaggagtatcaggagtatgagcccgaggcctag

SEQ ID NO: 135011 - DNA, 405 bp, Artificial Sequence
  derived and/or modified sequence
atggacgtcttcatgaaaggcctgtcaatggcaaaagaaggggttgtcgccgcagccgaaaaaaccaaacagggagtaaccgaagctgcggagaagactaaagaaggggttctgtacgtcggcagtaagacccgcgagggcgtggtccagggagtcgcatccgtcgccgagaagacaaaggagcaggcgtctcatcttggcggagcagttttcagcggcgcaggaaatatcgccgcagctactggcctggtgaagagggaagagtttcctacagacctgaagcccgaagaggtggctcaagaggcggctgaggagcctttaatagagccattgatggaaccagagggcgaatcctatgaggacccgcctcaggaggagtaccaggaatatgagcccgaagcttag

SEQ ID NO: 135012 - DNA, 405 bp, Artificial Sequence
  derived and/or modified sequence
atggatgtttttatgaagggcctgagcatggctaaggagggggttgtagcagccgctgagaaaaccaagcagggcgtcaccgaggcagctgagaagacaaaggagggcgtcctgtacgtgggctccaagaccagagagggcgtggtgcagggagtcgcgtccgtcgccgagaaaacaaaagagcaggccagccatctgggcggtgccgtgttttccggagcaggaaatatcgccgctgccacgggacttgtaaagagggaggagttcccaactgatttaaaacccgaagaggtggcccaggaagctgccgaagagccacttatcgaacctttgatggagcccgagggcgagtcttatgaagatcctccacaggaggagtatcaagaatatgaacctgaagcctag

SEQ ID NO: 135013 - DNA, 1383 bp, Artificial Sequence
  derived and/or modified sequence
ggtccaccccggcctggcctagcggagcccccgcgtccgcccgccgcagccgccgctccatccccagccccggccccgcatccaggcgggtcctggatattcgcgccgaacccagcactccggttcgacggggctgcagtttgcagggcccggataaccgaggcagtggcccctcccgcgtccccaggtttcaaggacgctaggactctccgcggccctgaggcttcgcactggggagtggggccgccaggatggacgtgttcatgaagggcctgtccatggccaaggagggcgttgtggcagccgcggagaaaaccaagcagggggtcaccgaggcggcggagaagaccaaggagggcgtcctctacgtcggaagcaagacccgagaaggtgtggtacaaggtgtggcttcagtggctgaaaaaaccaaggaacaggcctcacatctgggaggagctgtgttctctggggcagggaacatcgcagcagccacaggactggtgaagagggaggaattccctactgatctgaagccagaggaagtggcccaggaagctgctgaagaaccactgattgagcccctgatggagccagaaggggagagttatgaggacccaccccaggaggaatatcaggagtatgagccagaggcgtaggggcccaggagagcccccaccagcagcacaattctgtccctgtccctgccccgccccccagagccagggctgtccttagactccttctccccaatcacgagatcttccttccgctctgaggcaaccccctcggagcctgtgttagtgtctgtccatctgtctgtcctacccgcccgcgtccaaccccggggcatggacagggccagggttgcggtcgcggctgggagcctcgcccctccagtgttgcctcctcccatccagcgtctgcgcggatgtagcatgttctatgtgtttttaaacgaagatccgagcgacggctcctccccgatccccgacagtggctctccaagcggcccccgggcagccccagagcaccccgcccgactcccattaacctcgagaacctttttttttttaaccaaaaccaggagccaggctgtgccatgtcccccgccccccatcccagccggcccggtccgaacgcgggcgtcgtgtgttgtgattgtggcatggagagtccccatcccccccatgtgagcgtgtcccgggcgggtgggcccggccgcccccgagagtccatgaataaagctaatctgtctgtagccagagccgcaccggcagggctgggctgggcgccgggtgggggcgacacgtggcggcgagtcttccaggtcccagcctacccctctgtgctctttggggtctggcacacacagcccaggtacaa

SEQ ID NO: 135014 - DNA, 1234 bp, Artificial Sequence
  derived and/or modified sequence
tgccgcagcgccggagccggagccggagccggagcgcgcgagctcgcagggcgcgaggaacgagcggtggctggctacgcacccgagacccgggcactgctgcgctcctgctcaggacccgcgacccgagcgcctgatcccggccctatcccccctccggcccctggtccaccccggcctggcctagcggagcccccgcgtccgcccgccgcagccgccgctccatccccagccccggccccgcatccaggccgccaggatggacgtgttcatgaagggcctgtccatggccaaggagggcgttgtggcagccgcggagaaaaccaagcagggggtcaccgaggcggcggagaagaccaaggagggcgtcctctacgtcggaagcaagacccgagaaggtgtggtacaaggtgtggcttcagtggctgaaaaaaccaaggaacaggcctcacatctgggaggagctgtgttctctggggcagggaacatcgcagcagccacaggactggtgaagagggaggaattccctactgatctgaagccagaggaagtggcccaggaagctgctgaagaaccactgattgagcccctgatggagccagaaggggagagttatgaggacccaccccaggaggaatatcaggagtatgagccagaggcgtaggggcccaggagagcccccaccagcagcacaattctgtccctgtccctgccccgccccccagagccagggctgtccttagactccttctccccaatcacgagatcttccttccgctctgaggcaaccccctcggagcctgtgttagtgtctgtccatctgtctgtcctacccgcccgcgtccaaccccggggcatggacagggccagggttgcggtcgcggctgggagcctcgcccctccagtgttgcctcctcccatccagcgtctgcgcggatgtagcatgttctatgtgtttttaaacgaagatccgagcgacggctcctccccgatccccgacagtggctctccaagcggcccccgggcagccccagagcaccccgcccgactcccattaacctcgagaacctttttttttttaaccaaaaccaggagccaggctgtgccatgtcccccgccccccatcccagccggcccggtccgaacgcgggcgtcgtgtgttgtgattgtggcatggagagtccccatcccccccatgtgagcgtgtcccgggcgggtgggcccggccgccccc

SEQ ID NO: 135015 - DNA, 552 bp, Artificial Sequence
  derived and/or modified sequence
gtgcatgaccgtgtgactgtgccgtgcgtgtacaggcgggtcctggatattcgcgccgaacccagcactccggttcgacggggctgcagtttgcagggcccggataaccgaggccgccaggatggacgtgttcatgaagggcctgtccatggccaaggagggcgttgtggcagccgcggagaaaaccaagcagggggtcaccgaggcggcggagaagaccaaggagggcgtcctctacgtcggaagcaagacccgagaaggtgtggtacaaggtgtggcttcagtggctgaaaaaaccaaggaacaggcctcacatctgggaggagctgtgttctctggggcagggaacatcgcagcagccacaggactggtgaagagggaggaattccctactgatctgaagccagaggaagtggcccaggaagctgctgaagaaccactgattgagcccctgatggagccagaaggggagagttatgaggacccaccccaggaggaatatcaggagtatgagccagaggcgtaggggcccaggagagcccccaccagcag

SEQ ID NO: 135016 - DNA, 730 bp, Artificial Sequence
  derived and/or modified sequence
gaccgtgtgactgtgccgtgcgtgtacaggcgggtcctggatattcgcgccgaacccagcactccggttcgacggggctgcagtttgcagggcccggataaccgaggcagtggcccctcccgcgtccccaggtttcaaggacgctaggactctccgcggccctgaggcttcgcactggggagtggggccgccaggatggacgtgttcatgaagggcctgtccatggccaaggagggcgttgtggcagccgcggagaaaaccaagcagggggtcaccgaggcggcggagaagaccaaggagggcgtcctctacgtcggaagcaagacccgagaaggtgtggtacaaggtgtggcttcagtggctgaaaaaaccaaggaacaggcctcacatctgggaggagctgtgttctctggggcagggaacatcgcagcagccacaggactggtgaagagggaggaattccctactgatctgaagccagaggaagtggcccaggaagctgctgaagaaccactgattgagcccctgatggagccagaaggggagagttatgaggacccaccccaggaggaatatcaggagtatgagccagaggcgtaggggcccaggagagcccccaccagcagcacaattctgtccctgtccctgccccgccccccagagccagggctgtccttagactccttctccccaatcacgagatcttccttccgctctgaggcaaccccct

SEQ ID NO: 135017 - protein, 1469 aa, Artificial Sequence
  derived and/or modified sequence
MDVDAEREKITQEIKELERILDPGSSGSHVEISESSLESDSEADSLPSEDLDPADPPISEEERWGEASNDEDDPKDKTLPEDPETCLQLNMVYQEVIQEKLAEANLLLAQNREQQEELMRDLAGSKGTKVKDGKSLPPSTYMGHFMKPYFKDKVTGVGPPANEDTREKAAQGIKAFEELLVTKWKNWEKALLRKSVVSDRLQRLLQPKLLKLEYLHQKQSKVSSELERQALEKQGREAEKEIQDINQLPEEALLGNRLDSHDWEKISNINFEGSRSAEEIRKFWQNSEHPSINKQEWSREEEERLQAIAAAHGHLEWQKIAEELGTSRSAFQCLQKFQQHNKALKRKEWTEEEDRMLTQLVQEMRVGSHIPYRRIVYYMEGRDSMQLIYRWTKSLDPGLKKGYWAPEEDAKLLQAVAKYGEQDWFKIREEVPGRSDAQCRDRYLRRLHFSLKKGRWNLKEEEQLIELIEKYGVGHWAKIASELPHRSGSQCLSKWKIMMGKKQGLRRRRRRARHSVRWSSTSSSGSSSGSSGGSSSSSSSSSEEDEPEQAQAGEGDRALLSPQYMVPDMDLWVPARQSTSQPWRGGAGAWLGGPAASLSPPKGSSASQGGSKEASTTAAAPGEETSPVQVPARAHGPVPRSAQASHSADTRPAGAEKQALEGGRRLLTVPVETVLRVLRANTAARSCTQKEQLRQPPLPTSSPGVSSGDSVARSHVQWLRHRATQSGQRRWRHALHRRLLNRRLLLAVTPWVGDVVVPCTQASQRPAVVQTQADGLREQLQQARLASTPVFTLFTQLFHIDTAGCLEVVRERKALPPRLPQAGARDPPVHLLQASSSAQSTPGHLFPNVPAQEASKSASHKGSRRLASSRVERTLPQASLLASTGPRPKPKTVSELLQEKRLQEARAREATRGPVVLPSQLLVSSSVILQPPLPHTPHGRPAPGPTVLNVPLSGPGAPAAAKPGTSGSWQEAGTSAKDKRLSTMQALPLAPVFSEAEGTAPAASQAPALGPGQISVSCPESGLGQSQAPAASRKQGLPEAPPFLPAAPSPTPLPVQPLSLTHIGGPHVATSVPLPVTWVLTAQGLLPVPVPAVVSLPRPAGTPGPAGLLATLLPPLTETRAAQGPRAPALSSSWQPPANMNREPEPSCRTDTPAPPTHALSQSPAEADGSVAFVPGEAQVAREIPEPRTSSHADPPEAEPPWSGRLPAFGGVIPATEPRGTPGSPSGTQEPRGPLGLEKLPLRQPGPEKGALDLEKPPLPQPGPEKGALDLGLLSQEGEAATQQWLGGQRGVRVPLLGSRLPYQPPALCSLRALSGLLLHKKALEHKATSLVVGGEAERPAGALQASLGLVRGQLQDNPAYLLLRARFLAAFTLPALLATLAPQGVRTTLSVPSRVGSESEDEDLLSELELADRDGQPGCTTATCPIQGAPDSGKCSASSCLDTSNDPDDLDVLRTRHARHTRKRRRLV

SEQ ID NO: 135018 - DNA, 4661 bp, Artificial Sequence
  derived and/or modified sequence
gcgggagtcatggatgtagatgctgaaagagagaagataacacaggagatcaaggagctggaaaggattttggatcccggctcctcgggctcccacgtggagatctcagaatcaagtctcgagtcagattctgaagcagattcactgccttctgaggacttggatcctgccgatcccccgatctcggaagaagaaaggtggggcgaagccagcaatgacgaggacgatcccaaggataaaaccctccctgaagacccagaaacctgcctgcagctgaacatggtctaccaggaggtcatccaggagaagctggctgaggccaacctgctgctggcccagaaccgggagcagcaggaggaactcatgagggatctggctgggtccaaaggcaccaaggtgaaagatggcaaaagcctgcccccaagcacatacatggggcacttcatgaagccgtatttcaaggacaaggtcacgggcgtggggccacctgccaacgaggacacacgagagaaggctgcccaggggatcaaggctttcgaggagctccttgtgaccaaatggaaaaactgggaaaaggccttgctccgaaagtcagtggtgagtgaccgcctgcagcgattgcttcagcccaagttactgaagctcgagtacttgcaccagaagcagagcaaagtctccagtgagctggagaggcaagccctggagaagcagggcagggaagccgagaaggagatccaggacatcaaccagcttccagaagaggccttgctgggaaacaggctggacagccacgactgggagaagatttccaatattaactttgaaggcagccgcagtgcagaggagatccggaagttctggcagaactcggagcaccccagcatcaacaagcaggagtggagcagggaggaggaggagcggctgcaggcgatcgcggctgcacacggccacctggagtggcagaagattgcagaggagctggggaccagccgcagcgccttccagtgcctgcagaaattccagcagcacaacaaagctctgaaacgcaaggagtggacagaggaggaggaccgcatgctcacgcagctggtgcaggagatgcgcgtcggcagccacatcccctaccgcagaattgtctactatatggaagggagagactccatgcagctgatctaccgatggaccaagagcttggatcctggtctgaagaagggttactgggccccggaggaagatgctaagttgcttcaagctgttgccaaatacggggagcaggattggtttaaaatccgggaagaggtgccaggtaggagcgatgcccagtgccgagatcggtatctcaggagattacatttcagcttgaaaaagggtcggtggaatttaaaagaagaggaacagttaattgaattaatagaaaaatatggtgtcggtcactgggcaaaaatagcttctgagctgccccatcggtctggctcccagtgtctgagcaagtggaagatcatgatggggaagaagcagggtctccggaggcggcggcggagggcccgtcacagcgtccggtggagctctaccagcagcagcggcagcagcagtggcagcagtggagggagcagcagcagcagcagcagcagcagcgaggaggacgagccagagcaggcgcaggccggggagggtgacagagcgctgctgtccccacagtacatggtcccggacatggacctgtgggttcctgccaggcagagcaccagccagccatggagaggaggggcaggggcctggctgggaggccccgctgcctccctcagccctcccaaggggtccagtgccagccagggcggcagcaaggaagcttccaccacagccgcggctcctggagaggagacgagtccggtgcaggtccctgccagggcccacggccctgtcccgaggtctgcccaggcctcccactcagcagacactcgcccggcgggcgcagagaagcaggccctggagggtgggaggcgtctgctgacagtgcctgtggagaccgtgctgagggtgctcagggccaacacggctgctcggagctgcacacagaaagagcagctgaggcagccacccctgcccacctcatccccaggggtcagctctggtgacagcgtggcccgatcccatgtgcagtggctacggcacagagccacccagagtgggcagcggcgctggagacacgctctgcaccggaggctcctgaaccgcaggctgctgctggctgtgaccccttgggtaggggacgttgtcgtgccctgcacacaggcttcccagagacccgccgtagtgcagactcaagcggatggcctcagggagcagctgcagcaggcccgcctggccagcacccctgtgtttaccctgtttacccagctgttccacatcgatactgccggctgcttggaggtcgtccgagagaggaaggccctgccacccaggctgccccaggctggtgctcgggacccaccagttcatcttctgcaggcatcctcaagtgcccagagcaccccaggccacctcttcccaaacgtgccggctcaagaagcctcaaagagtgccagccacaaagggagccgaagactggcgtccagccgggtggagcgcaccctaccccaggcgtccctgctggcttcaaccggcccccggcccaagcccaagactgtgtcggagctgcttcaggagaagcggcttcaggaggcccgtgccagggaggccacccggggcccggtggtgctcccgtcccagctgctggtctcctcgtctgtgatcctccagccccctctaccacacaccccacacggccgcccagccccgggtcccaccgtcttaaatgtaccgctctctgggcctggggcccccgcggcagccaaacctggcacttctggctcctggcaggaggctgggacttcagccaaggacaagagactctccaccatgcaagccctgcccctcgctcctgtcttctcagaggccgagggcacagcccctgctgcttcccaagcccctgccctgggccccggccagatctctgtgagctgccccgagagtggtctcggacagtctcaggcccccgctgcatcccggaagcagggcctgcctgaggcgccaccctttctccccgcagcccccagccccaccccactgcccgtccagcccctcagcctgacgcacataggagggccacatgtggcgaccagtgtccccctgcctgtcacctgggtgctcacagcccaggggcttctccctgttcctgtaccagctgtggtgagccttcccaggccagcagggacccctggccccgcagggctgctggccactctgctgcctcccctgactgagactcgggcggcccagggccccagggccccagcgttgagcagctcttggcagcccccagccaatatgaacagggaaccggagccttcctgcaggacagacaccccagctcctcccacacacgccctctcccaaagtcctgcagaagcggatggcagtgtggcctttgtccctggagaggcccaggtggccagggagatacctgagcccaggacgtcctcccacgctgaccctcctgaagcagaacccccttggtccgggaggctgccagccttcggtggtgtcatcccagcaactgagccaagggggacgccggggtccccctcagggacacaggagcccagggggcctctgggcctggagaagctgcccctgcgccagcctgggcctgagaagggggccctggacctggagaagccgcccctaccccagcctgggcctgagaagggggccctggacctgggcctgctgtcccaggagggcgaggcggccacacagcagtggctggggggccagcggggggtgcgtgtgcctcttctgggcagcagactgccctatcagcccccagccctgtgcagcctgcgagctctgtccggtctcctactccacaagaaggccctggagcacaaggccacctccctggtggtggggggcgaggctgagcggccggccggagcactgcaagcctcactggggctggtgcgggggcagctccaggacaacccggcctacctcctgttgcgggcgcggttcctggcagccttcaccctccctgcgctcctggccaccctggccccccaaggcgtccgcaccaccctctcagtaccttcgagggtgggctctgagagtgaggatgaagacctcctgagtgagctggaacttgcagacagggacgggcagccgggctgcacgacagccacatgccccattcagggagccccagactctggtaaatgctctgcttcctcctgcctggatacttctaatgaccctgacgacctggacgtgctcagaacccggcatgccaggcacacccggaagcggaggcggctggtgtgagcagcaggacaagcactttctcagaagcccgtggccctgctgacgagagacagcccacccccagcctgcaagagaggcagccagaggccaggtatctgctggccgctgactgaccaggtccgcagtgaacagaggcgggcctgccgactgactgtgtggcatggagcatggctgttccccaagtgcacacctgaacacttggaggaataaagttctgtttttaattgtggaaaaaaaaaaaa

SEQ ID NO: 135019 - DNA, 4410 bp, Artificial Sequence
  derived and/or modified sequence
atggacgtcgacgcagaaagagagaaaatcacccaagagatcaaggaattggaacgcatactagatccgggcagcagcggttcccatgttgagatttccgaatcatctctagagagtgatagcgaagctgactctctgccttctgaggatctggacccagctgaccccccgatctcagaagaggaacggtggggagaagcatctaacgacgaagatgatccaaaggataagaccctgccggaagatccagaaacctgtctgcagctgaatatggtgtatcaggaggtgatacaggagaagcttgccgaggccaaccttttgctcgctcagaatagagaacagcaggaagagctcatgagggatctcgccggaagtaaggggaccaaggtgaaggatggcaagtctctcccccccagtacatacatgggacacttcatgaaaccttactttaaggacaaggtcacaggagtcggaccgcctgcaaatgaggacacacgtgaaaaagctgcacaaggaattaaagccttcgaggagctgctcgtgactaaatggaagaactgggaaaaagcactcctcagaaagtccgtggtctctgatcggctgcaacggttgctacagcccaagttgctgaagcttgagtatctgcatcagaagcagagcaaagtgagctcagagctggagcgacaagccctcgaaaagcagggacgggaggcagaaaaagagattcaggatattaaccagttgcccgaggaagccctgctcggtaatcggctcgatagtcacgactgggagaagatctccaacattaatttcgagggaagcagatccgccgaagaaatccgtaagttttggcagaactctgagcacccatctattaataagcaggaatggagtcgagaagaagaggaacggttgcaggccattgccgcagcccacggccatctcgagtggcagaagattgctgaagagttaggcacctcccggtccgcatttcagtgtctgcagaagttccagcaacacaacaaggccctcaagcggaaagaatggaccgaggaagaagatcgcatgctaacacaacttgtgcaagaaatgagggtggggtctcacatcccctataggaggattgtctactatatggaaggaagagatagcatgcagttaatttatcgatggactaaatctcttgatccgggtctgaagaagggttactgggcccctgaagaggacgcaaagcttctccaggccgttgcgaaatatggcgagcaggactggttcaaaattagggaagaagtgcccggtagaagtgatgcccagtgccgcgaccggtatctgcggaggctccactttagcctgaaaaagggacgctggaatctgaaagaggaggagcagctcatagagctgatcgagaaatacggggtgggacactgggcaaaaatagcgagtgagctccctcacagatctgggtctcagtgcctttcaaaatggaaaattatgatgggtaaaaagcaagggctcaggcggaggcggcggcgggctcgccactccgtccgctggtcttccacctctagctccggttcttctagcgggtcaagcggtgggtctagcagctctagttccagtagtagtgaagaagacgaaccagaacaggcccaagcaggcgaaggcgaccgggcgcttctctctccacaatatatggtgccagacatggatctgtgggtccctgcccgccagagcacatctcagccttggcgcggcggggccggggcttggctcgggggacccgcagcatccctgtcccccccaaaggggagctcagcatcccaggggggctcgaaggaagctagtacaacagcagccgcccccggagaagagaccagtcctgtgcaagtgcccgcccgagcacatggaccagtcccccgctcagcacaggctagccatagcgccgacacccgccccgccggagccgagaagcaggctctggagggtggccggagattactaaccgtgccggtcgagacggtgctcagggtgttgagagccaatacagctgcgaggtcatgtacgcagaaggagcagcttcgccagccacctctgcctacatcttccccgggagtctcctctggcgacagcgtcgccaggtctcatgttcagtggctacggcacagggccacacaaagcggacagcgacgctggagacacgccttacacagaagactgctgaacaggaggcttctgttggcggtaactccatgggtcggcgatgtggtcgttccctgcacccaggcctcccagcgcccagccgtcgtgcagacccaggctgatgggctgcgcgagcagctacagcaagcaagactcgcaagtacccctgtgttcacacttttcactcagctgtttcatatcgacacagctggatgcctcgaggttgtgagagaacggaaggccctgccccctcgccttccacaggcaggcgctcgagatccaccagtccatttgcttcaggcctccagttcagctcagagcactccaggacatctcttccccaatgtgcccgcgcaagaagctagtaaatccgcaagccacaagggctctcgccgactggccagctcccgggtggaacgcactctcccgcaggccagtctgttggcttctacagggcccaggcctaagccaaagaccgtgagcgagctgctgcaggagaagcgactgcaggaggctcgcgcgcgcgaggctacccgaggcccggtggttttgccatcgcagctcctcgtgtcatccagtgtcattctgcagcctccgcttccacacaccccacatggcaggccagcgcccggtccaacagtgctgaacgtgcctctctctgggcctggcgctcctgccgccgcaaagcccggcacgtccggttcatggcaggaagccggtacctcggccaaggacaagagattaagcactatgcaagccctccccctggcccccgtatttagcgaagctgaaggcacagcgcctgctgccagccaggccccagccctcggaccaggacagatctctgtgtcctgtcctgagagcggactcggtcaaagccaggcccctgctgcgagccggaagcaaggcttacctgaggccccaccctttcttcccgccgctcctagtcctaccccacttccagtgcagcccctatccctcacccatattggtggccctcatgtagccacaagcgttccactgcccgtgacctgggttcttactgctcagggcctcctgcccgtccctgtccccgcagtggtctcacttccaagaccagcaggtaccccgggtcccgctggcctactggcaacattgcttccccctctgaccgaaacgcgagccgcgcagggtccgcgggccccggcattaagctcgagttggcagcccccagccaacatgaatcgagagccggaaccttcctgccgcaccgacacccccgcaccccccactcatgcactctctcaatcccctgcggaggcggacggtagcgtggcctttgtgcctggggaggcccaagttgcaagagagattcccgaacctaggacaagtagtcacgcggacccccctgaagccgagcccccctggtcggggcggctcccagcattcggtggcgtgattcctgccaccgaaccgagggggacccctggttccccgtctgggacccaggagccgcggggtcctttaggtctcgaaaaattaccacttagacagccggggcctgagaaaggagccctggaccttgaaaaacctccacttcctcagcctggacccgaaaagggtgccctcgatttgggccttctgagtcaagaaggggaggctgcaactcagcagtggctcgggggccagcgcggcgttcgcgtgcctctactcggctctagactgccataccagcctcccgcgctgtgttccctgagggccctctcagggctgctcctccataagaaagctttagagcataaggccaccagcttagtagttgggggagaggccgaacgcccagcgggggccctacaggcctccctcgggctggttagaggacagttacaggacaatccggcttacttgttgctgcgagcgcggttcctggccgcattcaccctgccggccctcctcgctaccctggctccccagggtgttcgaacaactctgagtgtgccctcacgggtgggttcggagtccgaggatgaagatcttcttagtgagttagaactagccgaccgcgacggacaacccggctgtacaactgcaacttgtccgatccagggcgctcctgattccggcaagtgttccgcgtcttcttgtttagataccagcaacgatcccgacgacctggacgtgttgaggacaaggcacgcccgccacacaagaaagcggcgacgcctggtttag

SEQ ID NO: 135020 - DNA, 4410 bp, Artificial Sequence
  derived and/or modified sequence
atggatgtggatgctgagcgggagaagatcacccaggagatcaaggagctggagcgcatcctggaccccggcagcagcggcagccacgtggagatcagcgagagcagcctggagagtgacagcgaggccgacagcctgcccagcgaggacctggaccctgctgacccccccatcagcgaggaggagcgctggggcgaggccagcaatgatgaagatgaccccaaggacaagaccctgcctgaagatcctgagacctgcctgcagctgaacatggtgtaccaggaggtgatccaggagaagctggccgaggccaacctgctgctggcccagaaccgggagcagcaggaggagctgatgagggacctggccggcagcaagggcaccaaggtgaaggatggcaagagcctgccccccagcacctacatgggccacttcatgaagccctacttcaaggacaaggtgactggagtgggccccccagccaatgaagacacccgggagaaggccgcccagggcatcaaggcctttgaggagctgctggtgaccaagtggaagaactgggagaaggccctgctgaggaagtctgtggtgtctgaccggctgcagaggctgctgcagcccaagctgctgaagctggagtacctgcaccagaagcagagcaaggtgagcagcgagctggagcggcaggccctggagaagcagggccgggaggccgagaaggagatccaggacatcaaccagctgcctgaggaggccctgctgggcaaccggctggacagccatgactgggagaagatcagcaacatcaactttgagggcagccgctctgctgaggagatcaggaagttctggcagaacagcgagcaccccagcatcaacaagcaggagtggagccgggaggaggaggagcggctgcaggccatcgccgccgcccacggccacctggagtggcagaagattgctgaggagctgggcaccagccgcagcgccttccagtgcctgcagaagttccagcagcacaacaaggccctgaagaggaaggagtggacagaggaggaggacaggatgctgacccagctggtgcaggagatgagggtgggcagccacatcccctacagaagaattgtgtactacatggagggccgggacagcatgcagctgatctaccgctggaccaagagcctggaccccggcctgaagaagggctactgggcccctgaggaggatgccaagctgctgcaggccgtggccaagtatggagagcaggactggttcaagatccgggaggaggtgcccggccgcagtgatgcccagtgccgggaccgctacctgcggcggctgcacttcagcctgaagaagggccgctggaacctgaaggaggaggagcagctgattgagctgattgagaagtatggagtgggccactgggccaagatcgccagcgagctgccccacaggagcggcagccagtgcctgagcaagtggaagatcatgatgggcaagaagcagggcctgcggaggagaagaagaagagcccggcacagcgtgcgctggagcagcaccagcagcagcggcagcagcagcggcagcagcggcggcagcagcagcagcagcagcagcagcagcgaggaggatgagcctgagcaggcccaggccggggagggggaccgggccctgctgagcccccagtacatggtgcctgacatggacctgtgggtgcctgcccggcagagcaccagccagccctggaggggcggggccggggcctggctgggcggccctgctgccagcctgagcccccccaagggcagcagcgccagccagggcggcagcaaggaggccagcaccacagctgctgcccctggagaggagaccagccctgtgcaggtgcctgcccgggcccacggccctgtgcccaggtctgcccaggccagccacagcgctgacaccaggcctgctggagctgagaagcaggccctggagggcggccggcggctgctgactgtgcctgtggagaccgtgctgcgggtgctgcgggccaacacagctgcccggagctgcacccagaaggagcagctgcggcagccccccctgcccaccagcagccctggggtgtcctctggggacagcgtggcccggagccacgtgcagtggctgcggcaccgggccacccagagcggccagaggcgctggaggcatgccctgcaccggcggctgctgaacagaaggctgctgctggccgtgaccccctgggtgggagatgtggtggtgccctgcacccaggccagccagaggcctgctgtggtgcagacccaggctgatggcctgcgggagcagctgcagcaggcccggctggccagcacccctgtgttcaccctcttcacccagctgttccacatcgacacagctggctgcctggaggtggtgcgggagaggaaggccctgcccccccggctgccccaggccggggcccgggacccccctgtgcacctgctgcaggccagcagcagcgcccagagcaccccaggccacctgttccccaacgtgcctgcccaggaggccagcaagagcgccagccacaagggcagccggcggctggccagcagccgggtggagaggaccctgccccaggccagcctgctggccagcacaggcccccggcccaagcccaagacagtgtctgagctgctgcaggagaagaggctgcaggaggcccgggcccgggaggccacccggggccctgtggtgctgcccagccagctgctggtgagcagcagcgtcatcctgcagccccccctgccccacaccccccacggccgcccagcccctggccccaccgtgctgaatgtgcccctgagcggccctggggccccagctgctgccaagccaggcaccagcggctcctggcaggaggccggcaccagcgccaaggacaagaggctgagcaccatgcaggccctgcccctggcccctgtgttcagcgaggccgagggcacagccccagctgccagccaggccccagccctgggccctggccagatctctgtgtcctgcccagagagcggcctgggccagagccaggccccagctgccagcaggaagcagggcctgcctgaggccccacccttcctgcctgctgcccccagccccacccccctgcctgtgcagcccctgagcctgacccacatcggcggcccccacgtggccacctctgtgcccctgcctgtgacctgggtgctgacagcccagggcctgctgcctgtgcctgtgcctgctgtggtgtccctgcccaggcctgctggcaccccaggccctgctggcctgctggccaccctgctgccccccctgacagagaccagggctgcccagggcccccgggccccagccctgagcagctcctggcagcccccagccaacatgaaccgggagcctgagcccagctgcaggacagacaccccagccccacccacccacgccctgagccagagccctgctgaggctgatggctctgtggcctttgtgcctggagaggcccaggtggcccgggagatccctgagcccaggaccagcagccatgctgaccccccagaggccgagcccccctggagcggccgcctgcctgcctttggaggagtcatcccagccacagagccccggggcaccccaggcagccccagcggcacccaggagccccggggccccctgggcctggagaagctgcccctgcggcagcccggccctgagaagggggccctggacctggagaagccacccctgccccagcccggccctgagaagggggccctggacctgggcctgctgagccaggagggggaggccgccacccagcagtggctgggcggccagaggggcgtgcgggtgcccctgctgggcagccggctgccctaccagcccccagccctgtgcagcctgcgggccctgagcggcctgctgctgcacaagaaggccctggagcacaaggccaccagcctggtggtgggcggggaggccgagaggcctgctggggccctgcaggccagcctgggcctggtgcggggccagctgcaggacaacccagcctacctgctgctgcgggcccgcttcctggccgccttcaccctgcctgccctgctggccaccctggccccccagggcgtgaggaccaccctgtctgtgcccagccgggtgggcagcgagagtgaagatgaggacctgctgtctgagctggagctggccgacagagatggccagcccggctgcaccacagccacctgccccatccagggcgccccagattctggaaaatgttctgccagcagctgcctggacaccagcaatgaccctgatgacctggatgtgctgcggaccaggcatgcccggcacaccaggaagagaagaaggctggtgtag

SEQ ID NO: 135021 - DNA, 4410 bp, Artificial Sequence
  derived and/or modified sequence
atggacgtggacgccgagcgggagaagatcacccaggagatcaaggaattagaacggattctggaccccgggtctagcggcagtcatgtggaaatcagtgagagctcactcgagtccgactccgaggccgactcattaccttctgaggatctggaccccgccgacccaccaatcagcgaagaggaacggtggggcgaagctagtaacgatgaggacgacccaaaggataagaccctgccggaggatcccgaaacatgcctgcagttaaacatggtctatcaggaagtgatccaggagaagctggccgaggccaatcttcttttagctcagaatcgggagcagcaggaagagctgatgcgagacctcgccggctcaaagggtacaaaggtcaaggacggcaagtcattgccccctagcacttacatgggccactttatgaagccctactttaaggataaagtgactggcgtaggcccaccagctaacgaggatactagagagaaggctgctcagggaatcaaagctttcgaggaactgctagtgacaaagtggaaaaactgggaaaaggccctcctgaggaaaagtgttgtcagcgaccggctacagcgtctgctgcagcccaagctactgaaactggaatacctgcaccagaaacagtccaaagtttcctccgagctggaaaggcaggccctcgaaaagcagggcagagaggctgagaaggagatccaagacatcaatcagctgccggaggaggcgctgctgggaaataggctggactcccatgactgggaaaaaatttcaaatattaatttcgagggatccaggtcagccgaggaaatcagaaagttttggcagaattcagaacacccatctatcaacaagcaggagtggtctcgggaagaggaagagagacttcaagcaatcgccgccgcccatgggcatctcgagtggcagaaaatagctgaggaattggggacatctcggagtgcatttcagtgtcttcaaaagttccagcaacacaacaaggctctaaagcgcaaagagtggactgaagaagaggatagaatgcttacccagttggtccaggaaatgcgggtcggaagccacatcccctatcggcggattgtttactatatggaggggcgcgactcaatgcaattgatctaccgctggaccaaaagcctggaccctggtctgaagaaaggttattgggcgcctgaagaggatgcgaagttgctacaggctgtggctaagtatggcgagcaggattggttcaagatacgagaggaagtccccggtagaagtgatgcccaatgccgcgatcgttatctcaggaggttgcacttctctctaaagaaggggaggtggaaccttaaggaggaggagcaactgatcgagctgattgagaaatatggtgtgggtcactgggccaaaatcgcaagcgaactcccccatcgctcggggagccagtgtctgtcgaagtggaagattatgatggggaaaaaacagggtctcagacggagaagacggcgcgcacgccactccgtccgatggtcatctaccagctcctccggctcctctagcggtagctcaggtggcagttcttctagttcctctagcagctcagaagaagacgagcccgaacaggcgcaggctggtgagggtgatagagcgctgctttccccacagtacatggttcccgacatggacctgtgggtgcccgccaggcagagcactagccagccctggcgtgggggtgctggcgcttggctcggcggtcctgctgcttccctgtcccctccaaagggatcatctgccagccaggggggctccaaagaagcctcaacaacagcagccgctcctggagaagaaacatctccagtgcaggtcccagctagggctcatggccctgtgccccggagcgcccaagccagccattcagctgatactcggccagccggcgcggagaaacaggctctggagggcggacgccgtctgctgacggtccctgtagagacagtgctccgagttctgcgggctaacacagcagcacgcagttgtactcaaaaggagcagctgagacagccccctctgccaactagctcacccggggtcagcagcggagatagcgtggctaggagccatgttcagtggctcaggcaccgggccactcagtcgggacaacgcagatggcgccacgctctccatagaaggctgctgaacagaagattgctactcgcagttacaccatgggtgggcgatgtggtggtgccatgtacgcaagcatcacagaggcctgctgtggtacaaacccaggccgacggactacgcgaacagttgcagcaagccagactggcatctacacccgttttcactctctttacgcagctgttccacatcgacaccgcgggatgccttgaggttgtgcgagagaggaaggcactgccaccccgcctgccgcaggcaggtgcaagagaccctcctgtgcacttgctccaggcctcttcaagtgcccagtctactccagggcacctatttccaaatgtgcctgcacaggaggcttctaagtccgcttctcataagggatcccgtcgactcgcatccagccgcgtcgaacgcaccctgccccaagcgtcactgctggcgtctaccgggccccgccccaaacctaagaccgtctcagaattacttcaggagaaacgtcttcaggaagcacgggcccgcgaggctacaagaggacccgtggtcctgccgtcccagcttctagttagcagcagcgtgatcctgcagcctcctttaccgcacacaccccacggtagaccagcccccggaccgaccgtcttaaatgtgcctttgagcggcccaggagcacccgccgctgctaaaccaggtacaagtggctcatggcaggaggcgggaacgagcgcaaaagacaagcgattgtctactatgcaggccctcccactagccccagtgttctcagaggcagagggcacggcacctgcagccagccaagcaccagcattggggcccggtcaaatcagcgtgtcatgccctgagtctggattgggccagtcacaagctcccgccgcttcccggaaacaagggctcccagaagcaccgccgttcttacccgcagcaccctcgcctacccccctcccagtccagcccctgtccttaactcatatcggaggccctcacgttgccacaagcgtgcccctgcccgtgacctgggtgctgacagcgcagggcctactgcctgtgcccgtgcctgccgttgtttcccttcctaggcccgctgggacaccagggccagccggcctgctcgccacgctgctgcctcccctgacagagaccagggccgcacaggggcctagggcccccgcgctatctagcagctggcagccccctgcaaacatgaatcgggagccagagccctcgtgccggaccgacacacctgcaccccccactcacgccctgtcccagtcacctgctgaggccgacggatccgtcgcctttgtcccaggagaagcgcaggttgctagggaaatccctgaaccacgcacaagcagtcacgccgaccctcccgaggcagagcctccgtggtcggggcgcctgcccgcttttggaggagtgatccccgccacagaaccccggggaacacccggttctcctagcggcacacaagagccccggggtcccctgggcttagagaagttacctttaagacagcccggaccagagaaaggtgccctggacctggagaaaccgcctctgccccaaccaggccccgaaaaaggagcccttgacctgggtctgctctcccaggagggagaagccgctacacaacagtggcttgggggccagaggggggtgcgggtcccccttctcgggagcaggctgccatatcaacctcccgctctgtgttccctacgagcactaagcggattactgctccacaaaaaggccttggagcacaaagctacttccctggtagtgggtggtgaggcggaaaggcccgccggggccctgcaggcaagcttagggttggtacgggggcaattacaggataacccggcttatctgctcctaagggcacgcttcctcgccgccttcacactgccagctctgttagccacgctcgccccacaaggagtcagaactacactatcagtcccaagtagggttgggtctgagagcgaagacgaggatctgctctcggagcttgaactcgcagatagagatggtcagcctggctgcacaactgctacttgtcccatccaaggtgcaccagactccggaaagtgtagcgcaagcagttgcctcgacacaagtaatgaccctgacgacctcgatgtcttgaggacacgccacgccaggcacactcgtaaacggcgccgattagtgtag

SEQ ID NO: 135022 - DNA, 5010 bp, Artificial Sequence
  derived and/or modified sequence
acaccttctacgctgggtggccagtttccatgtggcttggtgtgggagcagagacgggacagtggggcctgtccttgttcatccactccctgcctgtgctggttgcagcctcagagcaggcgggagatgttcttggggcttaggctcctggcagagcacatagcaggagtttgtggggtctgaggttcctgtcccagggttccccgattctgtgcctggcctattaatctttctctggggagcccagtgcccactgccgagcaggctcctgccatcccccatgggcgggtgtgtctgaaggagaatgggatcccggcacggtcttggtttctaacatctcggggtgtgttttggaggcaggcgggagtcatggatgtagatgctgaaagagagaagataacacaggagatcaaggagctggaaaggattttggatcccggctcctcgggctcccacgtggagatctcagaatcaagtctcgagtcagattctgaagcagattcactgccttctgaggacttggatcctgccgatcccccgatctcggaagaagaaaggtggggcgaagccagcaatgacgaggacgatcccaaggataaaaccctccctgaagacccagaaacctgcctgcagctgaacatggtctaccaggaggtcatccaggagaagctggctgaggccaacctgctgctggcccagaaccgggagcagcaggaggaactcatgagggatctggctgggtccaaaggcaccaaggtgaaagatggcaaaagcctgcccccaagcacatacatggggcacttcatgaagccgtatttcaaggacaaggtcacgggcgtggggccacctgccaacgaggacacacgagagaaggctgcccaggggatcaaggctttcgaggagctccttgtgaccaaatggaaaaactgggaaaaggccttgctccgaaagtcagtggtgagtgaccgcctgcagcgattgcttcagcccaagttactgaagctcgagtacttgcaccagaagcagagcaaagtctccagtgagctggagaggcaagccctggagaagcagggcagggaagccgagaaggagatccaggacatcaaccagcttccagaagaggccttgctgggaaacaggctggacagccacgactgggagaagatttccaatattaactttgaaggcagccgcagtgcagaggagatccggaagttctggcagaactcggagcaccccagcatcaacaagcaggagtggagcagggaggaggaggagcggctgcaggcgatcgcggctgcacacggccacctggagtggcagaagattgcagaggagctggggaccagccgcagcgccttccagtgcctgcagaaattccagcagcacaacaaagctctgaaacgcaaggagtggacagaggaggaggaccgcatgctcacgcagctggtgcaggagatgcgcgtcggcagccacatcccctaccgcagaattgtctactatatggaagggagagactccatgcagctgatctaccgatggaccaagagcttggatcctggtctgaagaagggttactgggccccggaggaagatgctaagttgcttcaagctgttgccaaatacggggagcaggattggtttaaaatccgggaagaggtgccaggtaggagcgatgcccagtgccgagatcggtatctcaggagattacatttcagcttgaaaaagggtcggtggaatttaaaagaagaggaacagttaattgaattaatagaaaaatatggtgtcggtcactgggcaaaaatagcttctgagctgccccatcggtctggctcccagtgtctgagcaagtggaagatcatgatggggaagaagcagggtctccggaggcggcggcggagggcccgtcacagcgtccggtggagctctaccagcagcagcggcagcagcagtggcagcagtggagggagcagcagcagcagcagcagcagcagcgaggaggacgagccagagcaggcgcaggccggggagggtgacagagcgctgctgtccccacagtacatggtcccggacatggacctgtgggttcctgccaggcagagcaccagccagccatggagaggaggggcaggggcctggctgggaggccccgctgcctccctcagccctcccaaggggtccagtgccagccagggcggcagcaaggaagcttccaccacagccgcggctcctggagaggagacgagtccggtgcaggtccctgccagggcccacggccctgtcccgaggtctgcccaggcctcccactcagcagacactcgcccggcgggcgcagagaagcaggccctggagggtgggaggcgtctgctgacagtgcctgtggagaccgtgctgagggtgctcagggccaacacggctgctcggagctgcacacagaaagagcagctgaggcagccacccctgcccacctcatccccaggggtcagctctggtgacagcgtggcccgatcccatgtgcagtggctacggcacagagccacccagagtgggcagcggcgctggagacacgctctgcaccggaggctcctgaaccgcaggctgctgctggctgtgaccccttgggtaggggacgttgtcgtgccctgcacacaggcttcccagagacccgccgtagtgcagactcaagcggatggcctcagggagcagctgcagcaggcccgcctggccagcacccctgtgtttaccctgtttacccagctgttccacatcgatactgccggctgcttggaggtcgtccgagagaggaaggccctgccacccaggctgccccaggctggtgctcgggacccaccagttcatcttctgcaggcatcctcaagtgcccagagcaccccaggccacctcttcccaaacgtgccggctcaagaagcctcaaagagtgccagccacaaagggagccgaagactggcgtccagccgggtggagcgcaccctaccccaggcgtccctgctggcttcaaccggcccccggcccaagcccaagactgtgtcggagctgcttcaggagaagcggcttcaggaggcccgtgccagggaggccacccggggcccggtggtgctcccgtcccagctgctggtctcctcgtctgtgatcctccagccccctctaccacacaccccacacggccgcccagccccgggtcccaccgtcttaaatgtaccgctctctgggcctggggcccccgcggcagccaaacctggcacttctggctcctggcaggaggctgggacttcagccaaggacaagagactctccaccatgcaagccctgcccctcgctcctgtcttctcagaggccgagggcacagcccctgctgcttcccaagcccctgccctgggccccggccagatctctgtgagctgccccgagagtggtctcggacagtctcaggcccccgctgcatcccggaagcagggcctgcctgaggcgccaccctttctccccgcagcccccagccccaccccactgcccgtccagcccctcagcctgacgcacataggagggccacatgtggcgaccagtgtccccctgcctgtcacctgggtgctcacagcccaggggcttctccctgttcctgtaccagctgtggtgagccttcccaggccagcagggacccctggccccgcagggctgctggccactctgctgcctcccctgactgagactcgggcggcccagggccccagggccccagcgttgagcagctcttggcagcccccagccaatatgaacagggaaccggagccttcctgcaggacagacaccccagctcctcccacacacgccctctcccaaagtcctgcagaagcggatggcagtgtggcctttgtccctggagaggcccaggtggccagggagatacctgagcccaggacgtcctcccacgctgaccctcctgaagcagaacccccttggtccgggaggctgccagccttcggtggtgtcatcccagcaactgagccaagggggacgccggggtccccctcagggacacaggagcccagggggcctctgggcctggagaagctgcccctgcgccagcctgggcctgagaagggggccctggacctggagaagccgcccctaccccagcctgggcctgagaagggggccctggacctgggcctgctgtcccaggagggcgaggcggccacacagcagtggctggggggccagcggggggtgcgtgtgcctcttctgggcagcagactgccctatcagcccccagccctgtgcagcctgcgagctctgtccggtctcctactccacaagaaggccctggagcacaaggccacctccctggtggtggggggcgaggctgagcggccggccggagcactgcaagcctcactggggctggtgcgggggcagctccaggacaacccggcctacctcctgttgcgggcgcggttcctggcagccttcaccctccctgcgctcctggccaccctggccccccaaggcgtccgcaccaccctctcagtaccttcgagggtgggctctgagagtgaggatgaagacctcctgagtgagctggaacttgcagacagggacgggcagccgggctgcacgacagccacatgccccattcagggagccccagactctggtaaatgctctgcttcctcctgcctggatacttctaatgaccctgacgacctggacgtgctcagaacccggcatgccaggcacacccggaagcggaggcggctggtgtgagcagcaggacaagcactttctcagaagcccgtggccctgctgacgagagacagcccacccccagcctgcaagagaggcagccagaggccaggtatctgctggccgctgactgaccaggtccgcagtgaacagaggcgggcctgccgactgactgtgtggcatggagcatggctgttccccaagtgcacacctgaacacttggaggaataaagttctgtttttaattgtgga

SEQ ID NO: 135023 - DNA, 4410 bp, Artificial Sequence
  derived and/or modified sequence
atggacgtcgatgcagaaagggagaaaattacgcaggagattaaggagttggagcgcatcttagatccaggctcgagcgggtctcacgtggagattagtgagtcctctctcgaaagcgacagcgaggcagattcattgccgagtgaagacctggaccccgcagacccgcctattagtgaggaggaacggtggggcgaggcctctaacgacgaggatgacccgaaagacaagacactccctgaagaccccgagacttgtctgcaacttaacatggtttatcaagaggtcattcaggaaaagctcgcagaagccaatctgttactagcacagaacagagagcagcaagaggagttaatgcgagatctcgccggatcaaaaggtactaaggttaaggacgggaagtctctgccgccatcaacgtatatgggtcactttatgaagccctactttaaggataaagtaaccggcgtcggccctcctgccaatgaggataccagagagaaagccgcacagggaattaaagcttttgaagagctcctggtaactaagtggaagaattgggagaaagctctccttaggaagagtgtggtgagcgatagactgcagcggttgttgcagcctaaactgctcaagcttgaatacctgcatcaaaaacagagcaaagtgtcctcagagcttgaaaggcaggcccttgaaaagcagggcagagaagccgagaaggagatccaggacatcaatcagttaccggaagaagccctgctcggcaacaggctggactcccacgattgggagaaaatctctaatatcaactttgagggcagcagatcagcagaggagatccgcaagttttggcagaacagcgagcacccatcaattaataaacaggaatggtcacgtgaagaggaagagaggctgcaagcaatcgccgctgcacacggccatcttgagtggcagaaaattgcggaggagctgggcacctcaaggtccgccttccagtgccttcagaagttccaacagcataataaagccttaaaacgaaaggaatggacagaggaggaggatcgcatgctgactcagctcgttcaagagatgagagtcgggtcccacattccatacagacggatcgtgtattacatggagggacgggactccatgcaactgatctatcgttggaccaagtctctcgatcctgggctgaagaaaggctactgggccccagaagaagatgccaaattgctacaggcagtagccaaatacggggagcaagactggtttaagatcagagaagaggtgcccggtaggtccgacgctcagtgccgagaccgataccttcgaagactccacttttccctaaagaagggcaggtggaacttgaaggaggaggaacagttaatcgagctcattgaaaaatatggtgtgggccactgggctaagatagcctccgagctgcctcaccggagtggatctcagtgcctgagtaagtggaagataatgatgggcaaaaagcaaggtctgaggcgcagaaggcgcagggccaggcattctgtgcgctggtcctctacctcttcaagcggctcctcatccggcagtagcggagggtcatcttctagctcaagtagttcttcagaggaagacgagccggaacaggctcaggccggtgaaggagaccgcgctctgttatcaccccaatacatggtaccagatatggacctctgggtgcctgctcgccaatcaacttcccagccctggaggggcggtgcaggggcatggttagggggacctgcagcttctttatcaccgccaaaggggtctagtgccagtcagggtggctccaaggaagcatccacaaccgcagccgcaccgggagaagagactagcccagttcaggtgccagcccgtgcccatggccctgtgcccagaagcgcccaagccagccacagcgccgatacaaggccagcgggagccgagaagcaagccctcgagggcggaaggcgcctgctgacagtgcccgtagagaccgtactgagagtactgagagccaataccgccgcaagaagctgtactcaaaaggagcagcttcggcagccacccctgcctacgagcagtccaggggtatcttccggagactcagtggcgagatcacacgtccagtggctcaggcaccgtgcaactcagagcggccagaggcgttggcgccacgcactgcaccgccgattgctgaatcgaagattgctgctggcagtgaccccatgggtgggagacgtggttgtcccatgcacacaggccagccaaagaccggctgtggtgcagacacaggctgacggtctccgcgagcagctgcagcaggccaggctcgcatcaactccagtattcacccttttcacgcagctgttccacattgacactgcaggctgcctggaagttgtaagggaaagaaaagccctgccaccgcgactgcctcaggctggagcacgggatccacccgtgcaccttctgcaggctagtagctctgcccagtccacgcccggacacctcttccctaacgtgccagcacaggaggccagcaaaagtgccagtcataaaggaagtcgtcggctggcttctagtagagtcgagcgtaccctgccacaggcaagcctgctggcttctaccgggccacggcctaagcctaagacagtgagcgaactgctccaggagaaacggcttcaggaagcccgtgctagagaagccaccagaggccctgtcgttttgcccagtcaactcctcgtgtccagtagtgtgatactgcagccaccgttgcctcacaccccccacggaagaccggcacctggccctactgtactaaacgtgcccctaagcggacctggcgcaccagccgcagccaagccaggaacctcaggcagctggcaagaagctggaacaagcgctaaagataaacggctgagcaccatgcaagcccttcctctcgcacccgttttcagcgaggcagaggggaccgcgccagctgcctcacaagcaccggctctgggacccggtcagatatctgtgtcatgcccggagtccggcctgggtcagtcccaggcacccgctgcttctcggaagcagggcctccctgaggctcccccttttctaccggcagctcccagtcctacacctctccctgtccagcctctctcgctgacacacatcggagggccacatgtcgctacttcggtgccactaccggtgacctgggtcctaaccgcccaggggctgctacctgtccccgtgcctgcagttgtctcccttcctcgaccagccggtactcccggtccagccggtctactcgccactctgctgccacccctaaccgaaacccgggctgcccagggcccacgggcacccgctctttcaagtagctggcaaccacccgctaatatgaacagagagccggagccctcgtgtcgaaccgatacgcccgctcccccaacgcatgctttaagccagagtccagctgaggccgatgggtctgtcgctttcgttccaggggaagcccaggtggctcgggagattcccgagcctcggacaagttctcacgcagacccaccagaggccgaaccaccttggtctgggagattgcctgctttcggaggagttattccagcaacagagccccgtgggacacccggttctcccagtggaactcaggaacctagggggcctcttggcctcgagaagttacccttacggcagccgggaccagagaaaggtgccctggacctggaaaagccacccctgccccagcctggtcccgaaaaaggcgcacttgacctgggattgctgtcacaggaaggcgaggctgcgacgcagcagtggttgggagggcagcggggtgtgcgcgtgccactgttaggatcacgccttccgtaccaaccccctgccttatgctccctcagggcactgagcggactgcttttgcacaagaaagctctagagcacaaagctacttcattggttgtcggaggggaggcggaacggccagcaggcgcattgcaagcctcgctgggcttagttagggggcagttgcaagacaacccagcatacttactgctcagggcaagatttttagctgctttcacactgccggctctactggctactctggccccacagggggtgaggaccactttatctgttcctagcagagtcggcagcgagtcggaggatgaagatctcttgagtgagctcgagcttgccgatcgggacgggcaacctggctgcaccacagccacttgtccaatacagggagcccctgacagcggcaagtgctcagcctcttcctgcctggacacatccaatgatcccgatgacctcgacgtgcttagaaccaggcatgccagacatacccggaaacgtcggagacttgtttag

SEQ ID NO: 135024 - DNA, 4410 bp, Artificial Sequence
  derived and/or modified sequence
atggacgtggacgccgagagagagaagatcacccaggagatcaaggagctggagagaatcctggaccccggcagcagcggcagccacgtggagatcagcgagagcagcctggagagcgacagcgaggccgacagcctgcccagcgaggacctggaccccgccgacccccccatcagcgaggaggagagatggggcgaggccagcaacgacgaggacgaccccaaggacaagaccctgcccgaggaccccgagacctgcctgcagctgaacatggtgtaccaggaggtgatccaggagaagctggccgaggccaacctgctgctggcccagaacagagagcagcaggaggagctgatgagagacctggccggcagcaagggcaccaaggtgaaggacggcaagagcctgccccccagcacctacatgggccacttcatgaagccctacttcaaggacaaggtgaccggcgtgggcccccccgccaacgaggacaccagagagaaggccgcccagggcatcaaggccttcgaggagctgctggtgaccaagtggaagaactgggagaaggccctgctgagaaagagcgtggtgagcgacagactgcagagactgctgcagcccaagctgctgaagctggagtacctgcaccagaagcagagcaaggtgagcagcgagctggagagacaggccctggagaagcagggcagagaggccgagaaggagatccaggacatcaaccagctgcccgaggaggccctgctgggcaacagactggacagccacgactgggagaagatcagcaacatcaacttcgagggcagcagaagcgccgaggagatcagaaagttctggcagaacagcgagcaccccagcatcaacaagcaggagtggagcagagaggaggaggagagactgcaggccatcgccgccgcccacggccacctggagtggcagaagatcgccgaggagctgggcaccagcagaagcgccttccagtgcctgcagaagttccagcagcacaacaaggccctgaagagaaaggagtggaccgaggaggaggacagaatgctgacccagctggtgcaggagatgagagtgggcagccacatcccctacagaagaatcgtgtactacatggagggcagagacagcatgcagctgatctacagatggaccaagagcctggaccccggcctgaagaagggctactgggcccccgaggaggacgccaagctgctgcaggccgtggccaagtacggcgagcaggactggttcaagatcagagaggaggtgcccggcagaagcgacgcccagtgcagagacagatacctgagaagactgcacttcagcctgaagaagggcagatggaacctgaaggaggaggagcagctgatcgagctgatcgagaagtacggcgtgggccactgggccaagatcgccagcgagctgccccacagaagcggcagccagtgcctgagcaagtggaagatcatgatgggcaagaagcagggcctgagaagaagaagaagaagagccagacacagcgtgagatggagcagcaccagcagcagcggcagcagcagcggcagcagcggcggcagcagcagcagcagcagcagcagcagcgaggaggacgagcccgagcaggcccaggccggcgagggcgacagagccctgctgagcccccagtacatggtgcccgacatggacctgtgggtgcccgccagacagagcaccagccagccctggagaggcggcgccggcgcctggctgggcggccccgccgccagcctgagcccccccaagggcagcagcgccagccagggcggcagcaaggaggccagcaccaccgccgccgcccccggcgaggagaccagccccgtgcaggtgcccgccagagcccacggccccgtgcccagaagcgcccaggccagccacagcgccgacaccagacccgccggcgccgagaagcaggccctggagggcggcagaagactgctgaccgtgcccgtggagaccgtgctgagagtgctgagagccaacaccgccgccagaagctgcacccagaaggagcagctgagacagccccccctgcccaccagcagccccggcgtgagcagcggcgacagcgtggccagaagccacgtgcagtggctgagacacagagccacccagagcggccagagaagatggagacacgccctgcacagaagactgctgaacagaagactgctgctggccgtgaccccctgggtgggcgacgtggtggtgccctgcacccaggccagccagagacccgccgtggtgcagacccaggccgacggcctgagagagcagctgcagcaggccagactggccagcacccccgtgttcaccctgttcacccagctgttccacatcgacaccgccggctgcctggaggtggtgagagagagaaaggccctgccccccagactgccccaggccggcgccagagacccccccgtgcacctgctgcaggccagcagcagcgcccagagcacccccggccacctgttccccaacgtgcccgcccaggaggccagcaagagcgccagccacaagggcagcagaagactggccagcagcagagtggagagaaccctgccccaggccagcctgctggccagcaccggccccagacccaagcccaagaccgtgagcgagctgctgcaggagaagagactgcaggaggccagagccagagaggccaccagaggccccgtggtgctgcccagccagctgctggtgagcagcagcgtgatcctgcagccccccctgccccacaccccccacggcagacccgcccccggccccaccgtgctgaacgtgcccctgagcggccccggcgcccccgccgccgccaagcccggcaccagcggcagctggcaggaggccggcaccagcgccaaggacaagagactgagcaccatgcaggccctgcccctggcccccgtgttcagcgaggccgagggcaccgcccccgccgccagccaggcccccgccctgggccccggccagatcagcgtgagctgccccgagagcggcctgggccagagccaggcccccgccgccagcagaaagcagggcctgcccgaggccccccccttcctgcccgccgcccccagccccacccccctgcccgtgcagcccctgagcctgacccacatcggcggcccccacgtggccaccagcgtgcccctgcccgtgacctgggtgctgaccgcccagggcctgctgcccgtgcccgtgcccgccgtggtgagcctgcccagacccgccggcacccccggccccgccggcctgctggccaccctgctgccccccctgaccgagaccagagccgcccagggccccagagcccccgccctgagcagcagctggcagccccccgccaacatgaacagagagcccgagcccagctgcagaaccgacacccccgccccccccacccacgccctgagccagagccccgccgaggccgacggcagcgtggccttcgtgcccggcgaggcccaggtggccagagagatccccgagcccagaaccagcagccacgccgacccccccgaggccgagcccccctggagcggcagactgcccgccttcggcggcgtgatccccgccaccgagcccagaggcacccccggcagccccagcggcacccaggagcccagaggccccctgggcctggagaagctgcccctgagacagcccggccccgagaagggcgccctggacctggagaagccccccctgccccagcccggccccgagaagggcgccctggacctgggcctgctgagccaggagggcgaggccgccacccagcagtggctgggcggccagagaggcgtgagagtgcccctgctgggcagcagactgccctaccagccccccgccctgtgcagcctgagagccctgagcggcctgctgctgcacaagaaggccctggagcacaaggccaccagcctggtggtgggcggcgaggccgagagacccgccggcgccctgcaggccagcctgggcctggtgagaggccagctgcaggacaaccccgcctacctgctgctgagagccagattcctggccgccttcaccctgcccgccctgctggccaccctggccccccagggcgtgagaaccaccctgagcgtgcccagcagagtgggcagcgagagcgaggacgaggacctgctgagcgagctggagctggccgacagagacggccagcccggctgcaccaccgccacctgccccatccagggcgcccccgacagcggcaagtgcagcgccagcagctgcctggacaccagcaacgaccccgacgacctggacgtgctgagaaccagacacgccagacacaccagaaagagaagaagactggtgtag

SEQ ID NO: 135025 - protein, 127 aa, Artificial Sequence
  derived and/or modified sequence
MDVFKKGFSIAKEGVVGAVEKTKQGVTEAAEKTKEGVMYVGAKTKENVVQSVTSVAEKTKEQANAVSEAVVSSVNTVATKTVEEAENIAVTSGVVRKEDLRPSAPQQEGEASKEKEEVAEEAQSGGD

SEQ ID NO: 135026 - DNA, 384 bp, Artificial Sequence
  derived and/or modified sequence
atggacgtgttcaagaagggcttcagcatcgccaaggagggcgtggtgggcgccgtggagaagaccaagcagggcgtgaccgaggccgccgagaagaccaaggagggcgtgatgtacgtgggcgccaagaccaaggagaacgtggtgcagagcgtgaccagcgtggccgagaagaccaaggagcaggccaacgccgtgagcgaggccgtggtgagcagcgtgaacaccgtggccaccaagaccgtggaggaggccgagaacatcgccgtgaccagcggcgtggtgagaaaggaggacctgagacccagcgccccccagcaggagggcgaggccagcaaggagaaggaggaggtggccgaggaggcccagagcggcggcgactag

SEQ ID NO: 135027 - DNA, 384 bp, Artificial Sequence
  derived and/or modified sequence
atggatgtttttaagaaaggattcagtattgcaaaagagggcgtcgtaggcgccgtggaaaagaccaagcagggggtgacggaagcagccgagaaaacaaaagagggggtgatgtacgtgggtgccaagactaaggagaacgtggtccagagtgtgacatcagtagccgaaaaaacgaaagagcaggcgaatgccgtcagtgaagcggtggtttcgtccgtgaacaccgtagccacgaagacagtagaggaggccgagaatattgcggtgacatcaggcgtagttagaaaagaggacctacgaccaagcgcaccccagcaagagggcgaagccagcaaagagaaggaagaggtggcggaggaggctcaatctggaggagactag

SEQ ID NO: 135028 - DNA, 384 bp, Artificial Sequence
  derived and/or modified sequence
atggatgtgttcaagaagggcttcagcatcgccaaggagggcgtggtgggcgctgtggagaagaccaagcagggcgtgacagaagctgctgagaagaccaaggagggcgtgatgtatgtgggcgccaagaccaaggaaaatgtggtgcagagcgtgacctctgtggccgagaagaccaaggagcaggccaatgctgtgtctgaggccgtggtgtcctctgtgaacacagtggccaccaagacagtggaggaggccgagaacattgctgtgaccagcggcgtggtgaggaaggaggacctgcggcccagcgccccccagcaggagggggaggccagcaaggagaaggaggaggtggccgaggaggcccagagcggcggggactag

SEQ ID NO: 135029 - DNA, 384 bp, Artificial Sequence
  derived and/or modified sequence
atggacgtgttcaagaagggcttcagcatcgccaaggagggcgtggtgggggcggtggagaaaacaaagcagggcgttacagaagccgccgaaaagacgaaggaaggcgtcatgtatgttggcgcaaaaactaaagaaaacgttgtgcaatccgtcactagcgtggcagaaaaaactaaggagcaggcaaatgcagtctctgaagccgttgtgagcagtgtgaacacagtcgctactaagactgtggaagaggctgaaaacatagctgtcacatcgggagtggtacgcaaggaagatctgaggccatccgctccccagcaggagggcgaagccagcaaggagaaggaggaagtggctgaagaggctcagtccggcggagactag

SEQ ID NO: 135030 - DNA, 384 bp, Artificial Sequence
  derived and/or modified sequence
atggacgtctttaaaaagggcttcagcatcgccaaagaaggggtggttggagccgtggagaagactaagcagggggtcacagaagccgcagagaaaactaaagagggagtgatgtatgtaggtgccaagacaaaggagaacgtggtacagtcagtaacatccgtggccgagaagacaaaagaacaagccaacgccgtgtccgaagccgtcgtgagctctgtgaacaccgtggcgacaaagaccgtcgaagaggccgaaaacattgccgtgacctctggagtagtcagaaaggaagacctgcgcccaagcgcaccccagcaggaaggggaagcatctaaggaaaaagaggaggtggcagaagaggcacaaagtggaggagactag

SEQ ID NO: 135031 - DNA, 701 bp, Artificial Sequence
  derived and/or modified sequence
agctccgtcctgcctgcagcagcacaaccctgcacacccaccatggatgtcttcaagaagggcttctccatcgccaaggagggcgtggtgggtgcggtggaaaagaccaagcagggggtgacggaagcagctgagaagaccaaggagggggtcatgtatgtgggagccaagaccaaggagaatgttgtacagagcgtgacctcagtggccgagaagaccaaggagcaggccaacgccgtgagcgaggctgtggtgagcagcgtcaacactgtggccaccaagaccgtggaggaggcggagaacatcgcggtcacctccggggtggtgcgcaaggaggacttgaggccatctgccccccaacaggagggtgaggcatccaaagagaaagaggaagtggcagaggaggcccagagtgggggagactagagggctacaggccagcgtggatgacctgaagagcgctcctctgccttggacaccatcccctcctagcacaaggagtgcccgccttgagtgacatgcggctgcccacgctcctgccctcgtctccctggccacccttggcctgtccacctgtgctgctgcaccaacctcactgccctccctcggccccacccaccctctggtccttctgaccccacttatgctgctgtgaattttttttttaaatgattccaaataaaacttgagcccactcctgc

SEQ ID NO: 135032 - protein, 472 aa, Artificial Sequence
  derived and/or modified sequence
MTANGTAEAVQIQFGLINCGNKYLTAEAFGFKVNASASSLKKNHLGRYLAADKDGNVTCEREVPGPDCRFLIVAHDDGRWSLQSEAHRRYFGGTEDRLSCFAQTVSPAEKWSVHIAMHPQVNIYSVTRKRYAHLSARPADEIAVDRDVPWGVDSLITLAFQDQRYSVQTADHRFLRHDGRLVARPEPATGYTLEFRSGKVAFRDCEGRYLAPSGPSGTLKAGKATKVGKDELFALEQSCAQVVLQAANERNVSTRQGMDLSANQDEETDQETFQLEIDRDTKKCAFRTHTGKYWTLTATGGVQSTASSKNASCYFDIEWRDRRITLRASNGKFVTSKKNGQLAASVETAGDSELFLMKLINRPIIVFRGEHGFIGCRKVTGTLDANRSSYDVFQLEFNDGAYNIKDSTGKYWTVGSDSAVTSSGDTPVDFFFEFCDYNKVAIKVGGRYLKGDHAGVLKASAETVDPASLWEY

SEQ ID NO: 135033 - protein, 493 aa, Artificial Sequence
  derived and/or modified sequence
MTANGTAEAVQIQFGLINCGNKYLTAEAFGFKVNASASSLKKKQIWTLEQPPDEAGSAAVCLRSHLGRYLAADKDGNVTCEREVPGPDCRFLIVAHDDGRWSLQSEAHRRYFGGTEDRLSCFAQTVSPAEKWSVHIAMHPQVNIYSVTRKRYAHLSARPADEIAVDRDVPWGVDSLITLAFQDQRYSVQTADHRFLRHDGRLVARPEPATGYTLEFRSGKVAFRDCEGRYLAPSGPSGTLKAGKATKVGKDELFALEQSCAQVVLQAANERNVSTRQGMDLSANQDEETDQETFQLEIDRDTKKCAFRTHTGKYWTLTATGGVQSTASSKNASCYFDIEWRDRRITLRASNGKFVTSKKNGQLAASVETAGDSELFLMKLINRPIIVFRGEHGFIGCRKVTGTLDANRSSYDVFQLEFNDGAYNIKDSTGKYWTVGSDSAVTSSGDTPVDFFFEFCDYNKVAIKVGGRYLKGDHAGVLKASAETVDPASLWEY

SEQ ID NO: 135034 - protein, 215 aa, Artificial Sequence
  derived and/or modified sequence
MDLSANQDEETDQETFQLEIDRDTKKCAFRTHTGKYWTLTATGGVQSTASSKNASCYFDIEWRDRRITLRASNGKFVTSKKNGQLAASVETAGDSELFLMKLINRPIIVFRGEHGFIGCRKVTGTLDANRSSYDVFQLEFNDGAYNIKDSTGKYWTVGSDSAVTSSGDTPVDFFFEFCDYNKVAIKVGGRYLKGDHAGVLKASAETVDPASLWEY

SEQ ID NO: 135035 - DNA, 2722 bp, Artificial Sequence
  derived and/or modified sequence
tgggctttgtggagcgctgcggagggtgcgtgcgggccgcggcagccgaacaaaggagcaggggcgccgccgcagggacccgccacccacctcccggggccgcgcagcggcctctcgtctactgccaccatgaccgccaacggcacagccgaggcggtgcagatccagttcggcctcatcaactgcggcaacaagtacctgacggccgaggcgttcgggttcaaggtgaacgcgtccgccagcagcctgaagaagaaccacctgggccgctacctggcggcggacaaggacggcaacgtgacctgcgagcgcgaggtgcccggtcccgactgccgtttcctcatcgtggcgcacgacgacggtcgctggtcgctgcagtccgaggcgcaccggcgctacttcggcggcaccgaggaccgcctgtcctgcttcgcgcagacggtgtcccccgccgagaagtggagcgtgcacatcgccatgcaccctcaggtcaacatctacagcgtcacccgtaagcgctacgcgcacctgagcgcgcggccggccgacgagatcgccgtggaccgcgacgtgccctggggcgtcgactcgctcatcaccctcgccttccaggaccagcgctacagcgtgcagaccgccgaccaccgcttcctgcgccacgacgggcgcctggtggcgcgccccgagccggccactggctacacgctggagttccgctccggcaaggtggccttccgcgactgcgagggccgttacctggcgccgtcggggcccagcggcacgctcaaggcgggcaaggccaccaaggtgggcaaggacgagctctttgctctggagcagagctgcgcccaggtcgtgctgcaggcggccaacgagaggaacgtgtccacgcgccagggtatggacctgtctgccaatcaggacgaggagaccgaccaggagaccttccagctggagatcgaccgcgacaccaaaaagtgtgccttccgtacccacacgggcaagtactggacgctgacggccaccgggggcgtgcagtccaccgcctccagcaagaatgccagctgctactttgacatcgagtggcgtgaccggcgcatcacactgagggcgtccaatggcaagtttgtgacctccaagaagaatgggcagctggccgcctcggtggagacagcaggggactcagagctcttcctcatgaagctcatcaaccgccccatcatcgtgttccgcggggagcatggcttcatcggctgccgcaaggtcacgggcaccctggacgccaaccgctccagctatgacgtcttccagctggagttcaacgatggcgcctacaacatcaaagactccacaggcaaatactggacggtgggcagtgactccgcggtcaccagcagcggcgacactcctgtggacttcttcttcgagttctgcgactataacaaggtggccatcaaggtgggcgggcgctacctgaagggcgaccacgcaggcgtcctgaaggcctcggcggaaaccgtggaccccgcctcgctctgggagtactagggccggcccgtccttccccgcccctgcccacatggcggctcctgccaaccctccctgctaaccccttctccgccaggtgggctccagggcgggaggcaagcccccttgcctttcaaactggaaaccccagagaaaacggtgcccccacctgtcgcccctatggactccccactctcccctccgcccgggttccctactcccctcgggtcagcggctgcggcctggccctgggagggatttcagatgcccctgccctcttgtctgccacggggcgagtctggcacctctttcttctgacctcagacggctctgagccttatttctctggaagcggctaagggacggttgggggctgggagccctgggcgtgtagtgtaactggaatcttttgcctctcccagccacctcctcccagccccccaggagagctgggcacatgtcccaagcctgtcagtggccctccctggtgcactgtccccgaaacccctgcttgggaagggaagctgtcgggtgggctaggactgacccttgtggtgtttttttgggtggtggctggaaacagcccctctcccacgtggcagaggctcagcctggctcccttccctggagcggcagggcgtgacggccacagggtctgcccgctgcacgttctgccaaggtggtggtggcgggcgggtaggggtgtgggggccgtcttcctcctgtctctttcctttcaccctagcctgactggaagcagaaaatgaccaaatcagtattttttttaatgaaatattattgctggaggcgtcccaggcaagcctggctgtagtagcgagtgatctggcggggggcgtctcagcaccctccccagggggtgcatctcagccccctctttccgtccttcccgtccagccccagccctgggcctgggctgccgacacctgggccagagcccctgctgtgattggtgctccctgggcctcccgggtggatgaagccaggcgtcgccccctccgggagccctggggtgagccgccggggcccccctgctgccagcctcccccgtccccaacatgcatctcactctgggtgtcttggtcttttattttttgtaagtgtcatttgtataactctaaacgcccatgatagtagcttcaaactggaaatagcgaaataaaataactcagtctgc

SEQ ID NO: 135036 - DNA, 2777 bp, Artificial Sequence
  derived and/or modified sequence
gctgcggagggtgcgtgcgggccgcggcagccgaacaaaggagcaggggcgccgccgcagggacccgccacccacctcccggggccgcgcagcggcctctcgtctactgccaccatgaccgccaacggcacagccgaggcggtgcagatccagttcggcctcatcaactgcggcaacaagtacctgacggccgaggcgttcgggttcaaggtgaacgcgtccgccagcagcctgaagaagaagcagatctggacgctggagcagccccctgacgaggcgggcagcgcggccgtgtgcctgcgcagccacctgggccgctacctggcggcggacaaggacggcaacgtgacctgcgagcgcgaggtgcccggtcccgactgccgtttcctcatcgtggcgcacgacgacggtcgctggtcgctgcagtccgaggcgcaccggcgctacttcggcggcaccgaggaccgcctgtcctgcttcgcgcagacggtgtcccccgccgagaagtggagcgtgcacatcgccatgcaccctcaggtcaacatctacagcgtcacccgtaagcgctacgcgcacctgagcgcgcggccggccgacgagatcgccgtggaccgcgacgtgccctggggcgtcgactcgctcatcaccctcgccttccaggaccagcgctacagcgtgcagaccgccgaccaccgcttcctgcgccacgacgggcgcctggtggcgcgccccgagccggccactggctacacgctggagttccgctccggcaaggtggccttccgcgactgcgagggccgttacctggcgccgtcggggcccagcggcacgctcaaggcgggcaaggccaccaaggtgggcaaggacgagctctttgctctggagcagagctgcgcccaggtcgtgctgcaggcggccaacgagaggaacgtgtccacgcgccagggtatggacctgtctgccaatcaggacgaggagaccgaccaggagaccttccagctggagatcgaccgcgacaccaaaaagtgtgccttccgtacccacacgggcaagtactggacgctgacggccaccgggggcgtgcagtccaccgcctccagcaagaatgccagctgctactttgacatcgagtggcgtgaccggcgcatcacactgagggcgtccaatggcaagtttgtgacctccaagaagaatgggcagctggccgcctcggtggagacagcaggggactcagagctcttcctcatgaagctcatcaaccgccccatcatcgtgttccgcggggagcatggcttcatcggctgccgcaaggtcacgggcaccctggacgccaaccgctccagctatgacgtcttccagctggagttcaacgatggcgcctacaacatcaaagactccacaggcaaatactggacggtgggcagtgactccgcggtcaccagcagcggcgacactcctgtggacttcttcttcgagttctgcgactataacaaggtggccatcaaggtgggcgggcgctacctgaagggcgaccacgcaggcgtcctgaaggcctcggcggaaaccgtggaccccgcctcgctctgggagtactagggccggcccgtccttccccgcccctgcccacatggcggctcctgccaaccctccctgctaaccccttctccgccaggtgggctccagggcgggaggcaagcccccttgcctttcaaactggaaaccccagagaaaacggtgcccccacctgtcgcccctatggactccccactctcccctccgcccgggttccctactcccctcgggtcagcggctgcggcctggccctgggagggatttcagatgcccctgccctcttgtctgccacggggcgagtctggcacctctttcttctgacctcagacggctctgagccttatttctctggaagcggctaagggacggttgggggctgggagccctgggcgtgtagtgtaactggaatcttttgcctctcccagccacctcctcccagccccccaggagagctgggcacatgtcccaagcctgtcagtggccctccctggtgcactgtccccgaaacccctgcttgggaagggaagctgtcgggtgggctaggactgacccttgtggtgtttttttgggtggtggctggaaacagcccctctcccacgtggcagaggctcagcctggctcccttccctggagcggcagggcgtgacggccacagggtctgcccgctgcacgttctgccaaggtggtggtggcgggcgggtaggggtgtgggggccgtcttcctcctgtctctttcctttcaccctagcctgactggaagcagaaaatgaccaaatcagtattttttttaatgaaatattattgctggaggcgtcccaggcaagcctggctgtagtagcgagtgatctggcggggggcgtctcagcaccctccccagggggtgcatctcagccccctctttccgtccttcccgtccagccccagccctgggcctgggctgccgacacctgggccagagcccctgctgtgattggtgctccctgggcctcccgggtggatgaagccaggcgtcgccccctccgggagccctggggtgagccgccggggcccccctgctgccagcctcccccgtccccaacatgcatctcactctgggtgtcttggtcttttattttttgtaagtgtcatttgtataactctaaacgcccatgatagtagcttcaaactggaaatagcgaaataaaataactcagtctgcagcccca

SEQ ID NO: 135037 - DNA, 2182 bp, Artificial Sequence
  derived and/or modified sequence
gtaatttgtagagacgggggtggggtgggggtcttgctatgttgcccaggctggtctcaaactcctagactcaaacaatcctcctgccttggcctcccaaagtgttgcgatcacaggcatgagcccctgtccctggcccctattatttctctaactggggaaagtcatgtgggaacagatgtagcttgccttggcctctgaccggccctgcctgcgttcctgggtgctctctgctgcttctcatgtgtgccactgtggggactcggccgcccaccccaccccgtggtgttaccttgcgtgtgtagttctgtgagctcagggctatggtctgccagaactagggggcgtggggccccagtaccagcccaaggcctcctctctgcaggtatggacctgtctgccaatcaggacgaggagaccgaccaggagaccttccagctggagatcgaccgcgacaccaaaaagtgtgccttccgtacccacacgggcaagtactggacgctgacggccaccgggggcgtgcagtccaccgcctccagcaagaatgccagctgctactttgacatcgagtggcgtgaccggcgcatcacactgagggcgtccaatggcaagtttgtgacctccaagaagaatgggcagctggccgcctcggtggagacagcaggggactcagagctcttcctcatgaagctcatcaaccgccccatcatcgtgttccgcggggagcatggcttcatcggctgccgcaaggtcacgggcaccctggacgccaaccgctccagctatgacgtcttccagctggagttcaacgatggcgcctacaacatcaaagactccacaggcaaatactggacggtgggcagtgactccgcggtcaccagcagcggcgacactcctgtggacttcttcttcgagttctgcgactataacaaggtggccatcaaggtgggcgggcgctacctgaagggcgaccacgcaggcgtcctgaaggcctcggcggaaaccgtggaccccgcctcgctctgggagtactagggccggcccgtccttccccgcccctgcccacatggcggctcctgccaaccctccctgctaaccccttctccgccaggtgggctccagggcgggaggcaagcccccttgcctttcaaactggaaaccccagagaaaacggtgcccccacctgtcgcccctatggactccccactctcccctccgcccgggttccctactcccctcgggtcagcggctgcggcctggccctgggagggatttcagatgcccctgccctcttgtctgccacggggcgagtctggcacctctttcttctgacctcagacggctctgagccttatttctctggaagcggctaagggacggttgggggctgggagccctgggcgtgtagtgtaactggaatcttttgcctctcccagccacctcctcccagccccccaggagagctgggcacatgtcccaagcctgtcagtggccctccctggtgcactgtccccgaaacccctgcttgggaagggaagctgtcgggtgggctaggactgacccttgtggtgtttttttgggtggtggctggaaacagcccctctcccacgtggcagaggctcagcctggctcccttccctggagcggcagggcgtgacggccacagggtctgcccgctgcacgttctgccaaggtggtggtggcgggcgggtaggggtgtgggggccgtcttcctcctgtctctttcctttcaccctagcctgactggaagcagaaaatgaccaaatcagtattttttttaatgaaatattattgctggaggcgtcccaggcaagcctggctgtagtagcgagtgatctggcggggggcgtctcagcaccctccccagggggtgcatctcagccccctctttccgtccttcccgtccagccccagccctgggcctgggctgccgacacctgggccagagcccctgctgtgattggtgctccctgggcctcccgggtggatgaagccaggcgtcgccccctccgctgccagcctcccccgtccccaacatgcatctcactctgggtgtcttggtcttttattttttgtaagtgtcatttgtataactctaaacgcccatgatagtagcttcaaactggaaatagcgaaataaaataactcagtctgcagcccc

SEQ ID NO: 135038 - DNA, 1419 bp, Artificial Sequence
  derived and/or modified sequence
atgacagctaacggcactgccgaggctgtccagattcaattcggactcatcaactgtggtaataaatacctgaccgcagaagcctttggtttcaaagtgaacgcttccgccagctctctcaagaagaaccacctaggtagatatctcgctgctgacaaggacggaaacgtgacatgcgagcgcgaggtaccgggcccagactgccggttcctgattgtggcacacgatgacggccgttggtctctgcagtctgaggctcacaggaggtattttggtggcactgaagatcgtctgagttgtttcgctcaaacggtctcccccgccgagaagtggtccgttcacatagctatgcacccacaggtcaatatttattccgtgacaagaaagcgttacgcccacttgtccgcaagacccgccgatgagatcgccgtggatcgggacgtaccttggggggtggactcactgatcacacttgcattccaggaccagcgttatagtgttcaaacagccgatcacagattccttagacacgatggaagactcgtagcaagaccagaacctgctactgggtacaccctggaattcaggtcaggtaaggtggctttccgggattgcgagggtaggtacttagctccctctggcccttccggaaccctcaaagctggaaaagccacaaaggtgggaaaggacgagctctttgctttagagcagtcatgcgcccaagtggtattgcaggctgcaaacgaaagaaacgtatcgacacggcaaggcatggacttgtctgctaaccaagacgaggagaccgaccaggaaactttccagctggagattgaccgcgataccaagaagtgcgccttccgaacccatacaggtaagtactggactctgactgccacgggtggggtgcagtctaccgcctcatctaagaatgccagctgctattttgatatagaatggagggatcgaaggataactctgagagcttctaacggtaagtttgttactagtaaaaagaatggacagctggcagcttccgtagaaactgcaggggattcagaactgttcttgatgaagctgataaatagacctatcatcgtctttaggggcgagcacggattcattggctgccggaaagtgacggggacccttgacgccaaccgaagctcttatgacgtgttccagctggagtttaatgacggtgcctacaatataaaagactccaccggcaaatactggactgttggaagcgactcggcagtgacttcctccggtgacacacctgtggactttttttttgagttctgcgactataataaagtcgccatcaaggtcggcggaaggtatcttaaaggggaccatgctggtgtgctcaaagcttccgcggaaacagtggatccagcaagcctgtgggagtactag

SEQ ID NO: 135039 - DNA, 1482 bp, Artificial Sequence
  derived and/or modified sequence
atgacggccaacggaaccgcagaagcagtgcagatccagttcgggttaataaactgcggtaataagtacctaacagccgaagcttttggatttaaagttaatgcttcagcaagctccctcaagaaaaagcagatctggacgttggagcagcccccagacgaagccggttccgcggccgtctgtttgcgcagccacctcggcagatatctcgcagccgataaagacggtaatgtgacatgtgaaagggaagtacccggccctgactgccgctttctgattgtagctcacgatgacggccgttggtctttacaaagcgaagcccacagacggtacttcggaggcaccgaggatcgtctgtcctgcttcgcccaaacggtgtcccctgccgagaagtggagcgtgcacattgccatgcacccccaggtgaatatttactctgtaacccgaaagaggtacgcacacctttcagcaagacctgcggatgagatagctgtcgatagagacgtcccttggggggtagactccctcatcacgctcgcatttcaggaccagcgttattccgttcaaacagctgatcaccgctttttacggcacgatggacgcctcgtggcgaggcccgaaccggccacagggtatacccttgaattccgatcgggaaaagtagctttcagagactgcgaggggagatacctagccccctcgggcccatcaggcaccctgaaggcaggcaaggctacaaaagttgggaaagatgagttgttcgcattagagcaatcctgcgcacaggtggtgctgcaggcagctaatgaaaggaatgtttccactagacaagggatggatctgagcgccaatcaggacgaggaaaccgaccaggagaccttccagttagagatcgaccgggatacgaagaagtgtgcctttcggacacacacagggaaatactggactttgacagccactggcggtgttcagagtactgcttctagtaaaaacgctagctgttacttcgatattgagtggagggacaggagaattacactccgggcatccaacggaaaattcgtgaccagtaaaaagaacggccagctggcagcctcggtcgaaactgctggtgacagcgagctgttcctgatgaagctgattaatcgccccattatcgtgttcagaggcgagcacggctttataggctgccgaaaagtcacgggcacattagatgccaacaggtcctcttatgatgtgtttcagcttgaatttaatgacggtgcatacaacatcaaagactcaaccggcaagtattggaccgtgggttctgactccgcagtgacaagttctggcgatactccagtggactttttctttgaattttgcgattataacaaagtggccatcaaggttggaggaaggtacctgaagggtgaccacgcaggcgttttgaaggcttcagctgaaaccgtagaccccgccagtttgtgggaatattag

SEQ ID NO: 135040 - DNA, 648 bp, Artificial Sequence
  derived and/or modified sequence
atggatctgtccgctaatcaggatgaggaaactgaccaggagacatttcaactcgagattgaccgggacacgaaaaagtgtgcatttcgtactcacacaggaaagtattggactttgacggctactggaggcgtgcagtctactgcgtcctctaagaacgcttcgtgttatttcgacatagagtggcgggacaggcggatcacgctgcgcgcctccaacgggaaatttgtgacgtcgaagaagaatggccagctggcggcaagcgtggagaccgcaggcgattcagagctgttcctgatgaagttgataaatcgcccaatcattgttttcagaggcgagcacgggtttattggttgccgcaaggtgacaggcaccctggacgcaaacaggtcctcttacgacgtctttcagctcgagttcaacgacggtgcctataacatcaaggactccaccggcaaatactggacggtcggatccgacagtgctgtaacgagctccggggacaccccagtggacttcttttttgagttctgtgattacaacaaagtggcgataaaggtaggaggcagataccttaagggagaccacgcaggagtgctgaaagccagtgccgaaactgtcgatcccgcctccctgtgggagtactag

SEQ ID NO: 135041 - DNA, 1419 bp, Artificial Sequence
  derived and/or modified sequence
atgacagccaacggcacagctgaggccgtgcagatccagtttggcctcatcaactgtggcaacaagtacctgacagctgaggccttcggcttcaaggtgaatgccagcgccagcagcctgaagaagaaccacctgggccgctacctggccgctgacaaggatggaaatgtgacctgtgagcgggaggtgcccggccctgactgccgcttcctgattgtggcccatgatgatggccgctggagcctgcagagcgaggcccaccggcgctactttggaggaacagaagatcggctgagctgctttgcccagacagtgtccccagctgagaagtggagcgtgcacatcgccatgcacccccaggtgaacatctacagcgtgaccaggaagagatatgcccacctgagcgcccggccagcagatgaaattgctgtggacagagatgtgccctggggcgtggacagcctcatcaccctggccttccaggaccagcgctacagcgtgcagacagctgaccaccgcttcctgcggcatgatggccgcctggtggcccggcctgagcccgccaccggctacaccctggagttccgcagcggcaaggtggccttccgggactgtgagggccgctacctggcccccagcggccccagcggcaccctgaaggccggcaaggccaccaaggtgggcaaggatgagctgtttgccctggagcagagctgtgcccaggtggtgctgcaggccgccaatgaaagaaatgtgtccacccggcagggcatggacctgagcgccaaccaggatgaggagacagaccaggagaccttccagctggagattgaccgggacaccaagaagtgtgccttccgcacccacacaggcaagtactggaccctgacagccactggaggagtgcagagcacagccagcagcaagaatgccagctgctactttgatattgagtggagggaccggcgcatcaccctgcgggccagcaatggcaagtttgtgaccagcaagaagaatggccagctggccgcctctgtggagacagctggggacagcgagctgttcctgatgaagctgatcaaccggcccatcatcgtgttccggggggagcacggcttcatcggctgcaggaaggtgacaggcaccctggatgccaacagaagcagctatgatgtgttccagctggagttcaatgatggagcctacaacatcaaggacagcacaggcaagtactggacagtgggcagtgacagcgctgtgaccagcagcggggacacccctgtggacttcttctttgagttctgtgactacaacaaggtggccatcaaggtgggcggccgctacctgaagggggaccacgccggcgtgctgaaggccagcgctgagaccgtggaccctgccagcctgtgggagtactag

SEQ ID NO: 135042 - DNA, 1482 bp, Artificial Sequence
  derived and/or modified sequence
atgacagccaacggcacagctgaggccgtgcagatccagtttggcctcatcaactgtggcaacaagtacctgacagctgaggccttcggcttcaaggtgaatgccagcgccagcagcctgaagaagaagcagatctggaccctggagcagcccccagatgaagctggcagcgctgctgtgtgcctgcggagccacctgggccgctacctggccgctgacaaggatggaaatgtgacctgtgagcgggaggtgcccggccctgactgccgcttcctgattgtggcccatgatgatggccgctggagcctgcagagcgaggcccaccggcgctactttggaggaacagaggaccggctgagctgctttgcccagacagtgtccccagctgagaagtggagcgtgcacatcgccatgcacccccaggtgaacatctacagcgtgaccaggaagagatatgcccacctgagcgcccggccagcagatgaaattgctgtggacagagatgtgccctggggcgtggacagcctcatcaccctggccttccaggaccagcgctacagcgtgcagacagctgaccaccgcttcctgcggcatgatggccgcctggtggcccggcctgagcccgccaccggctacaccctggagttccgcagcggcaaggtggccttccgggactgtgagggccgctacctggcccccagcggccccagcggcaccctgaaggccggcaaggccaccaaggtgggcaaggatgagctgtttgccctggagcagagctgtgcccaggtggtgctgcaggccgccaatgaaagaaatgtgtccacccggcagggcatggacctgagcgccaaccaggatgaggagacagaccaggagaccttccagctggagattgaccgggacaccaagaagtgtgccttccgcacccacacaggcaagtactggaccctgacagccaccggcggcgtgcagagcacagccagcagcaagaatgccagctgctactttgacatcgagtggagggaccggcgcatcaccctgcgggccagcaatggcaagtttgtgaccagcaagaagaatggccagctggccgcctctgtggagacagctggggacagcgagctgttcctgatgaagctgatcaaccggcccatcatcgtgttccggggggagcacggcttcatcggctgcaggaaggtgacaggcaccctggatgccaacagaagcagctatgatgtgttccagctggagttcaatgatggagcctacaacatcaaggacagcacaggcaagtactggacagtgggcagtgacagcgctgtgaccagcagcggggacacccctgtggacttcttctttgagttctgtgactacaacaaggtggccatcaaggtgggcggccgctacctgaagggggaccatgctggggtgctgaaggccagcgctgagaccgtggaccctgccagcctgtgggagtactag

SEQ ID NO: 135043 - DNA, 648 bp, Artificial Sequence
  derived and/or modified sequence
atggacctgagcgccaaccaggatgaggagacagaccaggagaccttccagctggagattgaccgggacaccaagaagtgtgccttccgcacccacacaggcaagtactggaccctgacagccaccggcggcgtgcagagcacagccagcagcaagaatgccagctgctactttgacatcgagtggagggaccggcgcatcaccctgcgggccagcaatggcaagtttgtgaccagcaagaagaatggccagctggccgcctctgtggagacagctggggacagcgagctgttcctgatgaagctgatcaaccggcccatcatcgtgttccggggggagcacggcttcatcggctgcaggaaggtgacaggcaccctggatgccaacagaagcagctatgatgtgttccagctggagttcaatgatggagcctacaacatcaaggacagcacaggcaagtactggacagtgggcagtgacagcgctgtgaccagcagcggggacacccctgtggacttcttctttgagttctgtgactacaacaaggtggccatcaaggtgggcggccgctacctgaagggggaccatgctggggtgctgaaggccagcgctgagaccgtggaccctgccagcctgtgggagtactag

SEQ ID NO: 135044 - DNA, 1419 bp, Artificial Sequence
  derived and/or modified sequence
atgaccgccaacggcaccgccgaggccgtgcagatccagttcggccttataaattgtgggaacaaatacctgacagccgaagcattcggtttcaaagtgaacgcctccgcctcctctttgaaaaagaatcatctgggcaggtacctggccgccgacaaagacggcaacgtcacttgcgagcgcgaggttccgggccctgactgccgatttctcatcgtagctcatgacgatggcagatggtctcttcagagcgaagctcaccgaaggtacttcggagggacagaggatcgccttagttgtttcgcacagacagtgtctccagccgaaaaatggtccgtgcacatagcgatgcatccgcaggtgaatatctacagcgtcactcggaaaaggtatgcacacctttcagcccggcctgctgacgagatcgctgtggaccgggacgtgccctggggggttgacagtttgattacccttgccttccaggatcaacgctattccgtgcagacggcagatcatcgcttcctgcggcatgacgggcggctcgttgcccgccctgagcctgccactggctacactctcgaattcaggagcgggaaagtggcctttcgggactgcgagggccggtatttagctccaagcgggcctagcggaactctgaaagctggaaaagcaacaaaagtcggaaaagacgagctattcgcgctcgagcagagctgtgctcaagtggtcctccaggccgccaacgagcgcaacgtctcaaccaggcaggggatggacctctctgccaaccaggacgaagaaaccgatcaggagacattccaacttgagatcgacagagatacaaaaaagtgcgcgttcaggactcataccggcaagtattggactctcaccgcaacaggcggggtgcagtcaacggctagcagcaaaaatgcatcatgctacttcgatattgagtggcgcgacagacggattacccttagagcttccaacggtaagttcgtcacctcaaagaagaacggacagcttgccgcttctgttgagaccgctggcgactcagagctgttcttaatgaagcttattaaccgtcccatcattgtctttcgcggcgaacatggatttatagggtgtcggaaggttaccggcacactggacgccaaccgttcctcctacgatgtttttcagctggaattcaacgacggagcctacaatatcaaggacagcaccggcaaatactggactgttggatcagattctgctgtcacaagctccggcgatacccccgtggatttcttttttgaattctgcgactataacaaggtcgccattaaggtcggtggcagatatcttaagggggatcatgctggagttctcaaagcctccgccgaaacagttgaccctgcgagcctgtgggagtattag

SEQ ID NO: 135045 - DNA, 1482 bp, Artificial Sequence
  derived and/or modified sequence
atgaccgccaacggcaccgccgaggccgtgcagatccagttcggcctgataaattgcgggaacaaatatttgactgcagaggcgttcggattcaaggttaacgcttccgcctcgtcgctgaaaaagaaacagatctggactctcgagcagccgccagacgaagccggttccgccgcagtttgtctgcggtctcacctgggtagatacctggccgccgataaggatggaaatgtgacgtgcgaaagagaggtgccaggaccggactgccgtttcctaatagtggctcacgatgacgggcgatggtctctccagagcgaggcccataggcggtactttggagggaccgaggaccggctgtcttgctttgcacagacagtttctcccgctgaaaagtggtcagtgcatatcgccatgcacccccaggtgaacatctactccgtgacacgaaagaggtacgcacatctaagcgctagacccgctgatgagatagccgtcgaccgagatgtcccgtggggagtggactctctgattactctcgcatttcaggatcagcgctactccgtgcagactgccgatcatcggtttctgcgacacgacggccggcttgtggcaagaccagagccagcaactggctatacgctcgaattccgctccggaaaggtggcgttcagggactgtgaaggcagatatttggcccctagcggtccctcgggtacactcaaggcaggaaaggcaacaaaggtcggtaaggatgaactattcgccctggaacagtcctgtgctcaggttgtgctccaggcggctaatgagcgcaatgtctccacgcgacaaggcatggatttaagcgccaatcaggacgaagagaccgaccaggaaaccttccagcttgaaatagaccgtgacactaaaaagtgtgcctttaggacccacactggcaagtactggacactgaccgctacaggtggagttcagagcaccgcaagctctaagaacgcatcttgctacttcgacatcgaatggagagaccggcggatcactctgagggccagcaatggtaaatttgttacatctaagaagaacggacagctcgccgcgagcgtggagacggccggcgactcggagctctttcttatgaaactgataaaccggcctatcatcgtctttaggggagaacacgggttcatcggatgtcggaaagtgaccggaaccctggatgctaaccgttcgtcttacgacgtgtttcagctggaatttaacgacggcgcctataacatcaaagactctaccggcaaatactggaccgtagggtcagactccgcagtcactagctctggtgatacgccagtggatttcttctttgagttctgcgattacaacaaggtggcaattaaggtgggcgggcgatatctgaaaggtgatcacgccggcgtgctgaaggcctccgccgaaaccgtggacccagcctccttgtgggagtactag

SEQ ID NO: 135046 - DNA, 648 bp, Artificial Sequence
  derived and/or modified sequence
atggacctgagcgccaaccaggacgaggagaccgaccaggagaccttccagctggagatcgatcgggacaccaagaagtgtgccttccggacacacaccggcaaatactggaccctcacagccacagggggcgtccagagtaccgccagtagcaaaaacgcatcctgctattttgatattgagtggcgggatcggcggatcacattgcgggcctcaaatgggaaattcgtgaccagtaagaaaaacggacaactggcagccagtgtcgagactgccggggattcggaattgtttttaatgaaactcatcaatagaccgattatagtctttcgaggcgaacatggcttcatcggctgtcggaaggtgaccggaacgttggatgctaacagatccagttatgatgtgttccagctggaattcaatgacggagcatataacataaaggatagtaccggaaaatattggacagtgggaagtgactcagcagtgacctcctcaggagacactcccgtggacttcttcttcgagttctgcgactataacaaagtcgccatcaaagtgggcggccggtatttgaaaggggatcacgccggagttctgaaggcctccgccgagaccgtggatccagcaagcttgtgggagtactag

SEQ ID NO: 135047 - DNA, 1419 bp, Artificial Sequence
  derived and/or modified sequence
atgacagcgaacggcactgccgaagcagttcaaatccaatttggactgattaattgtggcaataagtatctcaccgccgaagcgttcggctttaaagtgaacgcaagtgcctcctccctgaagaagaatcatttaggaagatacctggccgcagacaaagatggcaatgttacttgcgagcgggaagttcctggacccgactgcagattcctcatcgtggctcatgacgatggtagatggtccctacagagtgaggcccaccggagatatttcggcggaacagaagacaggctgtcgtgtttcgcccagactgtgagcccagcagaaaagtggtcggtccacatcgcaatgcatcctcaggtcaacatctattccgtgacacgcaaaaggtacgcccatcttagtgcaagacccgcagatgagatcgcagtcgaccgtgacgtgccatggggtgttgattcgttaatcacccttgcattccaagaccagcgctacagtgtgcagactgcagatcaccgattcttgcggcatgatggtcgcttggtggcacgaccagaacctgccacagggtatacactagaatttcgttccggcaaggtggcatttcgcgattgtgaggggcgttatctggcaccatccggacccagtgggaccctaaaagccggaaaagcgacaaaggttggtaaagatgagctgttcgccttagaacagtcgtgtgcacaggttgtgctacaggctgctaatgagcgcaacgtgtcaacgcgtcaagggatggatctaagcgccaatcaggacgaggagacagatcaagagacattccagctcgaaatcgatcgcgacacaaaaaaatgtgccttcagaactcacaccgggaaatattggactttgaccgctaccggaggggtccaatccaccgcatccagcaagaacgcttcatgttactttgacattgaatggagagatcgaagaatcacgcttagggccagcaacggaaaattcgtgacgtctaagaagaacggtcagctggctgcctccgtcgaaacggccggtgactcggagctgtttcttatgaagctcatcaaccgtcccattatcgttttccgcggtgaacacggatttataggatgcaggaaggtcactggcaccctggacgcaaaccggtccagctatgatgtatttcagttggagttcaatgatggggcttataacatcaaagattccacaggcaaatattggacggttggttctgactccgctgttacgagcagtggggatacaccagttgacttcttttttgaattctgcgactacaataaggtcgcaattaaggtgggcggaaggtatctcaaaggtgaccacgctggcgtcctcaaagcatctgctgagacagtcgatcccgcttctctgtgggagtactag

SEQ ID NO: 135048 - DNA, 1482 bp, Artificial Sequence
  derived and/or modified sequence
atgactgccaatggtacagcggaggccgtacaaattcagttcggactcatcaattgtgggaacaagtacctgactgctgaggcattcgggttcaaagtgaatgcctccgcaagtagcctgaaaaagaagcagatatggacgttagagcagccgcctgacgaagctggcagcgcagccgtctgcttaagatcgcatctcggcaggtatttggctgccgataaggatggtaacgtcacatgtgaacgcgaggtgccgggtcccgattgtaggttcctaatcgtggcccatgatgatggaagatggagcttgcaatccgaagcccaccggcgttacttcggcggaactgaggatagactgtcctgttttgcacagactgtgtcccctgccgagaagtggtccgtccatattgctatgcaccctcaggtcaacatttacagtgttactcggaagcgctatgcccacctgtctgctcggccagcagatgagatcgccgttgatagggacgttccctggggcgtggactctctaataacgttggccttccaagaccagaggtacagcgttcagacagctgaccatcggttcctgcgccatgacggcaggcttgtcgcacgccctgaacccgcaactggatacaccctagagttcaggagcggaaaagttgccttcagagattgtgaggggaggtacctggctccttctggccctagtggaacactcaaagctgggaaagccactaaggtcggaaaggacgaactcttcgcacttgagcagagctgtgctcaggtcgtgctccaagcagctaacgagcggaatgtgagtacccggcagggtatggatctgtcggctaaccaagacgaggaaacagatcaagagacctttcaattggagatcgatagggacaccaagaagtgcgccttccggacacacaccggaaaatactggaccctgaccgccacgggcggagtgcagtcaaccgcttcttcaaagaatgcatcctgctatttcgacattgaatggcgggaccggcgaatcaccctgagggccagcaacgggaagttcgtgacttctaaaaagaacggacaattggcagcaagtgtagagactgctggggattctgaactgtttctgatgaaattgattaacagacccattatcgtattccgaggagagcacggcttcatagggtgtagaaaggttaccggcactctcgacgccaacagaagctcttatgatgtgtttcagctggagtttaacgacggggcttacaatataaaggactccacgggcaagtactggactgtaggatcagattcagcagtaacaagtagcggcgacacacctgtggatttcttctttgaattctgcgattacaacaaagtggctatcaaggtaggcggaagatatctcaaaggagatcacgcgggagtgctcaaggccagcgctgaaacagtggatccggctagcctgtgggaatattag

SEQ ID NO: 135049 - DNA, 648 bp, Artificial Sequence
  derived and/or modified sequence
atggacttgagcgcaaatcaggatgaagagaccgaccaagaaacctttcagctagaaattgatagagacaccaaaaaatgtgccttccgcacacatacaggcaagtactggaccctcacggcaactgggggagttcagtcaacggccagctctaaaaacgcctcctgttactttgacatcgagtggagagatcgacggatcacactaagggcttctaacgggaaattcgtgacatcgaaaaaaaacggtcagcttgccgcttccgtggaaactgccggagacagcgagctctttctgatgaaactgattaatcggccaatcattgtgttccggggagaacatggattcattggatgtaggaaggtcaccgggacactggatgctaaccgctcctcttacgacgtatttcagttagagtttaacgatggcgcatataacataaaggacagtactggaaaatattggaccgttggttctgatagtgccgttacaagctctggggacacacctgtagacttcttctttgagttttgtgattacaacaaagtcgccatcaaggttggaggcagatatctaaagggtgatcacgctggcgttttaaaggcttccgctgaaaccgtggaccccgcaagtctctgggaatactag

SEQ ID NO: 135050 - DNA, 1419 bp, Artificial Sequence
  derived and/or modified sequence
atgaccgccaacggcaccgccgaggccgtgcagatccagttcggcctgatcaactgcggcaacaagtacctgaccgccgaggccttcggcttcaaggtgaacgccagcgccagcagcctgaagaagaaccacctgggcagatacctggccgccgacaaggacggcaacgtgacctgcgagagagaggtgcccggccccgactgcagattcctgatcgtggcccacgacgacggcagatggagcctgcagagcgaggcccacagaagatacttcggcggcaccgaggacagactgagctgcttcgcccagaccgtgagccccgccgagaagtggagcgtgcacatcgccatgcacccccaggtgaacatctacagcgtgaccagaaagagatacgcccacctgagcgccagacccgccgacgagatcgccgtggacagagacgtgccctggggcgtggacagcctgatcaccctggccttccaggaccagagatacagcgtgcagaccgccgaccacagattcctgagacacgacggcagactggtggccagacccgagcccgccaccggctacaccctggagttcagaagcggcaaggtggccttcagagactgcgagggcagatacctggcccccagcggccccagcggcaccctgaaggccggcaaggccaccaaggtgggcaaggacgagctgttcgccctggagcagagctgcgcccaggtggtgctgcaggccgccaacgagagaaacgtgagcaccagacagggcatggacctgagcgccaaccaggacgaggagaccgaccaggagaccttccagctggagatcgacagagacaccaagaagtgcgccttcagaacccacaccggcaagtactggaccctgaccgccaccggcggcgtgcagagcaccgccagcagcaagaacgccagctgctacttcgacatcgagtggagagacagaagaatcaccctgagagccagcaacggcaagttcgtgaccagcaagaagaacggccagctggccgccagcgtggagaccgccggcgacagcgagctgttcctgatgaagctgatcaacagacccatcatcgtgttcagaggcgagcacggcttcatcggctgcagaaaggtgaccggcaccctggacgccaacagaagcagctacgacgtgttccagctggagttcaacgacggcgcctacaacatcaaggacagcaccggcaagtactggaccgtgggcagcgacagcgccgtgaccagcagcggcgacacccccgtggacttcttcttcgagttctgcgactacaacaaggtggccatcaaggtgggcggcagatacctgaagggcgaccacgccggcgtgctgaaggccagcgccgagaccgtggaccccgccagcctgtgggagtactag

SEQ ID NO: 135051 - DNA, 1482 bp, Artificial Sequence
  derived and/or modified sequence
atgaccgccaacggcaccgccgaggccgtgcagatccagttcggcctgatcaactgcggcaacaagtacctgaccgccgaggccttcggcttcaaggtgaacgccagcgccagcagcctgaagaagaagcagatctggaccctggagcagccccccgacgaggccggcagcgccgccgtgtgcctgagaagccacctgggcagatacctggccgccgacaaggacggcaacgtgacctgcgagagagaggtgcccggccccgactgcagattcctgatcgtggcccacgacgacggcagatggagcctgcagagcgaggcccacagaagatacttcggcggcaccgaggacagactgagctgcttcgcccagaccgtgagccccgccgagaagtggagcgtgcacatcgccatgcacccccaggtgaacatctacagcgtgaccagaaagagatacgcccacctgagcgccagacccgccgacgagatcgccgtggacagagacgtgccctggggcgtggacagcctgatcaccctggccttccaggaccagagatacagcgtgcagaccgccgaccacagattcctgagacacgacggcagactggtggccagacccgagcccgccaccggctacaccctggagttcagaagcggcaaggtggccttcagagactgcgagggcagatacctggcccccagcggccccagcggcaccctgaaggccggcaaggccaccaaggtgggcaaggacgagctgttcgccctggagcagagctgcgcccaggtggtgctgcaggccgccaacgagagaaacgtgagcaccagacagggcatggacctgagcgccaaccaggacgaggagaccgaccaggagaccttccagctggagatcgacagagacaccaagaagtgcgccttcagaacccacaccggcaagtactggaccctgaccgccaccggcggcgtgcagagcaccgccagcagcaagaacgccagctgctacttcgacatcgagtggagagacagaagaatcaccctgagagccagcaacggcaagttcgtgaccagcaagaagaacggccagctggccgccagcgtggagaccgccggcgacagcgagctgttcctgatgaagctgatcaacagacccatcatcgtgttcagaggcgagcacggcttcatcggctgcagaaaggtgaccggcaccctggacgccaacagaagcagctacgacgtgttccagctggagttcaacgacggcgcctacaacatcaaggacagcaccggcaagtactggaccgtgggcagcgacagcgccgtgaccagcagcggcgacacccccgtggacttcttcttcgagttctgcgactacaacaaggtggccatcaaggtgggcggcagatacctgaagggcgaccacgccggcgtgctgaaggccagcgccgagaccgtggaccccgccagcctgtgggagtactag

SEQ ID NO: 135052 - DNA, 648 bp, Artificial Sequence
  derived and/or modified sequence
atggacctgagcgccaaccaggacgaggagaccgaccaggagaccttccagctggagatcgacagagacaccaagaagtgcgccttcagaacccacaccggcaagtactggaccctgaccgccaccggcggcgtgcagagcaccgccagcagcaagaacgccagctgctacttcgacatcgagtggagagacagaagaatcaccctgagagccagcaacggcaagttcgtgaccagcaagaagaacggccagctggccgccagcgtggagaccgccggcgacagcgagctgttcctgatgaagctgatcaacagacccatcatcgtgttcagaggcgagcacggcttcatcggctgcagaaaggtgaccggcaccctggacgccaacagaagcagctacgacgtgttccagctggagttcaacgacggcgcctacaacatcaaggacagcaccggcaagtactggaccgtgggcagcgacagcgccgtgaccagcagcggcgacacccccgtggacttcttcttcgagttctgcgactacaacaaggtggccatcaaggtgggcggcagatacctgaagggcgaccacgccggcgtgctgaaggccagcgccgagaccgtggaccccgccagcctgtgggagtactag

SEQ ID NO: 135053 - protein, 437 aa, Artificial Sequence
  derived and/or modified sequence
MTQFLPPNLLALFAPRDPIPYLPPLEKLPHEKHHNQPYCGIAPYIREFEDPRDAPPPTRAETREERMERKRREKIERRQQEVETELKMWDPHNDPNAQGDAFKTLFVARVNYDTTESKLRREFEVYGPIKRIHMVYSKRSGKPRGYAFIEYEHERDMHSAYKHADGKKIDGRRVLVDVERGRTVKGWRPRRLGGGLGGTRRGGADVNIRHSGRDDTSRYDERPGPSPLPHRDRDRDRERERRERSRERDKERERRRSRSRDRRRRSRSRDKEERRRSRERSKDKDRDRKRRSSRSRERARRERERKEELRGGGGDMAEPSEAGDAPPDDGPPGELGPDGPDGPEEKGRDRDRERRRSHRSERERRRDRDRDRDRDREHKRGERGSERGRDEARGGGGGQDNGLEGLGNDSRDMYMESEGGDGYLAPENGYLMEAAPE

SEQ ID NO: 135054 - protein, 341 aa, Artificial Sequence
  derived and/or modified sequence
MEQALHRFGRGLVWLSVAWLSVGRVRVRDDGDTGRGFCRAGPVLTRGPSGDSSPLPLPTSVTAAYKHADGKKIDGRRVLVDVERGRTVKGWRPRRLGGGLGGTRRGGADVNIRHSGRDDTSRYDERPGPSPLPHRDRDRDRERERRERSRERDKERERRRSRSRDRRRRSRSRDKEERRRSRERSKDKDRDRKRRSSRSRERARRERERKEELRGGGGDMAEPSEAGDAPPDDGPPGELGPDGPDGPEEKGRDRDRERRRSHRSERERRRDRDRDRDRDREHKRGERGSERGRDEARGGGGGQDNGLEGLGNDSRDMYMESEGGDGYLAPENGYLMEAAPE

SEQ ID NO: 135055 - DNA, 1314 bp, Artificial Sequence
  derived and/or modified sequence
atgacccaatttctgcctccgaacctgctggctctgttcgcacctcgtgatccgatcccctatttgcctcccctagaaaaactgcctcatgagaagcatcacaatcagccgtactgcgggattgcaccctatattagggagttcgaggacccccgcgacgcccccccgcccacccgggcagagacccgagaagagagaatggagcgcaaacgacgggaaaagatcgaaagaaggcagcaggaagtggagactgaactgaagatgtgggacccccacaatgatccgaacgcccagggtgatgcctttaagactctctttgtggctcgtgtaaattacgacacgacagagtcgaagttgagaagagaatttgaagtgtacgggcctatcaaacggattcacatggtatattcaaaaagatccggaaaaccccgaggttacgccttcatagaatacgaacacgaaagggacatgcactccgcgtataaacatgccgacgggaaaaagatcgacgggcggcgagtcttggtagatgtcgagaggggccgcactgttaagggctggcggcccaggcgactgggtggaggtctcggggggacccggaggggaggggctgacgtcaatatccgacatagtggtcgcgacgacacaagcagatacgatgagagaccgggccccagtcctctcccacaccgtgacagagatagggaccgcgagcgggagcgacgggagagaagcagggagcgggataaagagagggaacgtagaagaagtagatcgagggatcgacgtaggcgctcgaggtccagagataaagaggaacggaggagaagcagggagagaagtaaggataaggaccgggacaggaaacgacgaagttcccgcagcagagagagggccaggagagaacgtgagagaaaggaagagttgcgtgggggcggcggagacatggcagaaccttccgaagccggcgacgcccctccagatgatggaccccctggggaattggggcccgatggccccgatggacccgaggagaaaggaagagacagagaccgagaacgacggcggtcccacagatctgaacgggagcgcagacgcgaccgggacagggacagggaccgcgacagggagcataaaaggggggagagaggatcagaaaggggtcgagatgaggccaggggcgggggcggggggcaagataacggtctggaagggctggggaacgactcacgtgacatgtacatggaaagtgagggcggcgacgggtaccttgctcctgagaacggctatttgatggaggccgcccctgaatag

SEQ ID NO: 135056 - DNA, 1314 bp, Artificial Sequence
  derived and/or modified sequence
atgacccagttcctgccccccaacctgctggccctgtttgccccccgggaccccatcccctacctgccccccctggagaagctgccccatgagaagcaccacaaccagccctactgcggcatcgccccctacatccgggagtttgaggaccccagagatgcccccccacccaccagggctgagacccgggaggagaggatggagaggaagagaagagagaagattgaaagacggcagcaggaggtggagacagagctgaagatgtgggacccccacaatgaccccaatgcccagggagatgccttcaagaccctgtttgtggcccgggtgaactatgacaccacagagagcaagctgcggcgggagtttgaggtgtatggccccatcaagaggatccacatggtgtacagcaagaggtctgggaagccccggggctacgccttcattgaatatgaacatgagcgggacatgcacagcgcctacaagcatgctgatggcaagaagattgatggccggcgggtgctggtggatgtggagcggggccgcacagtgaagggctggaggccccggcggctgggcggcggcctgggcggcacccggcggggcggcgcagatgtgaacatccgccacagcggcagagatgacaccagccgctatgatgagaggcctggccccagccccctgccccaccgggaccgggaccgggaccgggagcgggagcggcgggagaggagccgggagcgggacaaggagcgggagaggagaagaagccgcagccgggacagaagaagaagaagccgcagccgggacaaggaggagaggagaagaagccgggagaggagcaaggacaaggaccgggacaggaagaggaggagcagccgcagccgggagcgggcccggcgggagcgggagaggaaggaggagctgcggggcggcggcggggacatggccgagcccagcgaggccggagatgcccccccagatgatggccccccaggagagctgggcccagatggcccagatggccctgaggagaagggccgggaccgggaccgggagaggagaagaagccacaggtctgagcgggagaggagaagagaccgggaccgggaccgggaccgggaccgggagcacaagagaggagagcggggcagcgagcggggcagagatgaggcccggggcggcggcggcggccaggacaatggcctggagggcctgggcaatgacagccgggacatgtacatggagagcgagggcggagatggctacctggccccagaaaatggctacctgatggaggccgcccctgagtag

SEQ ID NO: 135057 - DNA, 1314 bp, Artificial Sequence
  derived and/or modified sequence
atgacccagttcctgccccccaacctgctggccctgttcgccccccgggatcccataccatacctgcctcccctggagaaactcccgcacgaaaaacaccacaatcagccttactgtggaatcgctccctacatccgggaattcgaagacccgcgggacgctcctccccctacaagagccgagaccagggaagagcggatggaacggaaaagaagagagaaaatcgaacgtaggcagcaggaggtggagaccgaactcaaaatgtgggatcctcacaacgatcccaacgctcagggagatgcctttaagaccctgtttgtggccagagtgaattatgatacaactgagagcaagctccggcgcgaatttgaggtctacggccccataaaacgcatccacatggtctactccaagcggtccggtaaaccacgcgggtacgcttttatcgaatatgagcacgagcgggatatgcattccgcctataagcacgcagatggaaaaaagatcgacgggagacgagtgctcgtggacgttgagcggggccggaccgtgaagggatggagacctcgtcggttagggggcgggcttggcggcacgagacgcggaggagcggacgtcaatataagacacagcgggagggacgatacttctcggtacgatgaaaggcccggaccctccccgttgccccatagggatcgggacagagatcgcgagcgagaaagacgagagcggtctagggagagagataaagagcgtgagcggcgccgcagccgttccagggatagacgacgtcggtcacggtctcgggacaaggaagaaagacgccgaagcagagagcgctccaaagacaaagacagagaccgaaagaggcgatcctcacgaagccgggagcgcgcacgaagagaaagagagcggaaggaggaactgcgggggggcggaggggacatggcagagccatctgaggccggcgacgcccccccagatgacgggccacctggagagctggggcctgacggcccagacggtccagaagagaaaggacgtgatagagatcgcgaacggcggcggtcccaccgatccgagcgtgagaggcgccgcgatagagacagagatagagaccgggacagagaacataagagaggggaaagaggatcggaacggggcagagatgaagccaggggcggaggcgggggccaagacaatggtttggaaggattgggcaatgactcccgggatatgtatatggaatcggagggaggcgacgggtatctcgctcctgaaaacggatacctgatggaggccgctcctgagtag

SEQ ID NO: 135058 - DNA, 1922 bp, Artificial Sequence
  derived and/or modified sequence
gcggttcggcgcggaaagcgggaggtggaggggcggcttggggcaagcgcgcgcgcgcagtgcagaagccagccccccgcggctgaggtactcaaggtgcccaaaggcggggtagtgacctcgcgcgtgcgctgtgcccgcggcagcgccgggtcctagtgtgtgggttgttgttggcaccgcacggcgcgtgcgcagtgaggacggcggagggatttgcggccgggacccaccccctgctccagtcgctatcggaggccgcgcgggtggctgagcagcggcctggtgcgctcgcttagcgggcgacggaatcagacggacgtggacgcccccggagtggaagccgaagcaggagttgttgttgctgaggggctgccgcagccgccgcgagcctccggacagacgccagagcgaggagggcgctacgcgacttggcaagatgacccagttcctgccgcccaaccttctggccctctttgccccccgtgaccctattccatacctgccacccctggagaaactgccacatgaaaaacaccacaatcaaccttattgtggcattgcgccgtacattcgagagtttgaggaccctcgagatgcccctcctccaactcgtgctgaaacccgagaggagcgcatggagaggaaaagacgggaaaagattgagcggcgacagcaagaagtggagacagagcttaaaatgtgggaccctcacaatgatcccaatgctcagggggatgccttcaagactctcttcgtggcgagagtgaattatgacacaacagaatccaagctccggagagagtttgaggtgtacggacctatcaaaagaatacacatggtctacagtaagcggtcaggaaagccccgtggctatgccttcatcgagtacgaacacgagcgagacatgcactccgcttacaaacacgcagatggcaagaagattgatggcaggagggtccttgtggacgtggagaggggccgaaccgtgaagggctggaggccccggcggctaggaggaggcctcggtggtaccagaagaggaggggctgatgtgaacatccggcattcaggccgcgatgacacctcccgctacgatgagaggcccggcccctccccgcttccgcacagggaccgggaccgggaccgtgagcgggagcgcagagagcggagccgggagcgagacaaggagcgagaacggcgacgctcccgctcccgggaccggcggaggcgctcacggagtcgcgacaaggaggagcggaggcgctccagggagcggagcaaggacaaggaccgggaccggaagcggcgaagcagccggagtcgggagcgggcccggcgggagcgggagcgcaaggaggagctgcgtggcggcggtggcgacatggcggagccctccgaggcgggtgacgcgccccctgatgatgggcctccaggggagctcgggcctgacggccctgacggtccagaggaaaagggccgggatcgtgaccgggagcgacggcggagccaccggagcgagcgcgagcggcgccgggaccgggatcgtgaccgtgaccgtgaccgcgagcacaaacggggggagcggggcagtgagcggggcagggatgaggcccgaggtgggggcggtggccaggacaacgggctggagggtctgggcaacgacagccgagacatgtacatggagtctgagggcggcgacggctacctggctccggagaatgggtatttgatggaggctgcgccggagtgaagaggtcgtcctctccatctgctgtgtttggacgcgttcctgcccagccccttgctgtcatcccctcccccaaccttggccacttgagtttgtcctccaagggtaggtgtctcatttgttctggccccttggatttaaaaataaaattaatttcctgttgatagtgggc

SEQ ID NO: 135059 - DNA, 1574 bp, Artificial Sequence
  derived and/or modified sequence
tttgcggccgggacccaccccctgctccagtcgctatcggaggccgcgcgggtggctgagcagcggcctggtgcgctcgcttagcgggcgacggaatcagacggacgtggacgcccccggagtggaagccgaagcaggagttgttgttgctgaggggctgccgcagccgccgcgagcctccggacagacgccagagcgaggagggcgctacgcgacttggcaagatgacccagttcctgccgcccaaccttctggccctctttgccccccgtgaccctattccatacctgccacccctggagaaactgccacatgaaaaacaccacaatcaaccttattgtggcattgcgccgtacattcgagagtttgaggaccctcgagatgcccctcctccaactcgtgctgaaacccgagaggagcgcatggagaggaaaagacgggaaaagattgagcggcgacagcaagaagtggagacagagcttaaaatgtgggaccctcacaatgatcccaatgctcagggggatgccttcaagactctcttcgtggcgagagtgaattatgacacaacagaatccaagctccggagagagtttgaggtgtacggacctatcaaaagaatacacatggtctacagtaagcggtcaggaaagccccgtggctatgccttcatcgagtacgaacacgagcgagacatgcactccgcttacaaacacgcagatggcaagaagattgatggcaggagggtccttgtggacgtggagaggggccgaaccgtgaagggctggaggccccggcggctaggaggaggcctcggtggtaccagaagaggaggggctgatgtgaacatccggcattcaggccgcgatgacacctcccgctacgatgagaggcccggcccctccccgcttccgcacagggaccgggaccgggaccgtgagcgggagcgcagagagcggagccgggagcgagacaaggagcgagaacggcgacgctcccgctcccgggaccggcggaggcgctcacggagtcgcgacaaggaggagcggaggcgctccagggagcggagcaaggacaaggaccgggaccggaagcggcgaagcagccggagtcgggagcgggcccggcgggagcgggagcgcaaggaggagctgcgtggcggcggtggcgacatggcggagccctccgaggcgggtgacgcgccccctgatgatgggcctccaggggagctcgggcctgacggccctgacggtccagaggaaaagggccgggatcgtgaccgggagcgacggcggagccaccggagcgagcgcgagcggcgccgggaccgggatcgtgaccgtgaccgtgaccgcgagcacaaacggggggagcggggcagtgagcggggcagggatgaggcccgaggtgggggcggtggccaggacaacgggctggagggtctgggcaacgacagccgagacatgtacatggagtctgagggcggcgacggctacctggctccggagaatgggtatttgatggaggctgcgccggagtgaagaggtcgtcctctccatctgctgtgtttggacgcg

SEQ ID NO: 135060 - DNA, 1314 bp, Artificial Sequence
  derived and/or modified sequence
atgactcagtttctgcctcctaaccttctcgccctgtttgccccaagggatccaatcccgtatctccctccacttgaaaagctgccacacgagaaacaccacaatcagccttattgtgggatcgccccttatatcagggaatttgaagaccccagagatgcaccaccgccaacgcgggctgagaccagggaggaacggatggagcggaaacgcagggaaaagatcgagaggaggcagcaagaggttgagactgaactgaaaatgtgggacccacacaatgatcccaacgcccagggcgatgcctttaagacactcttcgtcgctcgagtgaactacgataccaccgagtcaaaattacggcgtgagttcgaggtctatggccctattaaaaggatacatatggtctactcaaagcgctccggaaaacccagggggtatgcatttattgagtatgaacacgagagagacatgcactctgcgtacaaacacgctgatggcaagaaaattgacgggcgtcgtgtgctggttgatgtggagcgaggacgcactgtgaagggctggcggccaaggcgcctgggaggcggactcggcggtacgcgcagagggggtgccgatgtgaacatccggcactcgggcagagatgacacttctcggtatgatgaaaggcccggacctagcccactgccacatcgagatcgtgacagagatagggagcgtgaaaggcgtgagcgctccagagagagggataaagagcgagagcggaggcggtcccgaagcagggataggcggaggaggtctcgctccagagacaaggaagagaggagaagaagtcgcgagagatccaaagataaggatcgggataggaagcggagatcatcacggtcaagagagcgcgctcgaagggagagggaaagaaaagaagagcttaggggcggagggggtgatatggccgagccaagcgaagccggtgacgctcctccagatgatggcccacccggagagttagggccagacgggccagatggaccagaggagaaagggcgagatcgggaccgagagagaaggcgaagccatcggtcagagagagaacggagacgtgacagggatcgcgacagggaccgagatagagagcataagcgcggtgagcgagggtcagagaggggcagagatgaggctcgcggtggaggcggtggccaggacaatggtctggaaggcctgggcaacgattctcgagacatgtatatggagtccgaagggggtgacggttatctcgcaccagagaatggttaccttatggaggcggctccagaatag

SEQ ID NO: 135061 - DNA, 1314 bp, Artificial Sequence
  derived and/or modified sequence
atgacccagttcctgccccccaacctgctggccctgttcgcccccagagaccccatcccctacctgccccccctggagaagctgccccacgagaagcaccacaaccagccctactgcggcatcgccccctacatcagagagttcgaggaccccagagacgcccccccccccaccagagccgagaccagagaggagagaatggagagaaagagaagagagaagatcgagagaagacagcaggaggtggagaccgagctgaagatgtgggacccccacaacgaccccaacgcccagggcgacgccttcaagaccctgttcgtggccagagtgaactacgacaccaccgagagcaagctgagaagagagttcgaggtgtacggccccatcaagagaatccacatggtgtacagcaagagaagcggcaagcccagaggctacgccttcatcgagtacgagcacgagagagacatgcacagcgcctacaagcacgccgacggcaagaagatcgacggcagaagagtgctggtggacgtggagagaggcagaaccgtgaagggctggagacccagaagactgggcggcggcctgggcggcaccagaagaggcggcgccgacgtgaacatcagacacagcggcagagacgacaccagcagatacgacgagagacccggccccagccccctgccccacagagacagagacagagacagagagagagagagaagagagagaagcagagagagagacaaggagagagagagaagaagaagcagaagcagagacagaagaagaagaagcagaagcagagacaaggaggagagaagaagaagcagagagagaagcaaggacaaggacagagacagaaagagaagaagcagcagaagcagagagagagccagaagagagagagagagaaaggaggagctgagaggcggcggcggcgacatggccgagcccagcgaggccggcgacgccccccccgacgacggcccccccggcgagctgggccccgacggccccgacggccccgaggagaagggcagagacagagacagagagagaagaagaagccacagaagcgagagagagagaagaagagacagagacagagacagagacagagacagagagcacaagagaggcgagagaggcagcgagagaggcagagacgaggccagaggcggcggcggcggccaggacaacggcctggagggcctgggcaacgacagcagagacatgtacatggagagcgagggcggcgacggctacctggcccccgagaacggctacctgatggaggccgcccccgagtag

SEQ ID NO: 135062 - DNA, 1314 bp, Artificial Sequence
  derived and/or modified sequence
atgacacagttcttgcccccaaacctgttggctctttttgctccacgcgatcctattccatatctgccccccttagagaagttaccacacgagaaacatcacaatcagccgtattgtggcatagccccgtacatcagggagttcgaagatccccgagacgctccacctcccacacgggccgaaactcgagaagagagaatggagaggaagcggcgcgagaagatcgaaagaaggcaacaggaagtggaaacggagctcaaaatgtgggaccctcacaacgaccctaatgcccaaggcgatgcttttaagacactgtttgtggctagggtgaactatgacaccacagagagtaaactgcggcgagaattcgaagtgtacggacctatcaaaagaatccatatggtctattcaaagcgctcaggcaagcctcgaggctacgcgtttatcgagtacgagcatgaacgcgatatgcattctgcatataaacatgcagacggaaaaaagatagacgggcgcagggttttggtagatgtggaaagaggacggactgtgaaaggctggagaccccgccggctcggtgggggtttaggcggcaccaggcggggtggggccgacgtaaacataaggcactcaggtcgggacgatacatctaggtacgacgagagaccaggccccagtccactgccccatcgggacagagatcgcgaccgggagcgggaaagacgcgagagatctcgtgagagggataaggaacgagaacgaaggcggagtagatccagggatcgacggcggaggtcgcgctctcgtgacaaggaggaaaggagaagatcacgcgaaaggtccaaggacaaggaccgtgatagaaagcgacggagcagtagaagccgtgaaagggccaggagagagagggaacgaaaggaggaacttcgcggaggcggaggcgatatggccgaacctagcgaagctggggatgctccacccgatgatggtcctcctggagagcttgggcccgatggacctgatggcccagaggaaaagggacgcgatagggaccgcgaacggcgaagatcacacagaagtgagagggagcgcaggcgggacagagaccgggatcgcgatagggaccgcgagcacaagcggggagagagaggatcagaacggggacgcgacgaggctcgtggcggcggcggcggccaagataatggactggagggtcttggaaatgattctagagacatgtatatggagagcgaaggcggggatggatacctggccccagagaacggctaccttatggaggctgctcccgagtag

SEQ ID NO: 135063 - DNA, 1314 bp, Artificial Sequence
  derived and/or modified sequence
atgacccagttcctgccccccaacctgctggccctgttcgccccccgggatccaattccttatctccctcctctcgagaagctacctcatgagaagcatcacaatcagccgtactgcggcattgctccctatattagagagttcgaggatccccgggacgcccccccaccgactcgggccgagacgcgtgaggagaggatggaaaggaagaggcgcgagaaaattgagcgccgccagcaggaagtcgagaccgaactcaagatgtgggacccacacaacgacccaaacgcccagggagacgctttcaagactcttttcgtagctcgtgtgaattacgatacaaccgagagtaagctccgcagggaatttgaagtgtacgggccgattaagcgtatccatatggtgtattcgaagaggtcaggcaaacctaggggttatgcgttcatcgaatatgagcatgaacgggatatgcactcagcatacaaacatgccgacggaaaaaagatcgacggtcgaagggtgttggtggatgtggaacgagggcggacagtgaagggctggcggccaaggagactaggcggtggccttggcgggacgcgaagggggggggccgatgtgaatatcagacactccgggagggatgacacttccaggtacgatgaaagaccagggccgtcacccctgccacatagggatagagacagggacagagagagagagagaagggagagatcaagagagcgggataaggagcgcgagagaaggcggtcccgcagcagagaccggcggcgaagatcaagatctagggacaaggaagaacggcggcgaagccgggaacgatcgaaagacaaagaccgggatcgcaagcgaagatcatctaggtcacgcgaacgggccagacgcgagagggagaggaaagaagagctgagagggggcggaggtgacatggctgaaccaagcgaggccggggacgccccccccgacgatgggcctcctggagaactggggcccgatgggcccgacggtcctgaagaaaagggcagggaccgggatcgcgagcggcggcgatctcatcgctctgagagagaacgcagaagggatcgagatagagaccgggacagagatcgggagcataaacgtggtgagaggggttctgagagaggaagggacgaagccaggggaggcggcggcgggcaggataacggcctcgagggcctcggtaacgactccagagatatgtatatggaatctgaaggcggagacggatatttggctcctgagaatggatatttgatggaggctgctcccgagtag

SEQ ID NO: 135064 - DNA, 1314 bp, Artificial Sequence
  derived and/or modified sequence
atgacccaattcctgcctcccaatctgctagccctgttcgccccacgggaccctatcccgtacctgccaccactggaaaagctgccacacgagaagcaccataaccaaccttattgcggaatagcaccctacattcgagagttcgaggatcccagagacgctcccccacccacaagggccgagacccgggaggagagaatggagcgtaaacggagagagaagatcgagcgcagacagcaagaagtcgaaactgaattgaaaatgtgggaccctcataacgaccccaacgcccagggcgacgctttcaaaacactatttgtggccagagtgaactacgacaccacagagtctaaactgcggagagagtttgaggtgtacgggcctatcaaaagaatacatatggtatactccaagcggtcaggtaagccaaggggttacgctttcatcgaatatgaacacgaacgtgacatgcatagcgcttacaagcatgctgatggcaagaaaattgatggtcgccgtgtgctggtagacgttgaacggggaaggacggtaaagggatggagacccagacgccttggaggaggcttggggggtacccggcgaggaggggcagacgtgaacattaggcactcaggcagggacgatacaagccgctatgacgagcgacccggacctagcccactaccccacagagatcgagatcgggaccgggagcgagagagaagggagaggtcacgagagagggataaggagcgggaacgcaggagaagcaggtcaagagatcggaggcggcgtagcagatcccgtgacaaagaggaaaggcgacgctctagggaacgttcaaaggacaaggatcgggaccggaagcgacgaagctcacggtcacgcgaacgggctaggcgcgaaagggagagaaaagaggagttgaggggcggtggaggggacatggctgaaccttctgaggctggcgacgctccacccgacgacggtcccccaggggaactcggcccagacggacctgacgggcctgaagagaaggggagggatcgagatcgagaacgcagacgatcccaccggagtgagcgagaacgtcggcgagatagggacagagatcgggatcgggatagagagcacaagcgcggagaacgcggtagcgagaggggcagagacgaggcccgtggcggaggaggcggtcaagacaacggactggaaggtttaggaaacgactcgcgagatatgtacatggaatctgaagggggtgatggctacttggcacccgaaaacgggtacctgatggaggccgctccagagtag

SEQ ID NO: 135065 - protein, 155 aa, Artificial Sequence
  derived and/or modified sequence
MTVEGPPPKDTGIARVPLAGAAGGPGIGRAAGRGIPAGVPMPQAPAGLAGPVRGVGGPSQQVMTPQGRGTVAAAAAAATASIAGAPTQYPPGRGGPPPPMGRGAPPPGMMGPPPGMRPPMGPPMGIPPGRGTPMGMPPPGMRPPPPGMRGKCLQW

SEQ ID NO: 135066 - protein, 231 aa, Artificial Sequence
  derived and/or modified sequence
MTVGKSSKMLQHIDYRMRCILQDGRIFIGTFKAFDKHMNLILCDCDEFRKIKPKNSKQAEREEKRVLGLVLLRGENLVSMTVEGPPPKDTGIARVPLAGAAGGPGIGRAAGRGIPAGVPMPQAPAGLAGPVRGVGGPSQQVMTPQGRGTVAAAAAAATASIAGAPTQYPPGRGGPPPPMGRGAPPPGMMGPPPGMRPPMGPPMGIPPGRGTPMGMPPPGMRPPPPGMRGLL

SEQ ID NO: 135067 - DNA, 468 bp, Artificial Sequence
  derived and/or modified sequence
atgaccgtggagggccccccccccaaggacaccggcatcgccagagtgcccctggccggcgccgccggcggccccggcatcggcagagccgccggcagaggcatccccgccggcgtgcccatgccccaggcccccgccggcctggccggccccgtgagaggcgtgggcggccccagccagcaggtgatgaccccccagggcagaggcaccgtggccgccgccgccgccgccgccaccgccagcatcgccggcgcccccacccagtacccccccggcagaggcggcccccccccccccatgggcagaggcgcccccccccccggcatgatgggccccccccccggcatgagaccccccatgggcccccccatgggcatcccccccggcagaggcacccccatgggcatgcccccccccggcatgagaccccccccccccggcatgagaggcaagtgcctgcagtggtag

SEQ ID NO: 135068 - DNA, 696 bp, Artificial Sequence
  derived and/or modified sequence
atgaccgtgggcaagagcagcaagatgctgcagcacatcgactacagaatgagatgcatcctgcaggacggcagaatcttcatcggcaccttcaaggccttcgacaagcacatgaacctgatcctgtgcgactgcgacgagttcagaaagatcaagcccaagaacagcaagcaggccgagagagaggagaagagagtgctgggcctggtgctgctgagaggcgagaacctggtgagcatgaccgtggagggccccccccccaaggacaccggcatcgccagagtgcccctggccggcgccgccggcggccccggcatcggcagagccgccggcagaggcatccccgccggcgtgcccatgccccaggcccccgccggcctggccggccccgtgagaggcgtgggcggccccagccagcaggtgatgaccccccagggcagaggcaccgtggccgccgccgccgccgccgccaccgccagcatcgccggcgcccccacccagtacccccccggcagaggcggcccccccccccccatgggcagaggcgcccccccccccggcatgatgggccccccccccggcatgagaccccccatgggcccccccatgggcatcccccccggcagaggcacccccatgggcatgcccccccccggcatgagaccccccccccccggcatgagaggcctgctgtag

SEQ ID NO: 135069 - DNA, 1450 bp, Artificial Sequence
  derived and/or modified sequence
ttccggtagcggcggcgggaaatcggctgtgggagagaggctaggcctctgaggaggcgaatccggcgggtatcagagccatcagaaccgccaccatgacggtgggcaagagcagcaagatgctgcagcatattgattacaggatgaggtgcatcctgcaggacggccggatcttcattggcaccttcaaggcttttgacaagcacatgaatttgatcctctgtgactgtgatgagttcagaaagatcaagtgtgtgaggggggagagcttgagtttctggcctcattgcctatttgtaaagctgtagcctaaagggctctcccaatgcagcctggtctgaaactgctttaagaagcctctgaccctcttcagggccaaagaactccaaacaagcagaaagggaagagaagcgagtcctcggtctggtgctgctgcgaggggagaatctggtctcaatgacagtagagggacctcctcccaaagatactggtattgctcgagttccacttgctggagctgccgggggcccagggatcggcagggctgctggcagaggaatcccagctggggttcccatgccccaggctcctgcaggacttgctgggccagtccgtggggttggcgggccatcccaacaggtgatgaccccacaaggaagaggtactgttgcagccgctgcagctgctgccacagccagtattgccggggctccaacccagtacccacctggccgtgggggtcctcccccacctatgggccgaggagcaccccctccaggcatgatgggcccacctcctggtatgagacctcctatgggtcccccaatggggatcccccctggaagagggactccaatgggcatgccccctccgggaatgcggcctcctccccctgggatgcgaggtaagtgcctgcagtggtgactttggcttctttccctagagcctagtgggataggaaatggagggaagattgcatttagatcatatcccatgggctttcaagccttaaatctagggaaatccagaaaggaaagagaagagggaacatttcttaaattgggcttacctcccctcttagaaaagttagagcagccatgcacccagggtgtttctcaatatctaaggcagcggcctcaggacacaatgaaataatgcattctgaggatccctaacagaagttatgagattgtcttatgctctttggtttgacagtgcctagtaattaagagggggctctgggctttgctgtactattatggatttctctttaacttcagttggagaaattctgagatcagtccccacatggatgagaaaataggcccccagggagtttggactccaagcccagtgttctttccctataagataacccatgggcaaacttggtgacccctgtttctctagtctggattattcctctatgggtttttatagacataggaac

SEQ ID NO: 135070 - DNA, 723 bp, Artificial Sequence
  derived and/or modified sequence
atgaccgtgggcaagagcagcaagatgctgcagcacatcgactacagaatgagatgcatcctgcaggacggcagaatcttcatcggcaccttcaaggccttcgacaagcacatgaacctgatcctgtgcgactgcgacgagttcagaaagatcaagcccaagaacagcaagcaggccgagagagaggagaagagagtgctgggcctggtgctgctgagaggcgagaacctggtgagcatgaccgtggagggccccccccccaaggacaccggcatcgccagagtgcccctggccggcgccgccggcggccccggcatcggcagagccgccggcagaggcatccccgccggcgtgcccatgccccaggcccccgccggcctggccggccccgtgagaggcgtgggcggccccagccagcaggtgatgaccccccagggcagaggcaccgtggccgccgccgccgccgccgccaccgccagcatcgccggcgcccccacccagtacccccccggcagaggcggcccccccccccccatgggcagaggcgcccccccccccggcatgatgggccccccccccggcatgagaccccccatgggcccccccatgggcatcccccccggcagaggcacccccatgggcatgcccccccccggcatgagaccccccccccccggcatgagaggcccccccccccccggcatgagaccccccagaccctag

SEQ ID NO: 135071 - DNA, 867 bp, Artificial Sequence
  derived and/or modified sequence
atgactgtagggaagtcatcaaaaatgctgcagcacatcgactatcgaatgcgctgcatactgcaagacggccgcatttttataggtaccttcaaggcctttgacaaacacatgaacctaattctgtgcgattgtgatgagtttaggaaaataaaacctaaaaactcaaaacaggcggaacgagaagagaagagagtgcttggcctggtcttgctacggggcgagaatttagtctccatgacggttgaaggtccaccccctaaggacaccggtattgcccgcgttcctctcgctggcgcggccggtggcccaggtattggccgggcggccgggcgcgggataccagcgggtgtcccaatgccacaggctcctgctgggctggcgggcccagtgagaggcgttggaggaccgagccagcaggttatgaccccacagggtcggggcacagtggccgccgctgccgcggccgccacagcaagtattgccggcgcccctacccaatacccccctggtcggggaggccctcctcctccaatgggtaggggtgccccacccccaggaatgatgggccctccccccgggatgcgtccccccatggggccaccgatgggaatcccccctggaaggggaacccctatggggatgccacctccagggatgcgcccacctcctccaggctgcgaggcattcttcgacccatggccacagtcgatggaggttgccccccagaggcggggcctggatagttctgggccgcgatatcaccgcccagtctgttttctatgctgttgttcttggagtctcatgggactgagtgggttcctgaccgggccacccccccctggcatgcggccaccgagaccctag

SEQ ID NO: 135072 - DNA, 468 bp, Artificial Sequence
  derived and/or modified sequence
atgaccgtcgaagggccgccccctaaagacacagggattgcccgcgtccctcttgctggagctgctggcggcccaggcattggcagggcagccggcaggggcattccagccggcgtgcccatgccacaagcccccgcaggactcgcaggacccgttcggggcgtggggggcccctcccaacaagtgatgacaccccagggtagaggcaccgttgcagctgcagcggccgcggccactgcatcaattgcaggcgctcccactcaatatccaccagggagagggggtcctccgccacctatgggccgcggagcacccccacctggcatgatggggcctcctcctggaatgaggcccccaatgggacccccgatgggtattccgccaggaagggggacccccatgggcatgccgccacccgggatgagaccaccaccgcccgggatgcgtggaaaatgcctgcaatggtag

SEQ ID NO: 135073 - DNA, 696 bp, Artificial Sequence
  derived and/or modified sequence
atgacagtgggtaagtcgtctaagatgctgcagcacatcgactaccgcatgagatgtatcttacaagatgggagaatattcatcgggactttcaaggcattcgacaagcacatgaacctgattttgtgcgactgcgatgaatttcggaagattaaaccgaagaattccaaacaggctgaacgtgaggaaaaacgcgtgctcggccttgtgctgctgagaggagaaaatctggtttcaatgacagtggaggggccgccccctaaggatactggcatcgcccgtgtcccactggcgggcgccgctggaggacctgggatcgggagggcagctggccgtggcatcccagccggtgtgcccatgccacaggcccccgccggcctggccggccctgtcaggggagtcggaggcccttcccagcaagtgatgactcctcaggggcgcggaaccgtggcagccgcggctgccgctgctaccgcaagcatagcgggggccccaactcagtacccccctgggaggggggggcctcctccccccatgggaaggggggccccacctcctggcatgatggggccccctcccggaatgaggccccccatgggcccaccaatgggaatcccacctggcagagggacccccatggggatgccacctccaggaatgaggcctcctccgccaggaatgcgggggttactatag

SEQ ID NO: 135074 - DNA, 723 bp, Artificial Sequence
  derived and/or modified sequence
atgacggtggggaagagtagtaaaatgttgcagcacattgactacagaatgaggtgcatattacaagatggcagaatattcataggcaccttcaaagctttcgataaacacatgaatctgattttgtgcgactgcgacgaatttcgaaaaatcaagccgaagaacagtaaacaagccgagagagaggagaagagagtcctcgggttggtgctcctgcgtggcgaaaacctggtgagcatgaccgtggaggggcctccgcctaaggatacaggaattgctcgcgtgcccctggcaggcgcagccggcggtcccggtatcggccgcgcagctgggcgcggaatccctgctggagtgccaatgccacaggcccctgccggactggccggccctgttcggggcgtgggtgggccaagccagcaagtaatgacccctcaggggaggggcaccgtggccgcagcagctgccgctgccaccgcttcaattgcaggggcgccgacccagtacccacccgggcgcggtggccctcccccccctatgggccgcggcgccccacccccagggatgatgggccccccaccaggcatgagacctcccatgggccccccaatgggcataccgcccgggaggggcacacccatgggcatgccccctcccggaatgagaccaccacctccagggatgagagggccccctcctcctggaatgcgccctccccgcccatag

SEQ ID NO: 135075 - DNA, 867 bp, Artificial Sequence
  derived and/or modified sequence
atgacagtgggcaagagcagcaagatgctgcagcacatcgactacaggatgcgctgcatcctgcaggacggccgcatcttcatcggcaccttcaaggcctttgacaagcacatgaacctgatcctgtgtgactgtgatgagttcaggaagatcaagcccaagaacagcaagcaggccgagcgggaggagaagagggtgctgggcctggtgctgctgcggggggagaacctggtgtccatgacagtggagggccccccacccaaggacaccggcatcgcccgggtgcccctggccggggctgctgggggccctggcatcggccgggccgccggccggggcatcccagctggggtgcccatgccccaggccccagctggcctggccggccctgtgcggggcgtgggcggccccagccagcaggtgatgaccccccagggccggggcaccgtggccgctgctgctgctgctgccacagccagcattgctggggcccccacccagtacccacctggccggggcggccccccaccacccatgggccgcggggcccctcctcctggcatgatgggccccccacctggcatgaggcctcccatgggcccccccatgggcatccccccaggccggggcacccccatgggcatgcctcctcctggcatgaggcctcctcctcctggctgtgaggccttctttgacccctggccccagagcatggaggtggccccccagaggcggggcctggacagcagcggcccccgctaccacaggcctgtgtgcttcctgtgctgctgctcctggagcctgatgggcctgagcggcttcctgaccggccccccacctcctggcatgaggcctccccggccctag

SEQ ID NO: 135076 - DNA, 468 bp, Artificial Sequence
  derived and/or modified sequence
atgacagtggagggccccccacccaaggacacaggaattgcccgggtgcccctggccggggccgccggcggccctggcatcggccgggctgctggccggggcatcccagctggggtgcccatgccccaggccccagctggcctggccggccctgtgcggggcgtgggcggccccagccagcaggtgatgaccccccagggccggggcaccgtggccgctgctgctgctgctgccacagccagcattgctggggcccccacccagtacccacctggccggggcggccccccaccacccatgggccgcggggcccctcctcctggcatgatgggccccccacctggcatgaggcctcccatgggcccccccatgggcatccccccaggccggggcacccccatgggcatgcctcctcctggcatgaggcctcctcctcctggcatgaggggcaagtgcctgcagtggtag

SEQ ID NO: 135077 - DNA, 696 bp, Artificial Sequence
  derived and/or modified sequence
atgacagtgggcaagagcagcaagatgctgcagcacatcgactacaggatgcgctgcatcctgcaggacggccgcatcttcatcggcaccttcaaggcctttgacaagcacatgaacctgatcctgtgtgactgtgatgagttcaggaagatcaagcccaagaacagcaagcaggccgagcgggaggagaagagggtgctgggcctggtgctgctgcggggggagaacctggtgtccatgacagtggagggccccccacccaaggacaccggcatcgcccgggtgcccctggccggggctgctgggggccctggcatcggccgggccgccggccggggcatcccagctggggtgcccatgccccaggccccagctggcctggccggccctgtgcggggcgtgggcggccccagccagcaggtgatgaccccccagggccggggcaccgtggccgctgctgctgctgctgccacagccagcattgctggggcccccacccagtacccacctggccggggcggccccccaccacccatgggccgcggggcccctcctcctggcatgatgggccccccacctggcatgaggcctcccatgggcccccccatgggcatccccccaggccggggcacccccatgggcatgcctcctcctggcatgaggcctcctcctcctggcatgaggggcctgctgtag

SEQ ID NO: 135078 - DNA, 723 bp, Artificial Sequence
  derived and/or modified sequence
atgacagtgggcaagagcagcaagatgctgcagcacatcgactacaggatgcgctgcatcctgcaggacggccgcatcttcatcggcaccttcaaggcctttgacaagcacatgaacctgatcctgtgtgactgtgatgagttcaggaagatcaagcccaagaacagcaagcaggccgagcgggaggagaagagggtgctgggcctggtgctgctgcggggggagaacctggtgtccatgacagtggagggccccccacccaaggacaccggcatcgcccgggtgcccctggccggggctgctgggggccctggcatcggccgggccgccggccggggcatcccagctggggtgcccatgccccaggccccagctggcctggccggccctgtgcggggcgtgggcggccccagccagcaggtgatgaccccccagggccggggcaccgtggccgctgctgctgctgctgccacagccagcattgctggggcccccacccagtacccacctggccggggcggccccccaccacccatgggccgcggggcccctcctcctggcatgatgggccccccacctggcatgaggcctcccatgggcccccccatgggcatccccccaggccggggcacccccatgggcatgcctcctcctggcatgaggcctcctcctcctggcatgaggggccccccacctcctggcatgaggcctccccggccctag

SEQ ID NO: 135079 - DNA, 1154 bp, Artificial Sequence
  derived and/or modified sequence
aactccagggctagtgagctggaccggaagtaggtttctacccgaccgcattttacgtggtgctgcatttccggtagcggcggcgggaaatcggctgtgggagagaggctaggcctctgaggaggcgaatccggcgggtatcagagccatcagaaccgccaccatgacggtgggcaagagcagcaagatgctgcagcatattgattacaggatgaggtgcatcctgcaggacggccggatcttcattggcaccttcaaggcttttgacaagcacatgaatttgatcctctgtgactgtgatgagttcagaaagatcaagccaaagaactccaaacaagcagaaagggaagagaagcgagtcctcggtctggtgctgctgcgaggggagaatctggtctcaatgacagtagagggacctcctcccaaagatactggtattgctcgagttccacttgctggagctgccgggggcccagggatcggcagggctgctggcagaggaatcccagctggggttcccatgccccaggctcctgcaggacttgctgggccagtccgtggggttggcgggccatcccaacaggtgatgaccccacaaggaagaggtactgttgcagccgctgcagctgctgccacagccagtattgccggggctccaacccagtacccacctggccgtgggggtcctcccccacctatgggccgaggagcaccccctccaggcatgatgggcccacctcctggtatgagacctcctatgggtcccccaatggggatcccccctggaagagggactccaatgggcatgccccctccgggaatgcggcctcctccccctgggatgcgaggccttctttgacccttggccacagagtatggaagtagctccgcagaggcgtgggctcgattcctcagggccacgttaccacagacctgtttgtttcttatgctgttgttcgtggagtctcatgggattgtctggtttcccttacagggccccctcccccgggaatgcgcccaccaaggccctagactcatcttggccctcctcagctccctgcctgtttcccgtaaggctgtacatagtccttttatctccttgtggcctatgaaactggtttataataaactcttaagagaacattataattgca

SEQ ID NO: 135080 - DNA, 867 bp, Artificial Sequence
  derived and/or modified sequence
atgaccgtgggcaagagcagcaagatgctgcagcacatcgactaccgcatgagatgcattctccaggacggtcgtattttcatcgggacgttcaaagcattcgacaaacatatgaatctcattctgtgcgattgtgatgaatttagaaaaatcaagcctaagaacagcaaacaggccgaacgggaagagaaacgagtgctgggtcttgtgttgctcaggggtgaaaacctggtctctatgacagtggaagggcccccacctaaagacaccggtatcgcaagggtgcccctggcgggcgccgccggaggacccgggatcgggcgggccgccgggaggggaattcctgcaggggtccctatgccccaggccccagcagggctggcaggccctgtccgcggggtaggcgggccttcacaacaggtgatgaccccacaggggaggggaacagtcgccgccgcggctgccgctgcaacagcctcgatcgctggcgcccctacgcagtatcctccaggtcgggggggcccccccccccctatggggcgcggcgctcctccccctgggatgatgggacccccacccggaatgcgacccccaatgggcccccccatggggatcccccccgggcgcggcacccctatggggatgccccccccaggcatgcgcccaccacctcctggatgcgaagccttcttcgatccatggccacagtctatggaggtcgcaccacagcgacgcgggttggattcttcagggcctaggtaccaccgcccagtctgctttctctgctgctgctcttggtcacttatgggactgagtggatttctcacaggcccccctccacccggaatgaggccgccaagaccttag

SEQ ID NO: 135081 - DNA, 468 bp, Artificial Sequence
  derived and/or modified sequence
atgaccgtggagggccccccccccaaggacaccggcatcgcccgggtccctctcgcaggggccgcaggcggccccgggattggtcgagctgcgggcaggggcatacccgctggagtccccatgcctcaagctcctgctggactggcgggacccgtgagaggggtgggggggccctcacagcaggtcatgaccccacaggggagaggcaccgtcgctgcggccgctgccgctgcaacggcttctatcgcaggcgccccaactcagtatccgcccggtcgaggggggcctcctcctcccatgggtcgcggcgcgcctccgcctggcatgatgggcccgcctcctggcatgaggccaccaatgggccctcccatgggcattcctcccggaagggggactccgatggggatgccgcccccaggaatgaggcctcccccacccgggatgagaggaaaatgcctccagtggtag

SEQ ID NO: 135082 - DNA, 696 bp, Artificial Sequence
  derived and/or modified sequence
atgaccgtgggcaagagcagcaagatgctgcagcacatcgactaccgcatgaggtgcatcttgcaggatggtagaattttcatcgggaccttcaaggcatttgacaagcatatgaatttgatcctgtgcgactgcgatgagttccgcaaaatcaaaccgaagaactcaaaacaggccgagcgagaggagaaaagggtcttggggctggtgttattaaggggagaaaatctcgtttcgatgaccgttgaggggccacctcccaaggacacaggcatagcgcgcgtccccctggctggagcagccggaggccctggcattgggcgggctgctggaagggggattccagcaggggtgcccatgcctcaggcaccagctggattagccggccctgtgcgcggggttggtggcccctctcagcaagtgatgacccctcagggcagaggcactgtggccgccgccgccgcagccgcaaccgccagtattgctggcgcccccacacagtacccaccaggtcggggcggcccaccaccaccaatgggtagaggagcacccccacccgggatgatggggccccctcccgggatgcgacctccaatgggcccccccatgggaattcccccaggacggggaaccccaatggggatgccgccacctgggatgcgccctcccccacccggaatgaggggtttgctgtag

SEQ ID NO: 135083 - DNA, 723 bp, Artificial Sequence
  derived and/or modified sequence
atgaccgtgggcaagagcagcaagatgctgcagcacatcgactaccgcatgcgatgtatcttgcaggatggccgcattttcattggtacatttaaggccttcgacaagcacatgaatcttatcttgtgcgattgcgacgaattccgcaagatcaagcccaagaacagtaagcaagccgaacgggaggaaaaacgcgtactcggtctggtactgctgagaggcgagaacctggtgagcatgaccgttgagggtcccccccccaaagatacaggcatagctcgtgttccattagctggcgccgccggcggcccaggaattggacgggcagcagggaggggtattcccgctggcgtgcccatgcctcaggcacctgccggactggccggccctgtaagaggcgttgggggacccagtcagcaggtgatgactccacaaggcaggggcaccgttgccgccgctgctgccgctgccaccgcttccattgcaggcgcccctacgcagtatcctccgggtcggggcggaccaccccccccaatgggtagaggggctccacccccaggaatgatgggccccccacctggcatgcgcccccctatgggcccccccatggggattccaccaggacgaggcacgccaatggggatgcctcctcctgggatgaggccacctccacctggcatgcggggccccccaccacccggtatgagaccccctcggccatag

SEQ ID NO: 135084 - DNA, 867 bp, Artificial Sequence
  derived and/or modified sequence
atgactgtggggaaatcttccaaaatgctccaacatattgactatagaatgcgatgcatcctgcaggacgggaggatttttataggaacatttaaggctttcgataagcatatgaatctcatcttgtgcgattgcgacgaattcagaaaaatcaaacctaaaaatagcaagcaggctgaaagagaagagaagcgcgtcctgggattagtcctgcttcgcggtgaaaacttggtgtccatgaccgtggaaggcccaccccctaaagataccggtatagccagggtgcccttggcaggtgctgcaggtgggcctggcatagggagagcggcaggacgcggaatcccagcaggcgtgccaatgccacaggcccctgccggactcgccggtcccgtccgcggtgtcggcggaccctcccaacaagtcatgacaccccaaggcagagggacagttgcagctgccgcagctgccgctacggctagcatcgctggtgcccctacgcagtatccccctggccgaggaggacccccacctcctatggggaggggcgcacctcctcccggtatgatgggtccaccccctggaatgcgccctcccatgggccctcccatgggcatccccccaggccgaggtactcccatgggcatgccacccccagggatgagacccccacctccgggatgcgaagctttctttgacccttggccccaatccatggaagttgctcctcaacgacggggattggatagctctgggcctcggtaccacaggcccgtttgtttcctatgctgttgtagttggtccctcatggggctgtcgggtttcctaactggaccaccaccccctggaatgagaccgccacggccatag

SEQ ID NO: 135085 - DNA, 468 bp, Artificial Sequence
  derived and/or modified sequence
atgaccgtcgaggggcctccccctaaagacaccggcattgcccgtgttcccttggcgggtgcggcaggaggccctgggatcgggagagcagcgggacgtgggattcctgcaggcgtgcctatgccccaggcccctgctggccttgcagggccagtccgcggagttggaggcccaagccagcaggttatgaccccccagggacggggaacagtggccgctgcagccgcagccgcaacagctagtattgctggcgctcccacccagtaccctcctggtagaggaggccctccccctccaatgggtcgaggtgctccacccccaggaatgatgggcccaccacccggaatgagaccacccatgggaccgccaatggggattccaccagggcgaggtacaccgatgggaatgccaccacccggaatgcggccaccccctccaggaatgcgaggcaaatgtctgcaatggtag

SEQ ID NO: 135086 - DNA, 696 bp, Artificial Sequence
  derived and/or modified sequence
atgaccgtggggaagagcagcaagatgctgcagcatattgattatcgcatgcgatgtattctccaggacggcagaatcttcataggaacgttcaaggcgttcgataagcatatgaacctgattctgtgtgactgcgacgaattcagaaagattaagcccaaaaattctaagcaggctgaaagagaagaaaaacgagtgctcggcctggtcctcctgcggggagagaatcttgtttcgatgacagtggagggccctcctcctaaagataccgggatagccagagtacctctggccggagctgctggcggtcctgggatcgggagagctgccggtcgcggtataccggcaggagtgccaatgccgcaggcccctgccggacttgccggtcctgtgcgcggagtggggggtccctcccaacaggtcatgacgccccagggacggggaactgtcgccgctgccgcagcagccgctacggcatctatcgcaggtgcgccaacccaatatccaccaggacgtggcggaccaccacctcccatggggcgaggagctccacctcccggtatgatgggcccacccccagggatgcggccaccaatgggacccccaatgggaatccctcctggcagaggcacacctatgggaatgcctcctccgggaatgaggccccctccgcctggcatgaggggacttctgtag

SEQ ID NO: 135087 - DNA, 723 bp, Artificial Sequence
  derived and/or modified sequence
atgaccgtgggaaagtcatccaaaatgcttcaacacatcgattaccgaatgcggtgcatcttacaggacggcaggatcttcattgggacttttaaagccttcgacaagcatatgaaccttatcctatgtgattgcgacgagttcagaaaaatcaagcccaaaaactcaaagcaggctgagcgggaagagaagcgggtgctagggctggttctgctccgaggtgagaatttggtttccatgacggtagagggccctccccctaaggatacaggtatagcacgcgtcccgcttgccggagccgcaggaggccctggcattggtcgtgccgcaggtagaggtatccctgcgggagtcccaatgccgcaggctcccgctggcctcgctgggccagttaggggcgtgggagggccttctcaacaggtcatgacgcctcagggtcgaggcaccgtggccgctgcggctgcagcggctactgcatcaatagccggtgccccaactcagtatccccctggcaggggtggtcctcccccacccatggggagaggggcacccccacctggcatgatgggacctcccccaggtatgagaccaccaatggggcctccaatgggcataccacccggacggggaacccctatgggaatgccgcctccagggatgcgtcccccacccccaggcatgaggggtcctcctcctccaggtatgcgtccaccaaggccatag

SEQ ID NO: 135088 - DNA, 1008 bp, Artificial Sequence
  derived and/or modified sequence
aactccagggctagtgagctggaccggaagtaggtttctacccgaccgcattttacgtggtgctgcatttccggtagcggcggcgggaaatcggctgtgggagagaggctaggcctctgaggaggcgaatccggcgggtatcagagccatcagaaccgccaccatgacggtgggcaagagcagcaagatgctgcagcatattgattacaggatgaggtgcatcctgcaggacggccggatcttcattggcaccttcaaggcttttgacaagcacatgaatttgatcctctgtgactgtgatgagttcagaaagatcaagccaaagaactccaaacaagcagaaagggaagagaagcgagtcctcggtctggtgctgctgcgaggggagaatctggtctcaatgacagtagagggacctcctcccaaagatactggtattgctcgagttccacttgctggagctgccgggggcccagggatcggcagggctgctggcagaggaatcccagctggggttcccatgccccaggctcctgcaggacttgctgggccagtccgtggggttggcgggccatcccaacaggtgatgaccccacaaggaagaggtactgttgcagccgctgcagctgctgccacagccagtattgccggggctccaacccagtacccacctggccgtgggggtcctcccccacctatgggccgaggagcaccccctccaggcatgatgggcccacctcctggtatgagacctcctatgggtcccccaatggggatcccccctggaagagggactccaatgggcatgccccctccgggaatgcggcctcctccccctgggatgcgagggccccctcccccgggaatgcgcccaccaaggccctagactcatcttggccctcctcagctccctgcctgtttcccgtaaggctgtacatagtccttttatctccttgtggcctatgaaactggtttataataaactcttaagagaacattataattgca

SEQ ID NO: 135089 - DNA, 1109 bp, Artificial Sequence
  derived and/or modified sequence
tttctacccgaccgcattttacgtggtgctgcatttccggtagcggcggcgggaaatcggctgtgggagagaggctaggcctctgaggaggcgaatccggcgggtatcagagccatcagaaccgccaccatgacggtgggcaagagcagcaagatgctgcagcatattgattacaggatgaggtgcatcctgcaggacggccggatcttcattggcaccttcaaggcttttgacaagcacatgaatttgatcctctgtgactgtgatgagttcagaaagatcaagccaaagaactccaaacaagcagaaagggaagagaagcgagtcctcggtctggtgctgctgcgaggggagaatctggtctcaatgacagtagagggacctcctcccaaagatactggtattgctcgagttccacttgctggagctgccgggggcccagggatcggcagggctgctggcagaggaatcccagctggggttcccatgccccaggctcctgcaggacttgctgggccagtccgtggggttggcgggccatcccaacaggtgatgaccccacaaggaagaggtactgttgcagccgctgcagctgctgccacagccagtattgccggggctccaacccagtacccacctggccgtgggggtcctcccccacctatgggccgaggagcaccccctccaggcatgatgggcccacctcctggtatgagacctcctatgggtcccccaatggggatcccccctggaagagggactccaatgggcatgccccctccgggaatgcggcctcctccccctggatgcgaggccttctttgacccttggccacagagtatggaagtagctccgcagaggcgtgggctcgattcctcagggccacgttaccacagacctgtttgtttcttatgctgttgttcgtggagtctcatgggattgtctggtttccttacagggccccctcccccgggaatgcgcccaccaaggccctagactcatcttggccctcctcagctccctgcctgtttcccgtaaggctgtacatagtccttttatctccttgtggcctatgaaactggtttataataaactcttaagagaacatt

SEQ ID NO: 135090 - DNA, 867 bp, Artificial Sequence
  derived and/or modified sequence
atgaccgtgggcaagagcagcaagatgctgcagcacatcgactacagaatgagatgcatcctgcaggacggcagaatcttcatcggcaccttcaaggccttcgacaagcacatgaacctgatcctgtgcgactgcgacgagttcagaaagatcaagcccaagaacagcaagcaggccgagagagaggagaagagagtgctgggcctggtgctgctgagaggcgagaacctggtgagcatgaccgtggagggccccccccccaaggacaccggcatcgccagagtgcccctggccggcgccgccggcggccccggcatcggcagagccgccggcagaggcatccccgccggcgtgcccatgccccaggcccccgccggcctggccggccccgtgagaggcgtgggcggccccagccagcaggtgatgaccccccagggcagaggcaccgtggccgccgccgccgccgccgccaccgccagcatcgccggcgcccccacccagtacccccccggcagaggcggcccccccccccccatgggcagaggcgcccccccccccggcatgatgggccccccccccggcatgagaccccccatgggcccccccatgggcatcccccccggcagaggcacccccatgggcatgcccccccccggcatgagaccccccccccccggctgcgaggccttcttcgacccctggccccagagcatggaggtggccccccagagaagaggcctggacagcagcggccccagataccacagacccgtgtgcttcctgtgctgctgcagctggagcctgatgggcctgagcggcttcctgaccggcccccccccccccggcatgagaccccccagaccctag

SEQ ID NO: 135091 - protein, 159 aa, Artificial Sequence
  derived and/or modified sequence
MPKFYCDYCDTYLTHDSPSVRKTHCSGRKHKENVKDYYQKWMEEQAQSLIDKTTAAFQQGKIPPTPFSAPPPAGAMIPPPPSLPGPPRPGMMPAPHMGGPPMMPMMGPPPPGMMPVGPAPGMRPPMGGHMPMMPGPPMMRPPARPMMVPTRPGMTRPDR

SEQ ID NO: 135092 - protein, 180 aa, Artificial Sequence
  derived and/or modified sequence
MNSASVDGHLSGCRLFLFLSPLFRFYCDYCDTYLTHDSPSVRKTHCSGRKHKENVKDYYQKWMEEQAQSLIDKTTAAFQQGKIPPTPFSAPPPAGAMIPPPPSLPGPPRPGMMPAPHMGGPPMMPMMGPPPPGMMPVGPAPGMRPPMGGHMPMMPGPPMMRPPARPMMVPTRPGMTRPDR

SEQ ID NO: 135093 - protein, 118 aa, Artificial Sequence
  derived and/or modified sequence
MEEQAQSLIDKTTAAFQQGKIPPTPFSAPPPAGAMIPPPPSLPGPPRPGMMPAPHMGGPPMMPMMGPPPPGMMPVGPAPGMRPPMGGHMPMMPGPPMMRPPARPMMVPTRPGMTRPDR

SEQ ID NO: 135094 - DNA, 270 bp, Artificial Sequence
  derived and/or modified sequence
ggcagacaccaccccggcagccaccagcagtgggaccagctgctgtgctggctgagaggcctgctgcaccccggcctgcacggctgcagagccggcagagcccacctgcagggcggcagagtgagagccggccccggcctgcacagactgcccgccggctgccacgccgacgccagcggccccaccctgggctgccccgtgctgctgcacgccgtggccgcctggagcagacagcccggcgtggagggcttcatcaccggcctgctgtag

SEQ ID NO: 135095 - DNA, 480 bp, Artificial Sequence
  derived and/or modified sequence
atgccaaaattctactgcgattattgtgacacttatctgacgcacgactcgccatcagtgcgcaagacccactgtagcggtaggaaacataaggagaatgttaaagattactaccagaaatggatggaggagcaagctcagagcctcatcgacaaaaccacagctgcatttcagcagggcaagataccaccaacgccattcagcgcacctcctccagctggcgcaatgattccacctccacccagtctccccggcccaccccgcccaggaatgatgcctgcgccccacatgggaggaccgcctatgatgcccatgatggggccacctccaccaggcatgatgccggtgggaccagccccagggatgagaccccctatgggggggcacatgccaatgatgcccggtcctccgatgatgcgccctccagcacgtcctatgatggttcccacaaggccaggcatgactaggccggatcgctag

SEQ ID NO: 135096 - DNA, 543 bp, Artificial Sequence
  derived and/or modified sequence
atgaacagtgccagcgttgacgggcatctcagcggatgcaggttgttcttgtttctctccccattattccggttctactgcgattactgtgacacataccttacgcacgactcaccgtcagtgcggaagacacattgctcaggtaggaagcacaaggagaatgtcaaggactactaccagaagtggatggaggaacaagcccaaagcctcatcgacaagactactgctgccttccaacaggggaaaattccgccgactccctttagcgcgccacctccagcaggggccatgatacccccacctcccagtttgcctgggcctccaaggcccggcatgatgcccgcacctcacatggggggccctccaatgatgcccatgatgggacctcccccccccggaatgatgcctgtcgggcctgctccagggatgcggcctcctatgggtggccatatgcccatgatgcctggcccccccatgatgcgcccccccgcaaggccgatgatggtgccgacaagacctggaatgacacgacccgacaggtag

SEQ ID NO: 135097 - DNA, 357 bp, Artificial Sequence
  derived and/or modified sequence
atggaggaacaggcccagtcactgatagacaagactaccgccgccttccagcagggcaagattccacccactccattcagtgctcctccacccgcaggcgccatgatacctccccccccttcgttacccgggccacctcgacccgggatgatgcccgctccacacatgggcggacctcccatgatgccaatgatgggccctccacctccgggcatgatgcccgtcggtccagcccccggaatgcggcctcctatgggcggccacatgcctatgatgcccgggcccccaatgatgcggccaccagcacggccgatgatggtgcctacccgcccagggatgactcggccagacagatag

SEQ ID NO: 135098 - DNA, 480 bp, Artificial Sequence
  derived and/or modified sequence
atgcccaagttctactgtgactactgtgacacctacctgacccatgacagccccagcgtgaggaagacccactgcagcggcaggaagcacaaggaaaatgtgaaggactactaccagaagtggatggaggagcaggcccagagcctgattgacaagaccacagctgccttccagcagggcaagatcccccccacccccttcagcgcccctcctcctgctggggccatgatccccccaccacccagcctgcccggcccccccaggcctggcatgatgcctgccccccacatgggcggcccccccatgatgcccatgatgggccccccacctcctggcatgatgcctgtgggccctgcccctggcatgaggcctcccatgggcggccacatgcccatgatgcctggcccccccatgatgaggcccccagcccggcccatgatggtgcccacccggcccggcatgaccaggccagacagatag

SEQ ID NO: 135099 - DNA, 543 bp, Artificial Sequence
  derived and/or modified sequence
atgaacagcgcctctgtggatggccacctgagcggctgccgcctcttcctgttcctgagccccctcttccgcttctactgtgactactgtgacacctacctgacccatgacagccccagcgtgaggaagacccactgcagcggcaggaagcacaaggaaaatgtgaaggactactaccagaagtggatggaggagcaggcccagagcctgattgacaagaccacagctgccttccagcagggcaagatcccccccacccccttcagcgcccctcctcctgctggggccatgatccccccaccacccagcctgcccggccccccccggcccggcatgatgcctgccccccacatgggcggcccccccatgatgcccatgatgggccccccacctcctggcatgatgcctgtgggccctgcccctggcatgaggcctcccatgggcggccacatgcccatgatgcctggcccccccatgatgaggcccccagcccggcccatgatggtgcccaccaggcctggcatgaccaggccagacagatag

SEQ ID NO: 135100 - DNA, 357 bp, Artificial Sequence
  derived and/or modified sequence
atggaggagcaggcccagagcctgattgacaagaccacagctgccttccagcagggcaagatcccccccacccccttcagcgcccctcctcctgctggggccatgatccccccaccacccagcctgcccggccccccccggcccggcatgatgcctgccccccacatgggcggcccccccatgatgcccatgatgggccccccacctcctggcatgatgcctgtgggccctgcccctggcatgaggcctcccatgggcggccacatgcccatgatgcctggcccccccatgatgaggcccccagcccggcccatgatggtgcccaccaggcctggcatgaccaggccagacagatag

SEQ ID NO: 135101 - DNA, 270 bp, Artificial Sequence
  derived and/or modified sequence
ggccgccaccaccctggcagccaccagcagtgggaccagctgctgtgctggctgcggggcctgctgcaccctggcctgcacggctgcagagctggccgggcccacctgcagggcggccgggtgcgggccggccctggcctgcaccggctgcctgctggctgccacgcagatgccagcggccccaccctgggctgccctgtgctgctgcatgctgtggccgcctggagccggcagcccggggtggagggcttcatcaccggcctgctgtag

SEQ ID NO: 135102 - DNA, 480 bp, Artificial Sequence
  derived and/or modified sequence
atgcccaagttctactgcgactactgcgacacctacctgacccacgattcaccctcggtgcgcaaaacacattgttccggacgtaagcacaaggagaacgtgaaggattattaccagaagtggatggaagagcaggctcagtcattgatcgataagactaccgccgcttttcaacagggaaaaattccgcccacgcccttttctgccccaccccctgcaggagcaatgatccctccacctccgtccctacctggaccccccagacccggcatgatgcctgcccctcatatgggcggccctcctatgatgcccatgatgggtcccccaccccccggcatgatgcccgtgggccctgcgccaggaatgcgtccacctatggggggccatatgccaatgatgccaggtccccccatgatgagacctcccgccagacctatgatggtccctactaggccaggcatgaccagacctgatcgctag

SEQ ID NO: 135103 - DNA, 543 bp, Artificial Sequence
  derived and/or modified sequence
atgaacagcgccagcgtggacggccacctgagcggctgccggctgtttcttttcttgtcacccctcttccgcttctattgtgattactgcgacacgtacctgacccacgacagtccttctgtgcgtaaaacacactgttctggaagaaaacataaagagaatgtgaaggactattaccaaaagtggatggaagagcaagcccaatcactgattgataagaccaccgccgcttttcagcaaggaaagattccacccacaccatttagcgccccgccacctgctggtgcgatgattccacccccccccagcctccctgggcctcctcgacccggaatgatgcctgcgccccacatgggaggcccaccaatgatgccaatgatgggaccaccgcctcctggtatgatgccagtggggcccgctcccggtatgcgcccgcctatggggggtcacatgccaatgatgcccggaccccctatgatgaggccccctgcccgaccaatgatggttcctacacgtcctggaatgactcggcctgacaggtag

SEQ ID NO: 135104 - DNA, 357 bp, Artificial Sequence
  derived and/or modified sequence
atggaggagcaggcccagagcctgatcgacaagaccaccgccgccttccagcaaggtaagattcctcctacccctttttccgcgcctccgcctgccggagctatgatccctcctccgccttcattgcctgggcccccccgccccggtatgatgccagcaccgcacatgggtgggccgcctatgatgcccatgatgggcccacctccccctggcatgatgcccgtgggtcccgccccaggaatgcgtccgccaatgggagggcacatgccgatgatgcccgggcctccgatgatgcgtcctcccgctcgccctatgatggtacctaccaggccaggaatgacccgacctgatcgttag

SEQ ID NO: 135105 - DNA, 480 bp, Artificial Sequence
  derived and/or modified sequence
atgccaaagttctattgcgactattgcgatacctacttgacccacgactcaccttcagtgaggaagacccactgttcgggccgaaaacacaaggagaacgtaaaagattattatcagaaatggatggaagagcaggcacaatccctcattgacaaaactacggcagctttccagcagggaaaaatccccccaacaccatttagcgcccctccccctgccggtgccatgattccacctccaccttctctgccaggcccaccacggccagggatgatgcccgctccacacatgggcggaccacctatgatgcccatgatgggaccgcctccgccaggcatgatgcctgttggacccgcacccggaatgcggccacctatgggcggacatatgccaatgatgccaggtcccccaatgatgcgaccaccagctaggccgatgatggtgccaacccggcctggaatgactcggcctgacagatag

SEQ ID NO: 135106 - DNA, 543 bp, Artificial Sequence
  derived and/or modified sequence
atgaacagcgctagtgttgatggacacctttctggctgccggctattcttgttcctttctccattgtttcgattttattgcgactactgcgatacatatctcacccatgacagtccgtccgtccggaagacgcattgctctgggagaaagcacaaagaaaacgttaaggattactatcagaagtggatggaggagcaggctcaatctctgatcgacaaaaccacagctgcttttcagcagggtaagatcccccctacccccttctctgctccaccacccgctggagcaatgatccccccaccgccaagtctgcctggcccacctaggcccggaatgatgcctgccccacacatggggggacctcctatgatgcctatgatggggcctcctccgcctgggatgatgccggttgggccagcccctggcatgcgtcccccaatggggggtcacatgcctatgatgcccggaccaccaatgatgcgacccccagcaaggcctatgatggtacccacaaggcccggaatgaccaggccggataggtag

SEQ ID NO: 135107 - DNA, 357 bp, Artificial Sequence
  derived and/or modified sequence
atggaggaacaggcgcagtccctgatcgacaaaacgacagctgctttccaacagggaaagatacctcccacccccttttccgcccctccaccagctggtgctatgatccccccaccccctagtctgccgggacccccaagaccaggtatgatgccagccccacacatgggagggccacccatgatgcccatgatgggacctccacctccagggatgatgcctgttggtccagcacccggaatgcgccctcctatggggggacacatgcctatgatgccaggaccacccatgatgagaccgccagccaggccgatgatggtaccaacacggccaggcatgacacgacccgataggtag

SEQ ID NO: 135108 - DNA, 842 bp, Artificial Sequence
  derived and/or modified sequence
gcccctcgctcggctgctggaggcgagggcttcggaagtcttcatgctagtctcgtggggttccgcggtgtcgtcgctggctgtgcgcgtcatttccgggcgtcacgtaacggagtggccaacggcctgcagagcaacatgcccaagttttattgtgactactgcgatacatacctcacccatgactctccatctgtgagaaagacacactgcagtggaaggaaacacaaagagaatgtgaaagactattatcagaaatggatggaagagcaggctcagagcctgattgacaaaacaacggctgcatttcaacaaggaaagatacctcctactccattctctgctcctcctcctgcaggggcgatgataccacctccccccagccttccgggtcctcctcgccctggtatgatgccagcaccccatatggggggccctcccatgatgccaatgatgggccctcctcctcctgggatgatgccagtgggacctgctcctggaatgaggccgcccatgggaggccatatgccaatgatgcctgggcccccaatgatgagacctcctgcccgtcccatgatggtgcccactcggcccggaatgactcgaccagacagataaggatagaggggaggccttattgtatcggttttatattacctgttctgcttcaccaggagatcatgctgctgtgatactgagttttctaaacagcataaggaagacttgctcccctgtcctatgaaagagaatagttttggaggggagaagtgggacaaaaaagatgcagttttcctttgtattgggaaatgtgaaaataaaattgtcaactctttcagttaaaa

SEQ ID NO: 135109 - DNA, 1054 bp, Artificial Sequence
  derived and/or modified sequence
gagtggggccccgaaatctgagggtgatcgtagtcactagttgtggcccccatgcaggagcggagagcgggttctggtttctgaaacctcgagggatgggagagtatctgggccgggtggacggaggcagggagatggagagcgctagacaccccattttagagtgcagatggatcccgcttaaggcaacaaaaaaaagcctggtttatgtgtcgacgctttgatgcttttgagtcgtgaggcggtctggctttttgttttgtttgtttgttttgtttttatcttccatgaacagcgcttccgtggatgggcatctcagtggttgtcgtctttttctcttcctttcacctcttttcaggttttattgtgactactgcgatacatacctcacccatgactctccatctgtgagaaagacacactgcagtggaaggaaacacaaagagaatgtgaaagactattatcagaaatggatggaagagcaggctcagagcctgattgacaaaacaacggctgcatttcaacaaggaaagatacctcctactccattctctgctcctcctcctgcaggggcgatgataccacctccccccagccttccgggtcctcctcgccctggtatgatgccagcaccccatatggggggccctcccatgatgccaatgatgggccctcctcctcctgggatgatgccagtgggacctgctcctggaatgaggccgcccatgggaggccatatgccaatgatgcctgggcccccaatgatgagacctcctgcccgtcccatgatggtgcccactcggcccggaatgactcgaccagacagataaggatagaggggaggccttattgtatcggttttatattacctgttctgcttcaccaggagatcatgctgctgtgatactgagttttctaaacagcataaggaagacttgctcccctgtcctatgaaagagaatagttttggaggggagaagtgggacaaaaaagatgcagttttcctttgtattgggaaatgtgaaaataaaattgtcaactctttcagttaaaa

SEQ ID NO: 135110 - DNA, 600 bp, Artificial Sequence
  derived and/or modified sequence
caacggcctgcagagcaacatgcccaaccatctgtgagaaagacacactgcagtggaaggaaacacaaagagaatgtgaaagactattatcagaaatggatggaagagcaggctcagagcctgattgacaaaacaacggctgcatttcaacaaggaaagatacctcctactccattctctgctcctcctcctgcaggggcgatgataccacctccccccagccttccgggtcctcctcgccctggtatgatgccagcaccccatatggggggccctcccatgatgccaatgatgggccctcctcctcctgggatgatgccagtgggacctgctcctggaatgaggccgcccatgggaggccatatgccaatgatgcctgggcccccaatgatgagacctcctgcccgtcccatgatggtgcccactcggcccggaatgactcgaccagacagataaggatagaggggaggccttattgtatcggttttatattacctgttctgcttcaccaggagatcatgctgctgtgatactgagttttctaaacagcataaggaagacttgctcccctgtcctatgaaagagaatagttttggaggg

SEQ ID NO: 135111 - DNA, 480 bp, Artificial Sequence
  derived and/or modified sequence
atgcccaagttctactgcgactactgcgacacctacctgacccacgacagccccagcgtgagaaagacccactgcagcggcagaaagcacaaggagaacgtgaaggactactaccagaagtggatggaggagcaggcccagagcctgatcgacaagaccaccgccgccttccagcagggcaagatcccccccacccccttcagcgcccccccccccgccggcgccatgatcccccccccccccagcctgcccggcccccccagacccggcatgatgcccgccccccacatgggcggcccccccatgatgcccatgatgggcccccccccccccggcatgatgcccgtgggccccgcccccggcatgagaccccccatgggcggccacatgcccatgatgcccggcccccccatgatgagaccccccgccagacccatgatggtgcccaccagacccggcatgaccagacccgacagatag

SEQ ID NO: 135112 - DNA, 543 bp, Artificial Sequence
  derived and/or modified sequence
atgaacagcgccagcgtggacggccacctgagcggctgcagactgttcctgttcctgagccccctgttcagattctactgcgactactgcgacacctacctgacccacgacagccccagcgtgagaaagacccactgcagcggcagaaagcacaaggagaacgtgaaggactactaccagaagtggatggaggagcaggcccagagcctgatcgacaagaccaccgccgccttccagcagggcaagatcccccccacccccttcagcgcccccccccccgccggcgccatgatcccccccccccccagcctgcccggcccccccagacccggcatgatgcccgccccccacatgggcggcccccccatgatgcccatgatgggcccccccccccccggcatgatgcccgtgggccccgcccccggcatgagaccccccatgggcggccacatgcccatgatgcccggcccccccatgatgagaccccccgccagacccatgatggtgcccaccagacccggcatgaccagacccgacagatag

SEQ ID NO: 135113 - DNA, 357 bp, Artificial Sequence
  derived and/or modified sequence
atggaggagcaggcccagagcctgatcgacaagaccaccgccgccttccagcagggcaagatcccccccacccccttcagcgcccccccccccgccggcgccatgatcccccccccccccagcctgcccggcccccccagacccggcatgatgcccgccccccacatgggcggcccccccatgatgcccatgatgggcccccccccccccggcatgatgcccgtgggccccgcccccggcatgagaccccccatgggcggccacatgcccatgatgcccggcccccccatgatgagaccccccgccagacccatgatggtgcccaccagacccggcatgaccagacccgacagatag

SEQ ID NO: 135114 - protein, 92 aa, Artificial Sequence
  derived and/or modified sequence
MAYSGQGQKVQKVMVQPINLIFRYLQNRSQIQVWLYEQVNMQIEGCIIGFDEYMNLVLDDAEEIHSKTKSRKQLGRIMLKGDNITLLQSVSN

SEQ ID NO: 135115 - protein, 52 aa, Artificial Sequence
  derived and/or modified sequence
MRIEGCIIGFDEYMNLVLDDAEEIHSKTKSRKQLGRIMLKGDNITLLQSVSN

SEQ ID NO: 135116 - protein, 92 aa, Artificial Sequence
  derived and/or modified sequence
MAYRGQGQKVQKVMVQPINLIFRYLQNRSRIQVWLYEQVNMRIEGCIIGFDEYMNLVLDDAEEIHSKTKSRKQLGRIMLKGDNITLLQSVSN

SEQ ID NO: 135117 - DNA, 279 bp, Artificial Sequence
  derived and/or modified sequence
atggcctacagcggccagggccagaaggtgcagaaggtgatggtgcagcccatcaacctgatcttcagatacctgcagaacagaagccagatccaggtgtggctgtacgagcaggtgaacatgcagatcgagggctgcatcatcggcttcgacgagtacatgaacctggtgctggacgacgccgaggagatccacagcaagaccaagagcagaaagcagctgggcagaatcatgctgaagggcgacaacatcaccctgctgcagagcgtgagcaactag

SEQ ID NO: 135118 - DNA, 279 bp, Artificial Sequence
  derived and/or modified sequence
atggcttacagtggccagggccaaaaagtccagaaggttatggtacagcctatcaatctcatattcaggtacctgcagaaccgctcacagatccaggtttggctgtatgaacaggtcaacatgcaaatcgagggctgtattatcgggtttgatgagtacatgaacttagtgttggacgacgccgaggaaatccattctaaaacaaaaagccgaaaacagcttgggcgtattatgctgaaaggtgacaacataaccctcctccagagtgtgtcaaattag

SEQ ID NO: 135119 - DNA, 279 bp, Artificial Sequence
  derived and/or modified sequence
atggcctacagcggccagggccagaaggtgcagaaggtgatggtgcagcccatcaacctgatcttccgctacctgcagaacagaagccagatccaggtgtggctgtatgagcaggtgaacatgcagatcgagggctgcatcatcggctttgatgagtacatgaacctggtgctggatgatgctgaggagatccacagcaagaccaagagcaggaagcagctgggccgcatcatgctgaagggggacaacatcaccctgctgcagagcgtgagcaactag

SEQ ID NO: 135120 - DNA, 279 bp, Artificial Sequence
  derived and/or modified sequence
atggcctacagcggccagggccagaaggtgcagaaggtgatggtgcagcctattaacttgattttccgatatctgcagaataggagccagatccaggtttggctgtatgaacaagtaaatatgcagattgagggatgcatcattggttttgacgagtacatgaatcttgtcttggatgacgctgaggaaattcattccaaaaccaaatcgaggaagcagttgggcagaataatgctgaaaggggataacataacactgttgcagtcagtttctaactag

SEQ ID NO: 135121 - DNA, 279 bp, Artificial Sequence
  derived and/or modified sequence
atggcgtactccggccagggacaaaaagtgcagaaagtcatggtgcagcctatcaacctcattttcagatacctgcagaatcgaagtcaaatccaggtttggctctacgagcaagtgaatatgcagatagaagggtgtatcattgggttcgatgagtacatgaatctcgtgctggatgacgccgaagaaatacatagtaagactaaatctcgaaaacagctcggaaggattatgctcaaaggggacaatattaccctgctccagagtgtcagcaattag

SEQ ID NO: 135122 - DNA, 469 bp, Artificial Sequence
  derived and/or modified sequence
agcttgcaagtgtgctctttgtgaaattccaccatggcatacagtggccagggccagaaagtgcagaaggttatggtgcagcccatcaacctcatcttcagatacttacaaaatagatcgcagattcaggtgtggctctatgagcaagtgaatatgcagatagaaggctgtatcattggttttgatgagtatatgaaccttgtattagatgatgcagaagagattcattcgaaaacaaagtcaagaaaacaactgggtcggatcatgctaaaaggagataatattactctgctacaaagtgtctccaactagaaatgatcaatgaagtgagaaattgttgagaaggatacagtttgtttttagacgtcctttgtccaatatgaacatttattcatattgttttgattacacttatgtttttacaagatggcaataaatgctgtgggattgtttgtattaaaactaataa

SEQ ID NO: 135123 - DNA, 279 bp, Artificial Sequence
  derived and/or modified sequence
atggcttacaggggacaggggcagaaggttcagaaagtgatggtccagcctataaatttgatcttcagatatctccagaatcgaagccgcatacaggtgtggttgtacgaacaggttaatatgaggatagaagggtgtatcattgggtttgacgagtatatgaatttggtgctcgacgatgccgaggagatccacagcaagactaagagtcgcaagcagctcggacgaatcatgcttaagggagataacataacattgttacagagtgtgtcaaattag

SEQ ID NO: 135124 - DNA, 279 bp, Artificial Sequence
  derived and/or modified sequence
atggcctaccggggccagggccagaaggtgcagaaggtgatggtgcagcccatcaacctgatcttccgctacctgcagaacagaagccgcatccaggtgtggctgtatgagcaggtgaacatgagaattgagggctgcatcatcggctttgatgagtacatgaacctggtgctggatgatgctgaggagatccacagcaagaccaagagcaggaagcagctgggccgcatcatgctgaagggggacaacatcaccctgctgcagagcgtgagcaactag

SEQ ID NO: 135125 - DNA, 279 bp, Artificial Sequence
  derived and/or modified sequence
atggcctaccggggccagggccagaaggtgcagaaggtgatggtgcagcccattaacctgatttttagatatctccagaatcgctcacgaatccaggtgtggctgtatgaacaggtgaacatgagaattgaggggtgtatcattggctttgacgagtacatgaacttggtcctcgatgacgcagaggagatccattccaaaactaagtccaggaagcagctgggccgcattatgctgaagggggataacatcacacttctacaatcggtgtctaattag

SEQ ID NO: 135126 - DNA, 279 bp, Artificial Sequence
  derived and/or modified sequence
atggcataccggggacagggacagaaagtgcaaaaagttatggttcagcctattaatctcatctttcggtatttgcagaaccgatcccgcatacaggtgtggttgtacgaacaggtgaacatgcgtatcgaaggttgcattattgggttcgacgagtacatgaacttggtgctggatgatgcagaagagattcatagtaagacaaaatcacgcaagcagctgggaagaattatgctgaagggggacaacatcaccctgctgcagtcagtctctaactag

SEQ ID NO: 135127 - DNA, 942 bp, Artificial Sequence
  derived and/or modified sequence
gctctcagaggcagcgtgcgggtgtgctctttgtgaaattccaccatggcgtaccgtggccagggtcagaaagtgcagaaggttatggtgcagcccatcaacctcatcttcagatacttacaaaatagatcgcggattcaggtgtggctctatgagcaagtgaatatgcggatagaaggctgtatcattggttttgatgagtatatgaaccttgtattagatgatgcagaagagattcattctaaaacaaagtcaagaaaacaactgggtcggatcatgctaaaaggagataatattactctgctacaaagtgtctccaactagaaatgatcaatgaagtgagaaattgttgagaaggatacagtttgtttttagatgtcctttgtccaatgtgaacatttattcatattgttttgattaccctcgtgttactacaagatggcaataaatactatgggattgtttgtattaaaaaatttacattgcttcttactattcagcagtagaaactttttacacagtaacaccattcgttgctggtatttagttttctgaagggtcgcagttgccttgagcacttggtattcgcagagcttggacctgtagattttgaggcagattaggaattctgcctgatgggtaagcttccagtattgggaggtggagaaggggagggttcagaaaaataaataagagttattgcactaacaaaagtcttcatcacttgtagttctggatgctggaataccagagtttctaacctaaatatgttgggtacattatttaatggggtcagtattgctcaacactctcattgagtcactgtgaggtctttgtgaattttatcgctaagatcagaatgtgagaagtatttggatatagggaaagaatgaagtgcctttcaagtacattaaaaatcagttaagagtttacaggaaagag

SEQ ID NO: 135128 - DNA, 279 bp, Artificial Sequence
  derived and/or modified sequence
atggcctacagaggccagggccagaaggtgcagaaggtgatggtgcagcccatcaacctgatcttcagatacctgcagaacagaagcagaatccaggtgtggctgtacgagcaggtgaacatgagaatcgagggctgcatcatcggcttcgacgagtacatgaacctggtgctggacgacgccgaggagatccacagcaagaccaagagcagaaagcagctgggcagaatcatgctgaagggcgacaacatcaccctgctgcagagcgtgagcaactag

SEQ ID NO: 135129 - protein, 86 aa, Artificial Sequence
  derived and/or modified sequence
MSLPLNPKPFLNGLTGKPVMVKLKWGMEYKGYLVSVDGYMNMQLANTEEYIDGALSGHLGEVLIRCNNVLYIRGVEEEEEDGEMRE

SEQ ID NO: 135130 - DNA, 261 bp, Artificial Sequence
  derived and/or modified sequence
atgtccttacccctcaatccaaaacccttcctgaatggattgaccgggaagcctgtcatggtgaagttaaagtgggggatggagtataaaggttatctggtgtccgttgacggatacatgaacatgcagctggctaacacagaagagtatatcgacggggcactctccgggcatctcggggaagtattaatcagatgcaacaatgttttgtatatcaggggtgtcgaagaggaggaagaggacggagaaatgcgggagtag

SEQ ID NO: 135131 - DNA, 261 bp, Artificial Sequence
  derived and/or modified sequence
atgagcctgcccctgaaccccaagcccttcctgaatggcctgaccgggaagcctgtgatggtgaagctgaagtggggcatggagtacaagggctacctggtgtctgtggatggctacatgaacatgcagctggccaacacagaggagtacattgatggagccctgagcggccacctgggggaggtgctgatccgctgcaacaacgtgctgtacatccggggcgtggaggaggaggaggaggatggagagatgagggagtag

SEQ ID NO: 135132 - DNA, 261 bp, Artificial Sequence
  derived and/or modified sequence
atgagcctgcccctgaaccccaagcccttcctgaacggcctgaccggaaagcccgtcatggttaaactgaagtggggcatggaatacaaaggatatctggttagtgtcgatggctacatgaacatgcagctggctaataccgaggagtatatcgatggagcactgtccggacacttgggcgaggtgctgattagatgtaataatgtgttgtatatcagaggcgtggaggaagaagaggaagatggcgagatgagagaatag

SEQ ID NO: 135133 - DNA, 261 bp, Artificial Sequence
  derived and/or modified sequence
atgagtctaccacttaacccgaagcccttcttaaatgggctcaccggcaaaccggtgatggtgaagctcaaatggggtatggaatataaaggctatctggttagcgtcgacgggtacatgaacatgcaactggcaaacaccgaggagtacattgacggcgctttaagcggtcacctgggggaggtgctcattagatgtaataacgtgctgtacatcagaggggtggaggaagaagaggaagacggggagatgagggagtag

SEQ ID NO: 135134 - DNA, 1389 bp, Artificial Sequence
  derived and/or modified sequence
ggtgggaggtgaaaggtcatagtcctgtttggcggccatttctcttgaaactgcggctcgggacctgcggtacctgctgtagtcacgagggacgggcggcggcctggtcggcagagagtagcctgcaacattcggccgtggttacgatgagtttacccctcaatcccaaacctttcctcaatggactaacaggaaagccagtgatggtgaaacttaagtggggaatggagtacaagggctatctggtatctgtagatggctacatgaacatgcagcttgcaaatacagaagaatacatagatggagctttgtctggacatctgggtgaagttttaataaggtgtaataatgtcctttatatcagaggtgtggaagaagaggaagaagatggggaaatgagagaatagcatcttttgtgggggattttttttatatatatttctagacaataaagatttgtttgtttttcaacttgacttgtgaactatttgtattcagatatttacaagcaaagctgaaatgatgaaccaattgggaaagattactcactgaactaatgctttaaaagccactgaatttcatttaagttgcttttcttttgtaagcccaatattcttttttttcccataaaggataattatttatatgctttagatatttttatgaaggtgaatttcagaccttttcttgtaaaattatctattagctgagaccttttaaatgcaactttttcttttaaagttatttttgagctacttttaacgtataaaattaaacattttcttggtattaataatatactgtcttattttacttagtagtcaataaattacatgttaattctgtgtcaatataagctaaatgcacatattgcagctaaaattgaagcatcttctaaaaattaaaatgattgtacagacagggcacaacagaaattgggaactgacattcaggctgaaggcatacggtttgttcactgaagagaaaaaagttctctgaacaaaatgtaatgtcaaataaaaaccagtctccccattatgttctgagacataacctcgaggttgagttttaagcccctcaaaacccttcaggtattttagggttgtacattgttaaaatgtatagtccatagtaataacagtatgctatgaacttccctacagatgggttgagaaaatacatcatttacattctcatgttgtaagagaatggccattattacacttcagtgttcatttaccatagttttatcagtaaactatctttgtgtatccccaagtgggacaactcaaagtatagaagaaagtgtttagctatatggaataatacttatgatatgaatacttaaagacttaaaatttacaaaatacacctaagacattctggtaa

SEQ ID NO: 135135 - DNA, 261 bp, Artificial Sequence
  derived and/or modified sequence
atgagcctgcccctgaaccccaagcccttcctgaacggcctgaccggcaagcccgtgatggtgaagctgaagtggggcatggagtacaagggctacctggtgagcgtggacggctacatgaacatgcagctggccaacaccgaggagtacatcgacggcgccctgagcggccacctgggcgaggtgctgatcagatgcaacaacgtgctgtacatcagaggcgtggaggaggaggaggaggacggcgagatgagagagtag

SEQ ID NO: 135136 - protein, 505 aa, Artificial Sequence
  derived and/or modified sequence
MASGRRAPRTGLLELRAGAGSGAGGERWQRVLLSLAEDVLTVSPADGDPGPEPGAPREQEPAQLNGAAEPGAGPPQLPEALLLQRRRVTVRKADAGGLGISIKGGRENKMPILISKIFKGLAADQTEALFVGDAILSVNGEDLSSATHDEAVQVLKKTGKEVVLEVKYMKDVSPYFKNSTGGTSVGWDSPPASPLQRQPSSPGPTPRNFSEAKHMSLKMAYVSKRCTPNDPEPRYLEICSADGQDTLFLRAKDEASARSWATAIQAQVNTLTPRVKDELQALLAATSTAGSQDIKQIGWLTEQLPSGGTAPTLALLTEKELLLYLSLPETREALSRPARTAPLIATRLVHSGPSKGSVPYDAELSFALRTGTRHGVDTHLFSVESPQELAAWTRQLVDGCHRAAEGVQEVSTACTWNGRPCSLSVHIDKGFTLWAAEPGAARAVLLRQPFEKLQMSSDDGASLLFLDFGGAEGEIQLDLHSCPKTIVFIIHSFLSAKVTRLGLLA

SEQ ID NO: 135137 - DNA, 2342 bp, Artificial Sequence
  derived and/or modified sequence
cccttctgacccaccccgctaggtagtcccacacggcggccctcggctcccgggccccgccccggcctcctgcatttgcccgaggccccctccccagcactggccacaccccagggtagccccgcccccagagctcctcccccagcggccggggtagggtggcggctggcccagccgggcccccgctgccctctgccctgggcgcttggtcggagcgggctgggcaaagcgggacagggcgagcgcggcggcccgggggctcggaggcgaagatggcgtccggcaggcgcgccccgcgcaccgggctgctggagctgcgcgccggggcgggctcgggggccggcggcgagcgatggcagcgggtgctgctgagtctggcggaggacgtgctgaccgtgagccccgccgacggcgaccctggtcccgagcccggcgctccgcgggagcaggagcccgcgcagctcaacggcgccgcggagccgggcgccgggcccccgcagctgccagaggcgctactgctccagcggcgccgcgtgacggtgcgcaaggccgacgccggtgggctgggcatcagcatcaaaggcggccgggagaacaagatgcctattctcatttccaagatcttcaagggattggcagctgaccagacagaggccctttttgtgggggatgccatcctgtctgtgaatggggaagacttgtcctctgctacccatgatgaggcggtgcaggtcctcaagaagacaggcaaggaggtggtgctggaggtcaagtatatgaaggacgtctcaccgtatttcaagaactctactggtgggacctcggtcggctgggactcacctcctgcctcaccccttcagcggcagccttcctcccctggccccacaccccggaacttcagcgaggccaaacacatgtccttgaagatggcatatgtctcgaagaggtgcacccccaatgacccggagcccaggtatctggagatctgctcggcagatggtcaagacaccctcttcctgagggccaaggatgaggctagtgcgaggtcgtgggcgactgccatccaagcccaggtcaatactctgacgccgcgggtcaaggatgagctgcaggcactgttggcagccaccagcacagctgggagccaggacatcaagcagattggctggctaactgagcagctgcccagtgggggcacagcccccaccctggccctgctaactgaaaaggaactgctcctctacttgtctctccccgagacccgcgaggccctgagccggccagcccgtactgccccactcatcgccaccagactggtgcactcaggcccctccaagggctcagtgccctacgatgcagagctctcttttgccctgcgcacgggcacgcgtcacggtgtggacactcacctgttcagcgtggagtcaccgcaggagctggctgcctggacccgccagcttgtggatggctgtcaccgggccgccgagggtgtgcaggaggtgtctacagcctgcacgtggaatgggcgtccctgcagcctgtctgtgcacatcgacaagggcttcacactgtgggcggctgagccaggtgcagcccgagctgtgctcctgcgacagcccttcgagaagctgcagatgtcttcagatgacggtgccagtctccttttcctggattttggaggtgctgaaggcgagatccagctggacctgcactcgtgtcccaaaaccatagtcttcatcatccactccttcctgtcggccaaagtcacccgcctcgggctgttggcctagaagtcgccggatgcactagccctgaagaggggtgtccatgacatggcctgagctgggcctccaccgactgcctgctcacccctgggctgagggaagggagaggagaggaacaagggcctccgaaaccccaaccctgagggagactggattggtcttggggcccaggacccagacgcaggacagagtggactctgcctgtgatggggtggccttcctgctgcccccctccaccagtgccttttgcagagagatattttgtgtacacagaagccattccgagtctgggacctgcccctgtgcggatcctgaccccagccaacagctgagctgccgggcctcctcgaggcccctaagccacccccagaggtcccatctgaagctggagtaccctggggtcagcagcaagagaaagaagaggagattttctgtttgtttttcccctcagccctgccaccgtggggagtctggtttttctcttcatcctgtctctctcctccttactcttggataaataaacagcctgtgagcacacaggcagcccggcccagtgta

SEQ ID NO: 135138 - DNA, 1518 bp, Artificial Sequence
  derived and/or modified sequence
atggcttcaggacggagggcccctcgtacagggttgttagagctgcgggctggggccggatcaggcgctggcggagaacgttggcaacgagtcctcctgtccctagctgaagacgtgttaaccgtatctcccgctgatggggatcctgggcctgaacccggtgcccctagggagcaggagcctgcacagctcaacggggccgctgagcccggcgcaggcccaccgcagcttccagaggcacttctgctccagagacgccgagtcaccgttcggaaagctgacgctggcgggctagggatttccattaagggaggtcgggagaataaaatgccgattctcatttctaagatctttaaaggcctcgccgcggaccagaccgaggcgctttttgttggggatgcaattctctctgtaaacggtgaggacctgtcaagtgccacacacgatgaagctgtgcaggtactgaaaaaaaccggaaaagaggtggttctggaggtcaagtacatgaaggacgtctccccatactttaagaactccaccggcggcactagcgtgggctgggattctccacccgctagtcctctccagagacaaccctcctctcccgggccaactccaagaaacttctctgaggcaaagcacatgagtctcaagatggcctacgttagtaagcgatgcactcccaacgacccagagccaaggtacctcgagatctgttcagccgacggacaagataccctgttcctgagagcaaaggatgaagcctctgcgaggagctgggctacagccattcaggcacaggtgaacaccctcaccccacgcgtgaaggatgagttacaggccttgctcgcggcaacctcgaccgccggctctcaggacatcaagcaaataggctggctgaccgagcagttgccaagtggcggaacggctcccaccctcgccctgctcactgagaaggagttgcttctctacttgtccttaccggagacgcgagaggctctgagccgcccagcccgcactgcacctctaatagcaactcgactcgtccacagtggaccctccaaggggtctgtgccctacgatgctgagctatcttttgcgctgcggactgggactcggcatggagtcgatactcatctctttagcgtggagagccctcaagagttagctgcatggactcgccaactggtggacggctgtcaccgtgcggcggagggagtgcaggaagtgtccaccgcctgtacttggaacggcagaccgtgttcactgtccgttcacattgacaaggggtttactctctgggcggcagaaccgggggccgcacgggctgtgctacttcgacaacccttcgaaaaactacagatgtccagtgatgacggggccagcctactctttctggacttcggcggcgcggaaggcgagatccaactggacctgcacagctgccctaagacaatcgttttcattattcactctttcctgagtgccaaggtgactaggttgggactgctcgcctag

SEQ ID NO: 135139 - DNA, 1518 bp, Artificial Sequence
  derived and/or modified sequence
atggccagcggcagaagagcccccaggacaggcctgctggagctgcgggccggggccggcagcggggccggcggggagcgctggcagagggtgctgctgagcctggctgaagatgtgctgactgtgtccccagcagatggagaccccggccctgagcccggggccccccgggagcaggagcccgcccagctgaatggagctgctgagcccggggccggccccccccagctgcctgaggccctgctgctgcagaggcggcgggtgacagtgaggaaggcagatgctgggggcctgggcatcagcatcaagggcggccgggagaacaagatgcccatcctgatcagcaagatcttcaagggcctggccgctgaccagacagaggccctgtttgtgggagatgccatcctgtctgtgaatggagaggacctgagcagcgccacccatgatgaagctgtgcaggtgctgaagaagacaggcaaggaggtggtgctggaggtgaagtacatgaaggatgtgagcccctacttcaagaacagcactggaggcacctctgtgggctgggacagccccccagccagccccctgcagaggcagcccagcagccctggccccaccccaagaaacttcagcgaggccaagcacatgagcctgaagatggcctacgtgtccaagcgctgcaccccaaatgaccctgagccccgctacctggagatctgcagcgcagatggccaggacaccctcttcctgcgggccaaggatgaggccagcgcccgctcctgggccacagccatccaggcccaggtgaacaccctgaccccccgggtgaaggatgagctgcaggccctgctggccgccaccagcacagctggcagccaggacatcaagcagatcggctggctgacagagcagctgcccagcggcggcacagcccccaccctggccctgctgacagagaaggagctgctgctgtacctgagcctgcctgagacccgggaggccctgagcaggcctgccaggacagcccccctcatcgccacccggctggtgcacagcggccccagcaaaggatctgtgccctatgatgctgagctgagctttgccctgaggacaggcaccaggcatggagtggacacccacctgttctctgtggagagcccccaggagctggccgcctggacccggcagctggtggatggctgccacagagctgctgagggcgtgcaggaggtgtccacagcctgcacctggaatggccggccctgcagcctgtctgtgcacatcgacaagggcttcaccctgtgggccgctgagcccggggccgcccgggctgtgctgctgcggcagccctttgagaagctgcagatgagcagtgatgatggagccagcctgctcttcctggactttggaggagctgagggggagatccagctggacctgcacagctgccccaagaccatcgtgttcatcatccacagcttcctgagcgccaaggtgacccggctgggcctgctggcctag

SEQ ID NO: 135140 - DNA, 1518 bp, Artificial Sequence
  derived and/or modified sequence
atggccagcggccggcgggccccccggaccggcctgctggagctgagagccggggccggctccggagccggcggagaaagatggcagagggtgttgctgtcactggccgaggatgtgctaacagtgtcccctgcagacggtgatcccggtccggaaccaggtgcacctagggaacaggagcctgcacagttgaatggggccgccgagcctggagctggcccccctcagctaccggaagccttgttactccagagacgaagggtcaccgtcaggaaggctgatgctggaggactggggattagtattaagggaggaagggaaaacaaaatgcccattctcatttccaagatattcaaaggactagcagccgaccaaactgaggccctattcgtgggcgacgctatcctgtctgttaatggcgaagatctatcctcagccacacacgacgaagcagttcaggtcttgaagaagaccggcaaagaggttgtgctggaggtgaagtacatgaaggacgtaagcccctattttaagaattcaacaggaggcaccagcgtaggatgggattcccccccagcctctcccctgcaacgacagcccagtagcccgggcccgacaccacggaatttcagtgaagccaagcatatgagtttgaagatggcttatgtgagcaaacggtgcacccccaacgaccccgaaccaagatacttggaaatctgttcagctgatggtcaggatactctgtttctgagggccaaggatgaggcctccgcacgaagctgggctacagccattcaagcccaggtcaacactctcactcccagagtaaaagacgagttacaggctctcctggcagctaccagtactgcaggctcccaagatatcaagcagatcggatggctgaccgagcaacttccgagcggtggcactgcaccaacactcgctctactgacggagaaagagctgttgttgtatctgagccttcctgagacacgcgaggcacttagccgaccggctaggactgccccgctgatagctaccaggttagtgcatagcggcccatctaagggaagcgtgccctatgacgcagagctttcttttgccttgaggaccgggactcgacatggcgtcgatacccatctcttcagcgttgagagcccccaggagctcgctgcctggacccgccagcttgtcgatggttgtcatagagcagccgagggtgtgcaggaggtttctaccgcttgtacgtggaacggtcgtccgtgtagtctcagtgtccacatcgataagggcttcacactgtgggctgccgagcccggcgctgctcgggccgttctcctgcggcagcctttcgagaagctacagatgagttctgatgatggagcttctttgctctttttggactttgggggtgctgagggtgagattcagttggatttgcactcgtgccccaagacgatcgtctttataattcactcatttttgtccgcgaaagtgacccgcctcgggctgcttgcttag

SEQ ID NO: 135141 - DNA, 1518 bp, Artificial Sequence
  derived and/or modified sequence
atggcctcaggaaggcgtgcccctcgcacaggtctgctcgagctgagagccggtgccggttctggagctggcggagagaggtggcagcgcgttctgctgtccctagcagaagacgtgctgaccgtatccccagccgacggcgaccccggacctgagcctggggcacccagggagcaggagccagcgcaacttaacggggctgcggaacccggagctggtccaccccagctccccgaggctctcctgctccagcgcagacgggttaccgtgagaaaggcagacgctggcggtctagggatttctattaagggcggaagggagaataagatgccaatactcatctctaaaatcttcaagggactcgctgccgatcaaaccgaggctctattcgttggagacgcaattctgagcgtgaatggcgaagaccttagcagtgccacacatgacgaggcagtgcaagtgctcaaaaaaacaggcaaggaagtggtgctggaggtgaagtacatgaaggacgtttccccatactttaaaaattcaacaggagggacatctgtggggtgggacagccccccagcttccccgctacagcgccagcctagttctcctggtccaacacctagaaacttctccgaggccaagcacatgtcacttaagatggcatacgtgagtaaacgatgcactccgaacgaccccgagcccaggtacctggaaatttgctcagccgacggccaagatacactcttcctacgtgccaaggacgaggcttccgctcggtcctgggcgaccgccattcaggcccaggtgaacacactcactccacgggtcaaagacgaactccaggctcttctagctgccacgtccaccgctggcagccaggatattaagcagatcggctggttgactgagcaactgccttccggcggtactgcccctacattggctctattgaccgagaaggagctgctgctgtacctgagtttaccggaaacccgggaggcactcagcagacctgcccgaactgcccctctgatagctacccggctggtacactctgggcctagcaagggctcagtgccctatgatgccgaactttcatttgcgctgcggaccgggacccgacatggagtcgatacccatttgttcagcgtggagagcccgcaggagctggcagcatggaccagacagctggtggatgggtgtcaccgggcagctgagggcgtgcaagaggtgtccacagcctgtacatggaacggaaggccctgctccctgtccgtccacatcgacaagggatttactctgtgggccgcagaacccggagccgctagagccgttttacttcgacagcccttcgagaagctgcagatgagcagtgatgatggcgcaagcctcctcttcctcgatttcggcggagccgagggggagattcaacttgatctccatagttgtccgaagactattgtgtttattatccattcctttttgagcgccaaagtcacacggcttggcttgctcgcctag

SEQ ID NO: 135142 - DNA, 1518 bp, Artificial Sequence
  derived and/or modified sequence
atggccagcggcagaagagcccccagaaccggcctgctggagctgagagccggcgccggcagcggcgccggcggcgagagatggcagagagtgctgctgagcctggccgaggacgtgctgaccgtgagccccgccgacggcgaccccggccccgagcccggcgcccccagagagcaggagcccgcccagctgaacggcgccgccgagcccggcgccggccccccccagctgcccgaggccctgctgctgcagagaagaagagtgaccgtgagaaaggccgacgccggcggcctgggcatcagcatcaagggcggcagagagaacaagatgcccatcctgatcagcaagatcttcaagggcctggccgccgaccagaccgaggccctgttcgtgggcgacgccatcctgagcgtgaacggcgaggacctgagcagcgccacccacgacgaggccgtgcaggtgctgaagaagaccggcaaggaggtggtgctggaggtgaagtacatgaaggacgtgagcccctacttcaagaacagcaccggcggcaccagcgtgggctgggacagcccccccgccagccccctgcagagacagcccagcagccccggccccacccccagaaacttcagcgaggccaagcacatgagcctgaagatggcctacgtgagcaagagatgcacccccaacgaccccgagcccagatacctggagatctgcagcgccgacggccaggacaccctgttcctgagagccaaggacgaggccagcgccagaagctgggccaccgccatccaggcccaggtgaacaccctgacccccagagtgaaggacgagctgcaggccctgctggccgccaccagcaccgccggcagccaggacatcaagcagatcggctggctgaccgagcagctgcccagcggcggcaccgcccccaccctggccctgctgaccgagaaggagctgctgctgtacctgagcctgcccgagaccagagaggccctgagcagacccgccagaaccgcccccctgatcgccaccagactggtgcacagcggccccagcaagggcagcgtgccctacgacgccgagctgagcttcgccctgagaaccggcaccagacacggcgtggacacccacctgttcagcgtggagagcccccaggagctggccgcctggaccagacagctggtggacggctgccacagagccgccgagggcgtgcaggaggtgagcaccgcctgcacctggaacggcagaccctgcagcctgagcgtgcacatcgacaagggcttcaccctgtgggccgccgagcccggcgccgccagagccgtgctgctgagacagcccttcgagaagctgcagatgagcagcgacgacggcgccagcctgctgttcctggacttcggcggcgccgagggcgagatccagctggacctgcacagctgccccaagaccatcgtgttcatcatccacagcttcctgagcgccaaggtgaccagactgggcctgctggcctag

SEQ ID NO: 135143 - protein, 474 aa, Artificial Sequence
  derived and/or modified sequence
MASGGGGCSASERLPPPFPGLEPESEGAAGGSEPEAGDSDTEGEDIFTGAAVVSKHQSPKITTSLLPINNGSKENGIHEEQDQEPQDLFADATVELSLDSTQNNQKKVLAKTLISLPPQEATNSSKPQPTYEELEEEEQEDQFDLTVGITDPEKIGDGMNAYVAYKVTTQTSLPLFRSKQFAVKRRFSDFLGLYEKLSEKHSQNGFIVPPPPEKSLIGMTKVKVGKEDSSSAEFLEKRRAALERYLQRIVNHPTMLQDPDVREFLEKEELPRAVGTQTLSGAGLLKMFNKATDAVSKMTIKMNESDIWFEEKLQEVECEEQRLRKLHAVVETLVNHRKELALNTAQFAKSLAMLGSSEDNTALSRALSQLAEVEEKIEQLHQEQANNDFFLLAELLSDYIRLLAIVRWESRVTQYERDFERISTVVRKEVIRFEKEKSKDFKNHVIKYLETLLYSQQQLAKYWEAFLPEAKAIS

SEQ ID NO: 135144 - protein, 522 aa, Artificial Sequence
  derived and/or modified sequence
MASGGGGCSASERLPPPFPGLEPESEGAAGGSEPEAGDSDTEGEDIFTGAAVVSKHQSPKITTSLLPINNGSKENGIHEEQDQEPQDLFADATVELSLDSTQNNQKKVLAKTLISLPPQEATNSSKPQPTYEELEEEEQEDQFDLTVGITDPEKIGDGMNAYVAYKVTTQTSLPLFRSKQFAVKRRFSDFLGLYEKLSEKHSQNGFIVPPPPEKSLIGMTKVKVGKEDSSSAEFLEKRRAALERYLQRIVNHPTMLQDPDVREFLEKEELPRAVGTQTLSGAGLLKMFNKATDAVSKMTIKMNESDIWFEEKLQEVECEEQRLRKLHAVVETLVNHRKELALNTAQFAKSLAMLGSSEDNTALSRALSQLAEVEEKIEQLHQEQANNDFFLLAELLSDYIRLLAIVRAAFDQRMKTWQRWQDAQATLQKKREAEARLLWANKPDKLQQAKDEILEWESRVTQYERDFERISTVVRKEVIRFEKEKSKDFKNHVIKYLETLLYSQQQLAKYWEAFLPEAKAIS

SEQ ID NO: 135145 - DNA, 1425 bp, Artificial Sequence
  derived and/or modified sequence
atggccagcggcggcggcggctgcagcgccagcgagagactgcccccccccttccccggcctggagcccgagagcgagggcgccgccggcggcagcgagcccgaggccggcgacagcgacaccgagggcgaggacatcttcaccggcgccgccgtggtgagcaagcaccagagccccaagatcaccaccagcctgctgcccatcaacaacggcagcaaggagaacggcatccacgaggagcaggaccaggagccccaggacctgttcgccgacgccaccgtggagctgagcctggacagcacccagaacaaccagaagaaggtgctggccaagaccctgatcagcctgcccccccaggaggccaccaacagcagcaagccccagcccacctacgaggagctggaggaggaggagcaggaggaccagttcgacctgaccgtgggcatcaccgaccccgagaagatcggcgacggcatgaacgcctacgtggcctacaaggtgaccacccagaccagcctgcccctgttcagaagcaagcagttcgccgtgaagagaagattcagcgacttcctgggcctgtacgagaagctgagcgagaagcacagccagaacggcttcatcgtgccccccccccccgagaagagcctgatcggcatgaccaaggtgaaggtgggcaaggaggacagcagcagcgccgagttcctggagaagagaagagccgccctggagagatacctgcagagaatcgtgaaccaccccaccatgctgcaggaccccgacgtgagagagttcctggagaaggaggagctgcccagagccgtgggcacccagaccctgagcggcgccggcctgctgaagatgttcaacaaggccaccgacgccgtgagcaagatgaccatcaagatgaacgagagcgacatctggttcgaggagaagctgcaggaggtggagtgcgaggagcagagactgagaaagctgcacgccgtggtggagaccctggtgaaccacagaaaggagctggccctgaacaccgcccagttcgccaagagcctggccatgctgggcagcagcgaggacaacaccgccctgagcagagccctgagccagctggccgaggtggaggagaagatcgagcagctgcaccaggagcaggccaacaacgacttcttcctgctggccgagctgctgagcgactacatcagactgctggccatcgtgagatgggagagcagagtgacccagtacgagagagacttcgagagaatcagcaccgtggtgagaaaggaggtgatcagattcgagaaggagaagagcaaggacttcaagaaccacgtgatcaagtacctggagaccctgctgtacagccagcagcagctggccaagtactgggaggccttcctgcccgaggccaaggccatcagctag

SEQ ID NO: 135146 - DNA, 1569 bp, Artificial Sequence
  derived and/or modified sequence
atggccagcggcggcggcggctgcagcgccagcgagagactgcccccccccttccccggcctggagcccgagagcgagggcgccgccggcggcagcgagcccgaggccggcgacagcgacaccgagggcgaggacatcttcaccggcgccgccgtggtgagcaagcaccagagccccaagatcaccaccagcctgctgcccatcaacaacggcagcaaggagaacggcatccacgaggagcaggaccaggagccccaggacctgttcgccgacgccaccgtggagctgagcctggacagcacccagaacaaccagaagaaggtgctggccaagaccctgatcagcctgcccccccaggaggccaccaacagcagcaagccccagcccacctacgaggagctggaggaggaggagcaggaggaccagttcgacctgaccgtgggcatcaccgaccccgagaagatcggcgacggcatgaacgcctacgtggcctacaaggtgaccacccagaccagcctgcccctgttcagaagcaagcagttcgccgtgaagagaagattcagcgacttcctgggcctgtacgagaagctgagcgagaagcacagccagaacggcttcatcgtgccccccccccccgagaagagcctgatcggcatgaccaaggtgaaggtgggcaaggaggacagcagcagcgccgagttcctggagaagagaagagccgccctggagagatacctgcagagaatcgtgaaccaccccaccatgctgcaggaccccgacgtgagagagttcctggagaaggaggagctgcccagagccgtgggcacccagaccctgagcggcgccggcctgctgaagatgttcaacaaggccaccgacgccgtgagcaagatgaccatcaagatgaacgagagcgacatctggttcgaggagaagctgcaggaggtggagtgcgaggagcagagactgagaaagctgcacgccgtggtggagaccctggtgaaccacagaaaggagctggccctgaacaccgcccagttcgccaagagcctggccatgctgggcagcagcgaggacaacaccgccctgagcagagccctgagccagctggccgaggtggaggagaagatcgagcagctgcaccaggagcaggccaacaacgacttcttcctgctggccgagctgctgagcgactacatcagactgctggccatcgtgagagccgccttcgaccagagaatgaagacctggcagagatggcaggacgcccaggccaccctgcagaagaagagagaggccgaggccagactgctgtgggccaacaagcccgacaagctgcagcaggccaaggacgagatcctggagtgggagagcagagtgacccagtacgagagagacttcgagagaatcagcaccgtggtgagaaaggaggtgatcagattcgagaaggagaagagcaaggacttcaagaaccacgtgatcaagtacctggagaccctgctgtacagccagcagcagctggccaagtactgggaggccttcctgcccgaggccaaggccatcagctag

SEQ ID NO: 135147 - DNA, 1425 bp, Artificial Sequence
  derived and/or modified sequence
atggcctctgggggagggggatgcagcgcaagcgagagattaccccctcccttccccggcttggagccggaatccgagggtgcggcaggtgggtccgagccagaggccggcgacagcgataccgaaggcgaagatatcttcacaggagccgccgtggtgtctaagcaccagagccccaaaattactacttcactcctccctataaacaatggtagtaaagagaatggaatccacgaggagcaagatcaagaacctcaggatctcttcgccgacgccaccgtggaactcagcctcgactccactcagaataaccagaaaaaggtgctggccaaaaccctcatctctctacccccacaggaagccaccaactcttctaaaccacaaccaacatacgaagagctggaagaggaggaacaggaggatcagttcgatctcactgtaggaatcaccgatccagaaaagattggcgacggtatgaacgcttacgttgcctataaagtcactacccaaacatccctccctctgttcagatctaaacagtttgctgtcaagcggcgcttttctgattttctgggtctttacgagaaactgagcgaaaagcactcgcaaaatggtttcattgttcctcccccacctgagaagtccctgattggcatgaccaaagtcaaggtagggaaggaggattcctcttctgctgagtttctcgagaaacggcgggcggccctcgaaagatacctgcagaggattgtgaatcacccgacgatgttgcaggatcctgacgtacgggagttcctggagaaagaggagctgccaagagccgtggggacacagactttgtccggagctgggctgctgaaaatgtttaacaaggcgaccgacgcagtgagcaagatgaccatcaagatgaacgagtcagacatttggtttgaggaaaaactgcaggaagtggagtgcgaggagcagcgcctccgtaaactgcatgctgttgtggaaaccctcgtcaatcaccggaaggaattagccctgaatacagctcaattcgcgaaaagtttggctatgttgggcagctcagaagacaatacagcactaagcagagccctatcccagttggctgaagtcgaagagaagatcgaacaattacaccaggaacaagcaaacaacgacttttttcttctcgcggagctgttgtctgactacatccggctcttggcaatcgtgaggtgggagtcgcgggttacacagtacgagcgagattttgagcggatctctaccgtcgtgagaaaggaagtcattaggttcgagaaggaaaagtcaaaagatttcaagaatcacgtaattaaatatctggaaacgctactttactcccaacagcagctcgcgaaatattgggaggcctttctccctgaagcaaaggctatctcttag

SEQ ID NO: 135148 - DNA, 1569 bp, Artificial Sequence
  derived and/or modified sequence
atggcaagcggaggaggcgggtgtagcgcttctgagcggcttcctccgcctttccctggactggagcctgagagtgagggggccgctggtggaagtgaaccagaagccggagattccgacactgaaggggaagatatctttacaggcgctgcagttgtttcgaaacaccagagccctaagattacgacctccctcctgccaattaataatgggtccaaggagaacggcattcatgaggaacaggaccaggaaccccaagacctattcgctgacgcaaccgtggaactgtctctggattcgacacagaataatcagaagaaggtcctggcaaagaccctgatctctctaccgcctcaggaagcgacaaactcttccaaaccacagccaacatatgaggagctcgaggaggaggagcaagaagatcagttcgacctgacagtcgggatcacggatcccgagaagattggagatggcatgaatgcttacgtggcatataaagtcacaacgcaaacatccttacccctattccgcagcaagcagtttgcagtaaagcgccggttctctgactttctggggttgtatgaaaaactaagtgagaagcactctcagaacggcttcatagttcctcctccaccggaaaagtcattgatcggcatgaccaaagtgaaagtcgggaaagaagacagcagcagcgctgagttcctagagaagcggcgcgctgccctggaacgatatctgcagcggatcgtgaaccacccaaccatgttgcaggaccctgatgtgagggagttccttgaaaaagaggaattgccgagagccgtgggcactcaaacattgtctggagctggcctcctaaagatgtttaataaagccactgatgcagtttctaaaatgacaataaaaatgaatgagtcagatatctggttcgaggaaaaactacaggaggtagaatgtgaagagcagcgcctgcgcaaacttcacgctgttgtcgagacactggtgaaccaccgcaaggagctcgccctaaacactgcccagttcgccaagagcctcgccatgctgggatcctcagaggacaacacagcactgtcgcgcgccctgagccaactggctgaggttgaagaaaagatcgagcagctgcaccaagaacaagcaaacaatgattttttcctgctggccgagctcctgtctgactacatacggctacttgctattgtgagggccgccttcgaccagcgtatgaagacatggcagcgctggcaggacgcacaggccaccttgcagaagaagcgggaagctgaggctaggctgctatgggccaataaaccagataagctgcaacaggccaaagatgagattcttgaatgggagagcagggtgactcagtatgagagagatttcgagcgtatctccactgtcgtgagaaaagaagtcatcaggttcgaaaaagagaaatctaaggactttaagaaccacgtcataaagtacctggaaactcttctttactcacaacagcagctggccaaatactgggaagctttcctgcccgaagcaaaagccataagctag

SEQ ID NO: 135149 - DNA, 1425 bp, Artificial Sequence
  derived and/or modified sequence
atggccagcggcggcggcggctgcagcgccagcgagcggctgcccccacccttccctggcctggagcctgagagcgagggcgctgctgggggcagcgagcctgaggccggggacagcgacacagaaggagaggacatcttcaccggggctgctgtggtgtccaagcaccagagccccaagatcaccaccagcctgctgcccatcaacaacggcagcaaagaaaatggcatccacgaggagcaggaccaggagccccaggacctgtttgctgatgccaccgtggagctgagcctggacagcacccagaacaaccagaagaaggtgctggccaagaccctcatcagcctgcccccccaggaggccaccaacagcagcaagccccagcccacctatgaggagctggaggaggaggagcaggaggaccagtttgacctgactgtgggcatcacagatcctgagaagattggagatggcatgaatgcctacgtggcctacaaggtgaccacccagaccagcctgcccctcttccgcagcaagcagtttgctgtgaagaggcgcttcagtgacttcctgggcctgtatgagaagctgtctgagaagcacagccagaatggcttcatcgtgcccccacctcctgagaagagcctgattggcatgaccaaggtgaaggtgggcaaggaggacagcagcagcgctgagttcctggagaagaggcgggccgccctggagcgctacctgcagagaattgtgaaccaccccaccatgctgcaggaccctgatgtgcgggagttcctggagaaggaggagctgcccagggctgtgggcacccagaccctgagcggggccggcctgctgaagatgttcaacaaggccacagatgctgtgtccaagatgaccatcaagatgaatgaaagtgacatctggtttgaggagaagctgcaggaggtggagtgtgaggagcagaggctgaggaagctgcatgctgtggtggagaccctggtgaaccacaggaaggagctggccctgaacacagcccagtttgccaagagcctggccatgctgggcagcagcgaggacaacacagccctgagccgggccctgagccagctggccgaggtggaggagaagattgagcagctgcaccaggagcaggccaacaatgacttcttcctgctggccgagctgctgagtgactacatccggctgctggccatcgtgcgctgggagagccgggtgacccagtatgagcgggactttgagcgcatcagcacagtggtgaggaaggaggtgatccgctttgagaaggagaagagcaaggacttcaagaaccacgtgatcaagtacctggagaccctgctgtacagccagcagcagctggccaagtactgggaggccttcctgcctgaggccaaggccatctcctag

SEQ ID NO: 135150 - DNA, 1569 bp, Artificial Sequence
  derived and/or modified sequence
atggccagcggcggcggcggctgcagcgccagcgagcggctgcccccacccttccctggcctggagcctgagagcgagggcgctgctgggggcagcgagcctgaggccggggacagcgacacagaaggagaggacatcttcaccggggctgctgtggtgtccaagcaccagagccccaagatcaccaccagcctgctgcccatcaacaacggcagcaaagaaaatggcatccacgaggagcaggaccaggagccccaggacctgtttgctgatgccaccgtggagctgagcctggacagcacccagaacaaccagaagaaggtgctggccaagaccctcatcagcctgcccccccaggaggccaccaacagcagcaagccccagcccacctatgaggagctggaggaggaggagcaggaggaccagtttgacctgactgtgggcatcacagatcctgagaagattggagatggcatgaatgcctacgtggcctacaaggtgaccacccagaccagcctgcccctcttccgcagcaagcagtttgctgtgaagaggcgcttcagtgacttcctgggcctgtatgagaagctgtctgagaagcacagccagaatggcttcatcgtgcccccacctcctgagaagagcctgattggcatgaccaaggtgaaggtgggcaaggaggacagcagcagcgctgagttcctggagaagaggcgggccgccctggagcgctacctgcagagaattgtgaaccaccccaccatgctgcaggaccctgatgtgcgggagttcctggagaaggaggagctgcccagggctgtgggcacccagaccctgagcggggccggcctgctgaagatgttcaacaaggccacagatgctgtgtccaagatgaccatcaagatgaatgaaagtgacatctggtttgaggagaagctgcaggaggtggagtgtgaggagcagaggctgaggaagctgcatgctgtggtggagaccctggtgaaccacaggaaggagctggccctgaacacagcccagtttgccaagagcctggccatgctgggcagcagcgaggacaacacagccctgagccgggccctgagccagctggccgaggtggaggagaagattgagcagctgcaccaggagcaggccaacaatgacttcttcctgctggccgagctgctgagtgactacatccggctgctggccatcgtgcgggccgcctttgaccagaggatgaagacctggcagcgctggcaggatgcccaggccaccctgcagaagaagcgggaggccgaggcccggctgctgtgggccaacaagccagacaagctgcagcaggccaaggatgagatcctggagtgggagagccgggtgacccagtatgagcgggactttgagcgcatcagcacagtggtgaggaaggaggtgatccgctttgagaaggagaagagcaaggacttcaagaaccacgtgatcaagtacctggagaccctgctgtacagccagcagcagctggccaagtactgggaggccttcctgcctgaggccaaggccatctcctag

SEQ ID NO: 135151 - DNA, 1425 bp, Artificial Sequence
  derived and/or modified sequence
atggccagcggcggcggcggctgcagcgccagcgagcggctgccccccccctttccgggtctggagccagaatcagaaggcgctgctgggggcagtgaacccgaggcaggggatagcgacaccgaaggtgaggacattttcactggagctgcagtcgttagcaagcatcagtcccccaagatcacaacgtctttattacctatcaacaatggcagtaaggagaacggaatacacgaggagcaagatcaggagcctcaggatcttttcgctgacgcgaccgtggaactgagtctggacagtacccagaacaaccaaaaaaaagtcctggcaaaaacccttatcagcctcccaccacaagaagcgaccaactcttcaaagccacagcctacctacgaagagctggaagaagaggaacaggaagatcagtttgacctgactgtggggatcaccgatcctgagaagatcggggacggaatgaatgcctacgtggcctacaaagtgaccacacagacttctctgcccttattccggtcgaaacagtttgccgttaaacggcggttttccgacttcctgggcctgtatgagaaactctctgagaaacattctcagaatgggtttatcgtccctcccccgcccgagaagagcttgatcggaatgaccaaagtgaaggtcgggaaggaagatagtagctcagccgaattcctagaaaagcgaagggcagctctagaaagatacctccagcgcattgttaaccatcctaccatgctgcaggaccccgacgtgcgcgagttcctggaaaaggaagagctcccccgcgccgtgggtacccagactctgtcgggagctggcttgctgaagatgttcaacaaggcaactgatgctgtctccaagatgaccattaaaatgaatgagtcggatatatggtttgaggagaagctgcaggaggtcgaatgtgaagagcagcgcctgagaaagcttcacgccgtggtggaaacgctggtgaatcatcgcaaagaattggctctgaataccgctcagttcgctaaatcactggccatgcttggaagtagcgaagacaatacagcactttcacgtgccctcagccaactggccgaagtcgaggaaaaaatcgaacagctgcatcaggaacaggcaaacaatgacttcttccttctcgctgagctgttgtcagactacatccgtctccttgccattgtgaggtgggagagtagagtgacacagtatgagagagactttgaaaggatttcaaccgtggttcgcaaagaagtaatccgattcgagaaggagaagagcaaggacttcaagaatcacgtgatcaaatacctggagacactcctctattcacaacagcagttggctaaatattgggaggctttccttcccgaagcaaaagccatttcctag

SEQ ID NO: 135152 - DNA, 1569 bp, Artificial Sequence
  derived and/or modified sequence
atggccagcggcggcggcggctgcagcgccagcgagcggctgccccccccctttcctggcctggaacccgagtccgaaggagccgcaggcgggagcgagccagaggcgggggatagcgacacagaaggcgaggacattttcacgggggcagcggtcgtgtctaagcaccagagccccaaaataacaacatccctgctcccaatcaataacggttcaaaggaaaacggcatccatgaggagcaggatcaggaaccacaagatttatttgcggacgccaccgtagaactctctctggacagcacacagaacaaccagaagaaagttctcgcaaaaacccttatcagtctccccccgcaggaagccactaattcttcaaaaccccagcccacgtacgaggaacttgaagaagaagagcaggaggatcagttcgatcttacagtgggaattacggatcctgaaaagattggtgatgggatgaatgcatacgtggcatacaaggttaccactcagacctcattgcccctattccgatctaaacagttcgctgtcaagcgcagattctctgattttttgggcctgtacgagaaactttcggagaagcactcccagaatggctttattgtccccccccctccagaaaaatccttgatcgggatgaccaaggttaaggttgggaaagaggactctagttcagcggagtttttggagaagagacgcgctgcactagagaggtacctgcagcgcatagtcaatcatcctactatgctgcaggaccctgacgtccgcgagtttctggagaaggaggaactacccagagccgtaggaacccaaaccctttcaggagccggtttgctgaagatgttcaacaaggcaacagacgccgtttccaaaatgactattaaaatgaatgagtccgacatctggtttgaggaaaagctccaggaggtagagtgcgaggagcagagactgcgaaaacttcatgcagttgtggaaaccctggttaatcatcggaaagaactcgccctgaacacggctcagtttgcaaaaagcctggcgatgctggggtcatcagaagacaataccgcactcagccgcgccctgtcccaactcgccgaggttgaggagaagatcgagcaacttcatcaggaacaagccaacaacgacttcttcctgttagcagagctgttgtctgattacatccgcctgctggcaattgtgcgagcagcttttgaccagcggatgaagacctggcagcgctggcaggacgcccaggccacactgcagaaaaaaagggaagcggaggctcgcctcttgtgggccaataaaccagataaattgcagcaggctaaggatgagatcctcgaatgggaatctcgcgtaacacaatacgagcgcgactttgagagaattagcaccgtggttcgtaaggaggttatacggttcgagaaagaaaagtccaaggatttcaagaaccacgtcatcaaatatctggagacattactctactcacaacagcagctggctaagtattgggaagcatttctgcctgaggcaaaggccatttcctag

SEQ ID NO: 135153 - DNA, 1425 bp, Artificial Sequence
  derived and/or modified sequence
atggccagcggaggaggtggctgctctgcttcagagagactgcctcccccttttccaggccttgagcctgagagcgaaggtgctgcaggcggttcagagcccgaggctggggactcagacactgaaggcgaagacatcttcaccggcgctgccgtggtctccaaacaccagtctcccaagataactacttcactgctgccaattaacaacggatccaaggagaacggaatccacgaagagcaggaccaggaaccgcaggatttgtttgcagacgctacagtggagctgagtttggattctacccagaacaaccagaaaaaagtgctggccaaaaccttgatcagcttgcctcctcaagaggcgactaactcatccaagccgcaacccacatacgaggagctggaggaagaagagcaggaagaccaatttgatctcacagttggcatcacggatccagagaaaatcggagatggtatgaacgcatacgttgcctacaaggtgaccacacagaccagcctcccactgttcagatccaagcagtttgctgtgaagcgaagattcagcgatttcctgggactctacgaaaagctgtcggagaaacatagccagaacggcttcatagttccccctccccctgagaagagcttgattggcatgactaaagtgaaggttggtaaagaggatagttcatctgcagagttcttagagaagagaagagccgctcttgagcggtatctccagcggattgttaatcatcctacaatgttacaggacccagatgtacgggagttcctggagaaggaagaactcccgagggctgtcggtacccagacactgagcggggctggactgttgaaaatgtttaataaggccactgatgcggtctccaaaatgacaattaagatgaacgagtcagacatctggttcgaggaaaagcttcaagaagtcgagtgcgaagaacaaagactgagaaagcttcatgctgtagtggagacgttggtaaaccacaggaaagagctggccttgaatacagcacagttcgccaagagtctggctatgctaggctctagcgaggataatacagcgctgagtcgggctcttagtcagcttgccgaagtggaagaaaagatagagcagttacatcaggagcaggccaataatgatttctttctgctggccgagcttttgtccgattatatacggttactggccattgtgcgttgggagtcccgggtcacccaatacgaaagagacttcgagagaatttccacagtcgttagaaaggaggtgatccggttcgagaaagaaaagtctaaggacttcaagaaccacgtgattaaatatctcgagaccctgctgtattcgcagcagcagcttgccaagtattgggaggcttttcttccagaggctaaggccatttcctag

SEQ ID NO: 135154 - DNA, 1569 bp, Artificial Sequence
  derived and/or modified sequence
atggcttccgggggaggaggctgctctgcatccgagcgccttcccccaccattccctggcctggagcctgagtctgaaggagccgctggcggaagtgagcccgaggctggagattccgacacggaaggggaggatatctttacgggtgccgcagtggtgagcaaacaccaatccccaaagattactaccagcctgctgcctattaataatgggtccaaggaaaatggtatacacgaagaacaggatcaggaaccacaggatctgtttgcggatgctaccgtggagctgtcactcgactccacacagaacaaccagaagaaagtgcttgccaaaacacttatttctctgccacctcaggaagccacgaacagcagcaagcctcaacccacctacgaagaattagaagaggaggagcaggaggaccagttcgatttgacagtcgggattaccgacccagagaaaatcggagacggaatgaatgcctatgtggcttacaaggtgacaacgcagacctccctgcctctctttaggtcaaagcagttcgcagtcaagagacgcttttccgactttctggggctgtacgaaaagctctctgagaagcactcccaaaacggattcatcgtgcccccacccccagagaaatccctcatcgggatgacaaaagtaaaggtaggaaaggaggattcttcttcggctgagttcctcgaaaagcggcgagctgccttggaacgatatttgcaacgcatcgtcaatcaccccactatgctacaggaccctgatgtgcgtgaattcctcgaaaaggaggagctgcctcgggctgtggggacccaaacgctgtccggggctggtctgttgaaaatgtttaacaaagcaacagatgccgtaagcaagatgacaattaaaatgaacgagagcgacatatggtttgaggaaaagctccaagaggtggagtgcgaggagcagcgcctgcgtaaactgcacgcagtggtggagactttagtgaatcacaggaaggagttagcactgaataccgcacagttcgctaagtcgctggccatgttgggtagctccgaagataatacagccctgagcagggcactgagccaacttgctgaggtggaggagaagattgaacaactacatcaggaacaggcgaacaatgacttctttctcttagccgagctcttaagcgattacatcaggctgcttgccatcgtgagagccgcatttgaccagcgcatgaaaacctggcagaggtggcaggatgcccaggctactcttcagaagaagcgcgaggccgaagccagactgttatgggcaaacaagccagataagttgcaacaagcgaaggacgagatattggaatgggagtcccgtgtcacgcagtacgagcgcgatttcgagcgcatctcaacggttgtccggaaagaagtcatacgctttgagaaagagaagtctaaggatttcaaaaatcatgtcattaagtacctagaaacactactgtatagtcaacaacagctggccaaatactgggaggccttcttgcctgaagcaaaggccatatcttag

SEQ ID NO: 135155 - DNA, 8077 bp, Artificial Sequence
  derived and/or modified sequence
agttgttgttgcggcttccgccgcgggtggaagaagatggcgtcgggtggtggtggctgtagcgcttcggagagactgcctccgcccttccccggcctggagccggagtccgagggggcggccgggggatcagaacccgaggctggggacagcgacaccgagggggaggacattttcaccggcgccgcggtggtcagtaaacatcagtctccaaagataactacatcccttcttcccatcaacaatggctccaaagaaaatgggatccatgaagaacaagaccaagagccacaggatctctttgcagatgccacagtggagctatccttggacagcacacaaaataatcagaagaaggtgctagccaaaacactcatttctcttcctcctcaggaagccacaaattcttcgaagccccagccaacctatgaggagctagaggaagaagaacaggaggatcaatttgatttgacagtcggtataactgatcctgagaagataggggatggtatgaatgcatatgtagcctacaaagttacaacacagacaagcttaccattgttcagaagcaaacagtttgcagtaaaaagaagatttagtgactttctgggtctttatgagaagctttccgagaagcactctcagaatggcttcattgtccctccgcccccggagaagagcctcatagggatgacaaaagtgaaagttgggaaggaagattcttcttctgcagaatttcttgaaaaacggagggccgctttagaaaggtaccttcagaggattgtaaatcatcctaccatgttacaggaccctgacgtcagagagttcttggaaaaagaagagctgccacgtgccgtgggtacccagacattgagtggtgctggtctcctcaagatgttcaacaaagccacagatgccgtcagcaaaatgaccatcaagatgaatgaatcagacatttggtttgaggagaagctccaggaggtagagtgtgaggagcagcgcttacggaaactgcatgctgttgtagaaactctagtcaaccataggaaagagctagcgctgaacacagcccagtttgcaaagagtctagccatgcttgggagctctgaggacaacacggcattgtcacgggcactctcccagctggctgaggtggaagaaaaaattgagcagctccaccaggaacaggccaacaatgacttcttcctccttgctgagctcctgagtgactacattcgcctcctggccatagtccgctgggagtctcgggtgactcaatatgaaagggacttcgagaggatttcaacagtggtccgaaaagaagtgatacggtttgagaaagagaaatccaaggacttcaagaaccacgtgatcaagtaccttgagacactcctttactcacagcagcagctggcaaagtactgggaagccttccttcctgaggcaaaggccatctcctaatggaccaaggaccccagagcccacctgtgtgacgctgcctttttatacactgtcctcctccaccttgatggacccctagtgatgcatcctgcctaggctggacttaaccccttcctccctgtccccacgaccaactgtccccagttactctaaccgttatttcatttagcttccatatatattttcttacctaagagaatagtttcctgctttaagcaaaagacctacaataggtggtggaattatgggatggggtggagtattgatataaatatataaatacaaatgtatatttttcaggatgtggtttaggaactgggaataacgttttctgttactcctgatggtgccatgaaaaggttatgtaataaaatattttaaaatcaggtcacatgactcagaatgttggtggtttttgcttaggctggggagcagttgggaatcaggtctggaatactcctaaccaagaagttgcccaggtatagtaagtttttctctaccgttcacaagttttgtgctgctgcttccctctggaaatggggtttctttctctccgcctacctcagctacctgttctgagggtctcaatctgtttcgtattcccacttctttagggaaggagttttaaaaacatctcttaaaataagaggagcaaaatctattaaaacctattctcctgcaaaggaggcagagactttctctctctcttttttttttttttttggtgtccctatcattaagcaagagcctttctcttttattcttcctgcttccctaagctgctcagggttctctgagtcttgccctctgatggcaagtcttatatataactaaacctatttttgtcacccatcaaaacacatcctcagtagactgtgtgaaggtgtgaaggtctgataatgacttgatgctttgtctccatagacatgaaagccatgccctctgcctctagatagggtgatccaagagctcctgaaccttaggaggttcaaagaagctctactgtctgtgcccaggaggtagcctgccagcaagagccctcaggagttgcacacacagccaaagggtgttcacacagatctctgccggtctagccaggggaggccagagtctcgtcagtcaaggatgggcttcccccttagctgtgtccacagctgctcaagctatactggtcagagtgggctttgaagctcctttgtgagctcgagctgctgactgccactatgggagccttgccacctccagcccctccatcccaaagacgctcctgccactggggccccaggtcctgctgtatcagttctctttggtggggggctaaggtttggggcgaggcaacctgagacaagaaaacgcagtaaacattctgattccctgtacacagatgcagcaccaggggaagggccagtggtgcaagtatttctttttaacaggtgaagtttttggaaaaagtcactctccctacccctcagtatccttaccatcaactttggttttatccttccagtctttattatatgcttgcttttacatagttgtaataatatacacataaagtattttgtatcctgcttttatcattcaacattgtacatgttataagcattttactatattgttatatatcttcacaaagttgatctgtaaagctgtgtaatttgaaggcatccatagggtgactgtaccataattttgattcatcccttgttgttggattcttggtcaggggttgtttgttttgttttattggtaactttaaaattttgaatacaatttcagatttacagaaaagttgcaggaatatcacaaagaactcctatatatcttttatccagatttactgagtgtttacattttatcccatttgccttatctatatttcatgttgcattttcttaatcatttgagaataatttgcacagataccccattatgcccaaaacagtatgcatttccctaagaacaggacattctcttctaagagaagaagagaattactttaagcattattcagtatttttttaagtattattatcaaaatcaggaagtttaacagtgatttaatactgttatctaacccatgattcatatttaaattttgccatttatcccaataatgtcctttgtagccattcttttaccttgtgcaggatcatgttacatttgtaaacgtgtgtctctcaatactgcagattcctcaactttcttttgtctttcattaccatgacatttttgaagaatacaggctattttgtcgaatgttcctcagtttggatttgtgtgatggttccgcatgactaggtgagggttttgcattctgggtgggaatatcacagaagcagtgtgtcgtcagtgcgtcgtaatcagcatataatgtcagttggtcccattaatgttgttaactctgttcaccgcttaggttggtgtctgccagatttcattttaaatttacgatttcctctttgtaatttacaagtaatttgtggggagatactttgagactatataagtattttgttcctcattcaccagttatatagtatcagttgattagtcttgtcccagttattactgtcatgattgaccaacatgatttcctaactccataatgccttctacatttattggttgacattctacatacaaagaaaaacatcctttctcaccatttatttattcacttgtttatcaatatggatgcagggattcctgttttactcagagttgcaagccattgctttgattttatcttgattctcaaattgtcccagatttatagcggcctcttgtgtgtttgtagcttgctcccatcatgttttgagtactttcttaccttctggcataacaagatgttccaggctcatcttgaatgttccctaccctagccctggaatcagccatttctccagggagtcttggttccttataatggagaatggtatttatttatttttatttgatttgattattattactatttttgagacagagtctcgctcttgtcgcccaggctggattgcaatggcacaatctcagctcactgcaacctccacctaccaggttcaagcaattctcctgcctcagccttccaagtagctgggattacaggtgcctgcccccacacccagctaatttttgcatttttggtagaaatgggggttttaccatgttggggaggctggtctcgaactcctgacctcaggtgatctgcccacctcaacctcccaaagtgctgggattacaggtgtgagccaccatacccagccagagaatgttatttagaaaccaagatctgggtgccaaatgtgctgcttgttactggaatgtcattgcctctaggctctcaccatacagtgcaaagagatgatagatagatagatagatagatagatagatagatagatagatgatagatatagatagatagatagattgattgatttgtagaaacaagataggttagagatacctgacataaatagatactaaaaatcatgaattcacactgatgctttgagaccagccctgtaggtttattccagtctgcccccttttccatgttgttaactctttcctccagagagacaaagatttcaggttgctttgttaagttccatctaatgatcattctgacgtaagtctgtttttcttatttccttggaatgatgtctcctctggtttcagaacttcctcctctgcttcctgtatcctgaggctggcggggccagttgtctttagggcttgtgcatttttgtaaagagcttgcacgtgtggaaatcaagtaggccagtagtgggttaggggtactgagccagaagcctctacaaggaataacaggagcacaaaggaagaaggtggtattccagctggggacccaggagggaggactttgtggagaacctgatgcttgaactgagtctaaaaggtgtaaaagtgtttgttgcttctgcctccctgtctgtctggcagggtgaggtaggcgcatctagggaaatgtcaagtggcttggtgtagggtaaagtcagtgaggcccatggagaaaaacgagcaggagccacatcacatgggtgtctgataggacctgggaggcgctttccacattaccattgtcgcttcgtgatctggacacaccagaaggcgtgagactggaggcaggaagagcagccaggcttatccctaccctcaggagagctgaaaagggcaggtatggtggggccagagctcaggagagtttcggaaccactgagatcggtccttgatttgatgagaggcttgaggggagagggaggtagctaggatgccccgcaagcttctggcccagacactgggcagacaatgaaaccctttgtaacacatgaggcaataggtttggggcagatgggaggggaagcagtggtgggggcagtgagtgctgaaggtgttttaagaagcggctctgggccaggcacagtggcttatgcctgtattcctagcattttgggaggccgaggtgggagaatcacttgagcccaagaatttgagaccagcctggggaatatagtgagaccctgtccctacaaaaataaaaacaactagctgggtgtgtggtggtgcatgcctgtaggcccagctacgcgggaacatcacctgagcccaggaggttgaggttgcagtgagctacagttgcgccactgcactccagcctaggtgacagagcaagatcttgtctcaaaaaaaaaagcagctctggatgggaagggaggccagttgctttaagtaggggagatagagttaaaggaggctttgttttatttaaaggtgggacaaacttaagcatgttaataaaattcagagaagagaaagagaatgactatcagagccatgtttggaagaaaatggggtccagagcacaggaaggggacctgtgttcagagggtgcctcactgctgaggccacaggaaagaatctgtaggtggaggggaggccgaagaggggaagtttcatgcttgataattaaaattttctgagataggaatgtcatatttacctatttaagccaagtttttttagataaaaggtatggaacctgctttccccttggctagttcagcgtttgggctccggagtgctgaagatgaggactggacttcgagctggtgtgatcccagtattcagtgtcagtactcagtgacaaaataaatgagagaaacgggaataagaattgtcgcctacacaaaaataccagcaactgttaactcttcccagaagattttcattctgaatgctcctgtagctaggaaccctaaaaagtctttgaagcaactcaagttttaaaaaaggggaggaactcctggaaatctcaggatggggccaagatgtggctggagagtgtgtggtgatggagggcgtgtcttttgccgagcacactcagggcccacgggaagcccatagacttcaaggacatcaagccccaaggtggtgggattttccccaccagtacttggcagcctagggggaaggggagggcgggagaagataatggggatccctggctccaaacataggaggacacatctgtgctacagtgcgcacatgcctggatgtacactctgtctttggagacactggctaagattctctgctccatgtttggacagggtcgtgcctgatctgagataaatggacaagaacaactgaagcctgtcttctggtgcatgtgtcacctgccgataactgcatcttgtgataaagttgggtgatttacagtctccaccaaatgctaaactctggggtcttacgcctttataactccatgggccccagcaaaggttcaggctcaaaacaggtgtcaaatagataactgttgaatgattgttccccagttgcaggctctgccacctggcgttcatactgtctgtgaaaggacccagctcacctttccctctttatctcccagtccttcccaacagcgccgacacctcatggaaactgattgcaaatgtgctacttctcacttctgtgtggcccgaggaggctgggttaatgctgggcttggtaccttaagcaccctttctcccttccccatcttcattctcagaattacacctgtctgaagcaggcattttccaatgccctagatgggaatataagtgtaaggagatgtgaagcatttgcctgtgtgtcagaacattcactgaggatcctcataggcacttctagaaaccaaatccttgaagatgactaaccagaaatgcccgtcatagcactgtttacagttgcaaaaactgaagccaattgaaatgtccatcaggaggggattaaatgaattatggtacagttacaccgttgaatattttacagccattgaagatgatatatagctatattcattgacaaggaaaactcatattttttagtgaaaaaagcaggttatagaattgcatgatattcacatttatataaaactttatatatgggaaggatgttgattgaattgttaataactatggtcacctctagagatggaagtttgcattacctttaatttttaataccattttgtattgcttaaaatttgtatgtattatcgttaaaataagaaaaatcaaataaagctattttcattatgggaaaacaa

SEQ ID NO: 135156 - DNA, 1971 bp, Artificial Sequence
  derived and/or modified sequence
gcgggtggaagaagatggcgtcgggtggtggtggctgtagcgcttcggagagactgcctccgcccttccccggcctggagccggagtccgagggggcggccgggggatcagaacccgaggctggggacagcgacaccgagggggaggacattttcaccggcgccgcggtggtcagtaaacatcagtctccaaagataactacatcccttcttcccatcaacaatggctccaaagaaaatgggatccatgaagaacaagaccaagagccacaggatctctttgcagatgccacagtggagctatccttggacagcacacaaaataatcagaagaaggtgctagccaaaacactcatttctcttcctcctcaggaagccacaaattcttcgaagccccagccaacctatgaggagctagaggaagaagaacaggaggatcaatttgatttgacagtcggtataactgatcctgagaagataggggatggtatgaatgcatatgtagcctacaaagttacaacacagacaagcttaccattgttcagaagcaaacagtttgcagtaaaaagaagatttagtgactttctgggtctttatgagaagctttccgagaagcactctcagaatggcttcattgtccctccgcccccggagaagagcctcatagggatgacaaaagtgaaagttgggaaggaagattcttcttctgcagaatttcttgaaaaacggagggccgctttagaaaggtaccttcagaggattgtaaatcatcctaccatgttacaggaccctgacgtcagagagttcttggaaaaagaagagctgccacgtgccgtgggtacccagacattgagtggtgctggtctcctcaagatgttcaacaaagccacagatgccgtcagcaaaatgaccatcaagatgaatgaatcagacatttggtttgaggagaagctccaggaggtagagtgtgaggagcagcgcttacggaaactgcatgctgttgtagaaactctagtcaaccataggaaagagctagcgctgaacacagcccagtttgcaaagagtctagccatgcttgggagctctgaggacaacacggcattgtcacgggcactctcccagctggctgaggtggaagaaaaaattgagcagctccaccaggaacaggccaacaatgacttcttcctccttgctgagctcctgagtgactacattcgcctcctggccatagtccgcgctgccttcgaccagcgcatgaagacatggcagcgctggcaggatgcccaagccacactgcagaagaagcgggaggccgaggctcggctgctgtgggccaacaagcctgataagctgcagcaggccaaggacgagatcctcgagtgggagtctcgggtgactcaatatgaaagggacttcgagaggatttcaacagtggtccgaaaagaagtgatacggtttgagaaagagaaatccaaggacttcaagaaccacgtgatcaagtaccttgagacactcctttactcacagcagcagctggcaaagtactgggaagccttccttcctgaggcaaaggccatctcctaatggaccaaggaccccagagcccacctgtgtgacgctgcctttttatacactgtcctcctccaccttgatggacccctagtgatgcatcctgcctaggctggacttaaccccttcctccctgtccccacgaccaactgtccccagttactctaaccgttatttcatttagcttccatatatattttcttacctaagagaatagtttcctgctttaagcaaaagacctacaataggtggtggaattatgggatggggtggagtattgatataaatatataaatacaaatgtatatttttcaggatgtggtttaggaactgggaataacgttttctgttactcctgatggtgccatgaaaaggttatgtaataaaatattttaaaatcagg

SEQ ID NO: 135157 - protein, 519 aa, Artificial Sequence
  derived and/or modified sequence
MAAEREPPPLGDGKPTDFEDLEDGEDLFTSTVSTLESSPSSPEPASLPAEDISANSNGPKPTEVVLDDDREDLFAEATEEVSLDSPEREPILSSEPSPAVTPVTPTTLIAPRIESKSMSAPVIFDRSREEIEEEANGDIFDIEIGVSDPEKVGDGMNAYMAYRVTTKTSLSMFSKSEFSVKRRFSDFLGLHSKLASKYLHVGYIVPPAPEKSIVGMTKVKVGKEDSSSTEFVEKRRAALERYLQRTVKHPTLLQDPDLRQFLESSELPRAVNTQALSGAGILRMVNKAADAVNKMTIKMNESDAWFEEKQQQFENLDQQLRKLHVSVEALVCHRKELSANTAAFAKSAAMLGNSEDHTALSRALSQLAEVEEKIDQLHQEQAFADFYMFSELLSDYIRLIAAVKGVFDHRMKCWQKWEDAQITLLKKREAEAKMMVANKPDKIQQAKNEIREWEAKVQQGERDFEQISKTIRKEVGRFEKERVKDFKTVIIKYLESLVQTQQQLIKYWEAFLPEAKAIA

SEQ ID NO: 135158 - DNA, 1560 bp, Artificial Sequence
  derived and/or modified sequence
atggccgccgagagagagcccccccccctgggcgacggcaagcccaccgacttcgaggacctggaggacggcgaggacctgttcaccagcaccgtgagcaccctggagagcagccccagcagccccgagcccgccagcctgcccgccgaggacatcagcgccaacagcaacggccccaagcccaccgaggtggtgctggacgacgacagagaggacctgttcgccgaggccaccgaggaggtgagcctggacagccccgagagagagcccatcctgagcagcgagcccagccccgccgtgacccccgtgacccccaccaccctgatcgcccccagaatcgagagcaagagcatgagcgcccccgtgatcttcgacagaagcagagaggagatcgaggaggaggccaacggcgacatcttcgacatcgagatcggcgtgagcgaccccgagaaggtgggcgacggcatgaacgcctacatggcctacagagtgaccaccaagaccagcctgagcatgttcagcaagagcgagttcagcgtgaagagaagattcagcgacttcctgggcctgcacagcaagctggccagcaagtacctgcacgtgggctacatcgtgccccccgcccccgagaagagcatcgtgggcatgaccaaggtgaaggtgggcaaggaggacagcagcagcaccgagttcgtggagaagagaagagccgccctggagagatacctgcagagaaccgtgaagcaccccaccctgctgcaggaccccgacctgagacagttcctggagagcagcgagctgcccagagccgtgaacacccaggccctgagcggcgccggcatcctgagaatggtgaacaaggccgccgacgccgtgaacaagatgaccatcaagatgaacgagagcgacgcctggttcgaggagaagcagcagcagttcgagaacctggaccagcagctgagaaagctgcacgtgagcgtggaggccctggtgtgccacagaaaggagctgagcgccaacaccgccgccttcgccaagagcgccgccatgctgggcaacagcgaggaccacaccgccctgagcagagccctgagccagctggccgaggtggaggagaagatcgaccagctgcaccaggagcaggccttcgccgacttctacatgttcagcgagctgctgagcgactacatcagactgatcgccgccgtgaagggcgtgttcgaccacagaatgaagtgctggcagaagtgggaggacgcccagatcaccctgctgaagaagagagaggccgaggccaagatgatggtggccaacaagcccgacaagatccagcaggccaagaacgagatcagagagtgggaggccaaggtgcagcagggcgagagagacttcgagcagatcagcaagaccatcagaaaggaggtgggcagattcgagaaggagagagtgaaggacttcaagaccgtgatcatcaagtacctggagagcctggtgcagacccagcagcagctgatcaagtactgggaggccttcctgcccgaggccaaggccatcgcctag

SEQ ID NO: 135159 - DNA, 1560 bp, Artificial Sequence
  derived and/or modified sequence
atggcggccgagcgagaaccaccgcctctgggagatggcaaacccaccgactttgaggatctggaagacggagaggatctttttacatccactgttagtaccctagaaagttcccccagcagtcccgagcccgcaagcctccctgccgaggatattagcgcgaattctaatgggcccaagccgacggaggttgtcttagatgatgatcgggaagatctatttgccgaagcgactgaagaagtctctctcgattcaccggagcgcgaacccattctttcatccgaaccatctccagctgtgacaccagtgacccctactacactgatagccccccggattgagagcaagagcatgtccgcccctgtgatatttgaccgctcacgggaagagatcgaggaagaggctaatggcgatatattcgatatcgagatcggcgtctccgatccagagaaggtcggcgacgggatgaatgcctatatggcttaccgcgtgacaaccaaaacctctctgtcaatgttttccaaaagcgaattcagtgtgaagaggaggttctctgacttcttaggcttgcatagtaagcttgcctcaaaatatttgcacgtgggatatattgtgcctcccgctccagagaaatctatcgtgggtatgactaaggtgaaggtcggtaaggaagatagttcaagtaccgagttcgtggaaaagcgccgagccgctttagagcgctacttgcagcgtaccgtgaaacaccccacattgctccaggatcctgacctccgccaatttctggagagttcagaactgcctcgggcagttaacacacaggccctgtcaggggctggtatcctgagaatggtgaacaaggctgcagacgctgttaataagatgaccatcaagatgaacgagtccgatgcctggttcgaggagaagcagcaacagtttgaaaacctggaccaacaactgcgtaagcttcatgtatcagttgaggccctggtctgccatagaaaggaactgtccgccaataccgctgccttcgctaaaagcgctgccatgctgggtaacagtgaggatcacacggccctgtcacgcgccctctctcaactcgccgaagtggaggagaaaattgaccagcttcatcaagagcaggcttttgctgatttctacatgttctctgagctattaagcgattacataaggttgatcgctgcagtaaagggtgttttcgaccatagaatgaagtgttggcagaagtgggaagatgcccaaattaccctgctgaagaaaagggaagctgaagccaagatgatggtcgcaaacaagcccgataagatccagcaagcaaagaatgaaatcagggaatgggaggccaaggttcagcagggtgagagagatttcgagcagattagtaaaacaattaggaaagaggtgggtaggtttgagaaagaacgggtcaaggactttaagaccgtgatcatcaagtatctcgagtccctagttcagacccagcagcaactcatcaaatattgggaagcctttctccccgaagccaaagcgattgcttag

SEQ ID NO: 135160 - DNA, 1560 bp, Artificial Sequence
  derived and/or modified sequence
atggctgctgagcgggagcccccacccctgggagatggcaagcccacagactttgaggacctggaggatggagaagatctcttcaccagcacagtgtccaccctggagagcagccccagcagccctgagcccgccagcctgcctgctgaggacatcagcgccaacagcaatggccccaagcccacagaggtggtgctggatgatgaccgggaggacctgtttgctgaggccacagaggaggtgtccctggacagccctgagcgggagcccatcctgagcagcgagcccagccctgctgtgacccctgtgacccccaccaccctgattgcccccagaattgagagcaagtccatgtctgcccctgtgatctttgacaggagccgggaggagattgaggaggaggccaacggggacatctttgacatcgagattggagtgtctgaccctgagaaggtgggagatggcatgaatgcctacatggcctacagagtgaccaccaagaccagcctgtccatgttcagcaagtctgagttctctgtgaagaggcgcttcagtgacttcctgggcctgcacagcaagctggccagcaagtacctgcacgtgggctacatcgtgcccccagcccctgagaagagcatcgtgggcatgaccaaggtgaaggtgggcaaggaggacagcagcagcacagaatttgtggagaagagaagagctgccctggagcgctacctgcagaggacagtgaagcaccccaccctgctgcaggaccctgacctgcggcagttcctggagagcagcgagctgcccagggctgtgaacacccaggccctgtctggagctggcatcctgaggatggtgaacaaggctgctgatgctgtgaacaagatgaccatcaagatgaatgaaagtgatgcctggtttgaggagaagcagcagcagtttgagaacctggaccagcagctgaggaagctgcacgtgtctgtggaggccctggtgtgccacaggaaggagctgagcgccaacacagctgcctttgccaagtctgctgccatgctgggcaacagcgaggaccacacagccctgagccgggccctgagccagctggccgaggtggaggagaagattgaccagctgcaccaggagcaggcctttgctgacttctacatgttcagcgagctgctgagtgactacatccggctgattgctgctgtgaagggcgtgtttgaccacaggatgaagtgctggcagaagtgggaggatgcccagatcaccctgctgaagaagcgggaggccgaggccaagatgatggtggccaacaagccagacaagatccagcaggccaagaatgagatccgggagtgggaggccaaggtgcagcagggcgagcgggactttgagcagatcagcaagaccatcaggaaggaggtgggccgctttgagaaggagcgggtgaaggacttcaagacagtcatcatcaagtacctggagagcctggtgcagacccagcagcagctgatcaagtactgggaggccttcctgcctgaggccaaggccatcgcctag

SEQ ID NO: 135161 - DNA, 1560 bp, Artificial Sequence
  derived and/or modified sequence
atggccgccgagcgggagcccccccccctgggcgacggcaagcccaccgacttcgaggatctggaagacggagaagacctgtttacgagcacggtttcaactctggagagctctccctcatcccctgaacccgcctctctgccagccgaagatatttcagccaactctaatgggccaaaacccaccgaggtggttctcgacgacgatagagaggacctgttcgcagaggctaccgaggaagtgagtctggacagccctgagcgcgaacccatcctgagctccgaaccctctcccgcggtcacacccgtcacaccaacaacactgatcgcgcccagaattgaatcgaaaagcatgtcagcacctgtcatttttgacagatcccgggaagagatagaagaggaagcgaatggagatatttttgatatagaaatcggggtgtcagaccccgagaaagtcggagacggtatgaacgcctatatggcttatcgggttactaccaagacaagcttgtctatgttctcaaaatctgagtttagcgtgaaacgacggttttcagactttctgggtttacactctaaattggcctctaagtaccttcacgttggctatatagttccccctgctcctgagaagagtatcgtgggaatgacgaaggtgaaagtcggaaaggaagacagcagttccactgagtttgtagagaaacggcgggctgcactggaacggtacctgcagagaaccgtgaagcatcctacacttcttcaggacccagacctccgtcagtttttggaatcttctgagctccccagggctgtgaatactcaggccctctcaggcgcgggtattctccgcatggtgaataaggcagctgatgcagtgaacaaaatgaccataaaaatgaatgaaagcgacgcttggttcgaagaaaagcaacagcagttcgagaacctagatcagcagctcaggaagctgcatgtgagcgtggaagccctggtatgccacagaaaagagctgtctgccaacaccgctgctttcgccaaatcagccgctatgttaggcaattcagaggatcataccgcattatctcgagctctaagtcagcttgccgaggttgaagagaaaattgatcaactgcatcaggaacaggctttcgccgacttctatatgttctctgaactgctcagcgactacatcagactgatcgcggccgtgaaaggggtttttgatcacaggatgaagtgctggcagaaatgggaggatgcccaaattactcttctgaagaagcgagaggctgaggctaaaatgatggttgccaacaaacccgacaagattcagcaggcaaagaatgagattcgcgagtgggaggcgaaagtgcaacagggagaaagggactttgaacagatttcaaaaacgatcagaaaggaagtcgggcggttcgaaaaggaaagagtgaaggactttaaaactgttatcatcaagtacttggagtctctggtacagacacagcagcagcttatcaaatactgggaggcttttttgcccgaggccaaagctatcgcctag

SEQ ID NO: 135162 - DNA, 1560 bp, Artificial Sequence
  derived and/or modified sequence
atggcagcggagagagaacccccaccactgggggatggcaagcccactgacttcgaggatcttgaagacggagaggatctctttacaagcacggtgtctaccttggaaagctccccctcatcccctgaacccgctagcctccctgcagaggacatctcagcaaacagtaacggcccaaagccaaccgaggtggttctcgacgatgaccgggaggatctttttgcagaagccactgaagaggtgtcgctcgacagccccgaacgtgaaccgatcttgtcctccgagccatcacccgctgtgacaccagtgacccccaccaccctaatcgcgccacggatagagagcaagagtatgtccgcaccagtgatttttgaccgctcgcgcgaagagatcgaggaggaagctaatggcgacatttttgatatcgaaatcggtgtttcagacccagaaaaagtgggcgacggaatgaatgcttatatggcctatagagtaaccacgaagacgtctctgtctatgttttctaagtcagagttctcagtcaagcgcaggttcagtgactttttagggctacactccaaacttgcttctaaatatctgcacgttggctacatcgtgcctccagcacctgagaaaagtatcgtcggtatgactaaggtgaaggtggggaaggaagactccagttcaacggagttcgtggagaagcgaagagccgcactggaacgttaccttcaacgtaccgtaaagcaccccacgctgttgcaggaccccgatcttagacaattccttgaaagctctgagctcccaagggccgtgaacacacaagcgctttcaggtgcaggaatattgcgcatggtgaataaggctgctgacgctgtgaacaaaatgactattaaaatgaatgaatctgatgcatggttcgaagagaaacaacagcagtttgagaacctcgatcagcaactgagaaagctacatgtgtctgtggaggcgcttgtgtgccatcgaaaggagctctcggccaacactgctgcttttgccaagtcggcagctatgctgggaaattccgaggatcacaccgctcttagccgggctttgtcacagttggcggaggtcgaagaaaagattgatcaactgcatcaagagcaggccttcgcggatttttatatgttttcggaactgttaagcgactacattcggctgatcgcggctgttaaaggggttttcgaccacagaatgaagtgctggcaaaaatgggaagacgcacaaattaccttgttgaagaagagagaggccgaggcaaaaatgatggtggccaataagcccgacaagatccagcaagcaaaaaacgagatcagggagtgggaggcaaaagttcagcagggcgagagagatttcgagcagatttccaaaaccattcgtaaagaggtgggtcgtttcgagaaagagcgtgtgaaggatttcaagactgtgatcatcaagtatcttgaatccctggtacagactcagcaacagcttatcaagtactgggaggctttcttacccgaagccaaagccatagcctag

SEQ ID NO: 135163 - DNA, 2128 bp, Artificial Sequence
  derived and/or modified sequence
aggccggccgggggcggggaggctggcgggtcggcgcgggcccagccgtgcgtgctcacgtgacgggtccgcgaggcccagctcgcgcagtcgttcgggtgagcgaagatggcggccgagagggaacctcctccgctgggggacgggaagcccaccgactttgaggatctggaggacggagaggacctgttcaccagcactgtctccaccctagagtcaagtccatcatctccagaaccagctagtcttcctgcagaagatattagtgcaaactccaatggcccaaaacccacagaagttgtattagatgatgacagagaagatctttttgcagaagccacagaagaagtttctttggacagccctgaaagggaacctatcctatcctcggaaccttctcctgcagtcacacctgtcactcctactacactcattgctcctagaattgaatcaaagagtatgtctgctcccgtgatctttgatagatccagggaagagattgaagaagaagcaaatggagacatttttgacatagaaattggtgtatcagatccagaaaaagttggtgatggcatgaatgcctatatggcatatagagtaacaacaaagacatctctttccatgttcagtaagagtgaattttcagtgaaaagaagattcagcgactttcttggtttgcacagcaaattagcaagcaaatatttacatgttggttatattgtgccaccagctccagaaaagagtatagtagggatgaccaaggtcaaagtgggtaaagaagactcatcatccactgagtttgtagaaaaacggagagcagctcttgaaaggtatcttcaaagaacagtaaaacatccaactttactacaggatcctgatttaaggcagttcttggaaagttcagagctgcctagagcagttaatacacaggctctgagtggagcaggaatattgaggatggtgaacaaggctgccgacgctgtcaacaaaatgacaatcaagatgaatgaatcggatgcatggtttgaagaaaagcagcagcaatttgagaatctggatcagcaacttaggaaacttcatgtcagtgttgaagccttggtctgtcatagaaaagaactttcagccaacacagctgcctttgctaaaagtgctgccatgttaggtaattctgaggatcatactgctttatctagagctttgtctcagcttgcagaggttgaggagaagatagaccagttacatcaagaacaagcttttgctgacttttatatgttttcagaactacttagtgactacattcgtcttattgctgcagtgaaaggtgtgtttgaccatcgaatgaagtgctggcagaaatgggaagatgctcaaattactttgctcaaaaaacgtgaagctgaagcaaaaatgatggttgctaacaaaccagataaaatacagcaagctaaaaatgaaataagagagtgggaggcgaaagtgcaacaaggggaaagagattttgaacagatatctaaaacgattcgaaaagaagtgggaagatttgagaaagaacgagtgaaggattttaaaaccgttatcatcaagtacttagaatcactagttcaaacacaacaacagctgataaaatactgggaagcattcctacctgaagccaaagccattgcctagcaataagattgttgccgttaagaagaccttggatgttgttccagttatgctggattccacagtgaaatcatttaaaaccatctaaataaaccactatatattttatgaattacatgtggttttatatacacacacacacacacacacacacacacacacacactctgacattttattacaagctgcatgtcctgaccctctttgaattaagtggactgtggcatgacattctgcaatactttgctgaattgaacactattgtgtcttaaatacttgcactaaatagtgcactgcaagaccagaaaattttacaatattttttctttacaatatgttctgtagtatgtttaccctctttatgaagtgaattaccaatgctttgaataatgttcacttatacattcctgtacagaaattacgattttgtgattacagtaataaaatgatattccttgtgaaa

SEQ ID NO: 135164 - protein, 240 aa, Artificial Sequence
  derived and/or modified sequence
MLALLCSCLLLAAGASDAWTGEDSAEPNSDSAEWIRDMYAKVTEIWQEVMQRRDDDGALHAACQVQPSATLDAAQPRVTGVVLFRQLAPRAKLDAFFALEGFPTEPNSSSRAIHVHQFGDLSQGCESTGPHYNPLAVPHPQHPGDFGNFAVRDGSLWRYRAGLAASLAGPHSIVGRAVVVHAGEDDLGRGGNQASVENGNAGRRLACCVVGVCGPGLWERQAREHSERKKRRRESECKAA

SEQ ID NO: 135165 - DNA, 723 bp, Artificial Sequence
  derived and/or modified sequence
atgctggccctgctgtgcagctgcctgctgctggccgccggcgccagcgacgcctggaccggcgaggacagcgccgagcccaacagcgacagcgccgagtggatcagagacatgtacgccaaggtgaccgagatctggcaggaggtgatgcagagaagagacgacgacggcgccctgcacgccgcctgccaggtgcagcccagcgccaccctggacgccgcccagcccagagtgaccggcgtggtgctgttcagacagctggcccccagagccaagctggacgccttcttcgccctggagggcttccccaccgagcccaacagcagcagcagagccatccacgtgcaccagttcggcgacctgagccagggctgcgagagcaccggcccccactacaaccccctggccgtgccccacccccagcaccccggcgacttcggcaacttcgccgtgagagacggcagcctgtggagatacagagccggcctggccgccagcctggccggcccccacagcatcgtgggcagagccgtggtggtgcacgccggcgaggacgacctgggcagaggcggcaaccaggccagcgtggagaacggcaacgccggcagaagactggcctgctgcgtggtgggcgtgtgcggccccggcctgtgggagagacaggccagagagcacagcgagagaaagaagagaagaagagagagcgagtgcaaggccgcctag

SEQ ID NO: 135166 - DNA, 723 bp, Artificial Sequence
  derived and/or modified sequence
atgctggccctgctgtgcagctgtcttttgttggctgccggagcttcggatgcgtggaccggcgaggacagtgcggaacctaactctgactctgcagaatggatccgggacatgtatgccaaggtgacagagatctggcaagaggtcatgcaaaggagagatgacgacggcgctctccacgcggcatgtcaagttcaaccttcggcaacgttagacgccgcccagcctagagtgacaggggtcgtgctgtttcgccaattggcccccagggccaaactggacgcctttttcgccctagaaggtttcccaacagaaccaaactcaagttctcgtgctatccacgtccatcagttcggcgacctgagccagggatgcgaaagcaccgggccccactataacccgctggccgtcccccatccccaacacccgggcgacttcggtaacttcgccgttcgagacggctccctatggcggtatagagccggactggccgcctccctcgccggaccacacagcattgtcggaagagccgttgtggttcatgccggtgaagatgacctgggcagaggcggcaatcaagctagtgtggagaatgggaacgcgggacgcagactggcttgctgtgtggtaggcgtgtgtggtcctggtctatgggaacgacaagccagagaacacagtgagcgtaagaagaggcgtcgggaaagtgaatgcaaggctgcctag

SEQ ID NO: 135167 - DNA, 723 bp, Artificial Sequence
  derived and/or modified sequence
atgctggccctgctgtgcagctgcctgctgctggccgccggggccagtgatgcctggacaggagaggacagcgctgagcccaacagcgacagcgctgagtggatccgggacatgtatgccaaggtgacagagatctggcaggaggtgatgcagaggagagatgatgatggagccctgcatgctgcctgccaggtgcagcccagcgccaccctggatgctgcccagccccgggtgactggagtggtgctcttccggcagctggccccccgggccaagctggatgccttctttgccctggagggcttccccacagagcccaacagcagcagccgggccatccacgtgcaccagtttggagacctgagccagggctgtgagagcacaggcccccactacaaccccctggccgtgccccacccccagcaccctggggactttggaaactttgctgtgagagatggcagcctgtggagatacagagctggcctggccgccagcctggccggcccccacagcatcgtgggccgggctgtggtggtgcacgccggggaggatgacctgggccggggcggcaaccaggcctctgtggagaatggaaatgccggccgccgcctggcctgctgcgtggtgggcgtgtgtggccctggcctgtgggagcggcaggcccgggagcacagcgagaggaagaagagaagaagagaaagtgagtgcaaggccgcctag

SEQ ID NO: 135168 - DNA, 723 bp, Artificial Sequence
  derived and/or modified sequence
atgctggccctgctgtgcagctgcctgctgctggccgccggcgcctcagacgcttggaccggcgaggattccgccgaacctaacagcgacagcgccgagtggattcgagatatgtatgccaaagtgaccgagatatggcaggaagtgatgcagagacgcgacgacgacggggcgctgcatgcggcatgtcaagtgcagcctagcgctacgctggacgccgcacagccccgggtgactggggtcgtgctgttccgtcagttagcgccacgggcaaaacttgatgctttcttcgccctggagggctttccaactgagcccaacagcagcagtcgggcaatacatgtacatcaatttggagatctaagtcaggggtgtgagtccacagggccacactacaatcccttagccgtgccccacccgcagcatcccggtgattttgggaattttgccgttcgggacggatccctgtggcgctacagggctggtctggcagccagcctggctggcccgcatagcatcgtcggtagggcggttgtggttcacgcgggagaggacgacctggggcggggcggcaaccaggcctcagtcgaaaacggcaatgctgggaggaggctcgcttgctgtgtggtgggtgtgtgtgggccgggactgtgggaacggcaagcaagggaacattcggaaagaaagaagcgccgtagagaatctgaatgcaaagcggcatag

SEQ ID NO: 135169 - DNA, 723 bp, Artificial Sequence
  derived and/or modified sequence
atgcttgcgctcttatgtagctgtctcttgctggcagcaggcgctagtgacgcatggaccggcgaagattcagcagagcctaacagcgattcagccgagtggatacgggatatgtacgctaaagtaaccgagatttggcaggaagtcatgcagcgacgggatgatgatggcgcactccatgctgcctgccaagttcagccatctgccaccctggacgcagcccagccacgtgtgacaggtgtggtgctgttcaggcagctggcgcctcgcgcaaagctggacgctttctttgctcttgagggattccctacggagcccaatagctcatccagggcaatacatgtccaccagtttggagacctgtcacagggatgtgaaagtacgggtcctcactacaaccccttggcggtcccacaccctcagcaccccggagatttcggtaatttcgccgtccgggatggctctctatggaggtatcgcgcaggtttggccgcatctctcgccggacctcatagcatcgtaggtagggccgttgtggtccacgctggtgaagacgacttaggacggggtggcaaccaagctagcgtggaaaatggcaacgccggaagacggctagcgtgttgcgtggtcggcgtatgtggcccaggcctatgggaacgtcaggccagagagcattccgagcgcaaaaagaggcggagggagagtgaatgcaaagccgcatag

SEQ ID NO: 135170 - DNA, 1526 bp, Artificial Sequence
  derived and/or modified sequence
ggggaggtctggcctgcttttcctccctgaactggcccaatgactggctccctcacgctgaccactcctctgggctggcctcctgcactcgcgctaacagcccaggctccagggacagcctgcgttcctgggctggctgggtgcagctctcttttcaggagagaaagctctcttggaggagctggaaaggtgcccgactccagccatgctggcgctactgtgttcctgcctgctcctggcagccggtgcctcggacgcctggacgggcgaggactcggcggagcccaactctgactcggcggagtggatccgagacatgtacgccaaggtcacggagatctggcaggaggtcatgcagcggcgggacgacgacggcgcgctccacgccgcctgccaggtgcagccgtcggccacgctggacgccgcgcagccccgggtgaccggcgtcgtcctcttccggcagcttgcgccccgcgccaagctcgacgccttcttcgccctggagggcttcccgaccgagccgaacagctccagccgcgccatccacgtgcaccagttcggggacctgagccagggctgcgagtccaccgggccccactacaacccgctggccgtgccgcacccgcagcacccgggcgacttcggcaacttcgcggtccgcgacggcagcctctggaggtaccgcgccggcctggccgcctcgctcgcgggcccgcactccatcgtgggccgggccgtggtcgtccacgctggcgaggacgacctgggccgcggcggcaaccaggccagcgtggagaacgggaacgcgggccggcggctggcctgctgcgtggtgggcgtgtgcgggcccgggctctgggagcgccaggcgcgggagcactcagagcgcaagaagcggcggcgcgagagcgagtgcaaggccgcctgagcgcggcccccacccggcggcggccagggacccccgaggcccccctctgcctttgagcttctcctctgctccaacagacaccctccactctgaggtctcaccttcgcctttgctgaagtctccccgcagccctctccacccagaggtctccctataccgagacccaccatccttccatcctgaggaccgccccaaccctcggagccccccactcagtaggtctgaaggcctccatttgtaccgaaacaccccgctcacgctgacagcctcctaggctccctgaggtacctttccacccagaccctccttccccaccccataagccctgagactcccgcctttgacctgacgatcttcccccttcccgccttcaggttcctcctaggcgctcagaggccgctctggggggttgcctcgagtccccccacccctccccacccaccaccgctcccgcgggaagccagcccgtgcaacggaagccaggccaactgccccgcgtcttcagctgtttcgcatccaccgccaccccactgagagctgctcctttgggggaatgtttggcaacctttgtgttacagattaaaaattcagcaattca

SEQ ID NO: 135171 - protein, 357 aa, Artificial Sequence
  derived and/or modified sequence
MAAAAKPNNLSLVVHGPGDLRLENYPIPEPGPNEVLLRMHSVGICGSDVHYWEYGRIGNFIVKKPMVLGHEASGTVEKVGSSVKHLKPGDRVAIEPGAPRENDEFCKMGRYNLSPSIFFCATPPDDGNLCRFYKHNAAFCYKLPDNVTFEEGALIEPLSVGIHACRRGGVTLGHKVLVCGAGPIGMVTLLVAKAMGAAQVVVTDLSATRLSKAKEIGADLVLQISKESPQEIARKVEGQLGCKPEVTIECTGAEASIQAGIYATRSGGNLVLVGLGSEMTTVPLLHAAIREVDIKGVFRYCNTWPVAISMLASKSVNVKPLVTHRFPLEKALEAFETFKKGLGLKIMLKCDPSDQNP

SEQ ID NO: 135172 - DNA, 1074 bp, Artificial Sequence
  derived and/or modified sequence
atggccgccgccgccaagcccaacaacctgagcctggtggtgcacggccccggcgacctgagactggagaactaccccatccccgagcccggccccaacgaggtgctgctgagaatgcacagcgtgggcatctgcggcagcgacgtgcactactgggagtacggcagaatcggcaacttcatcgtgaagaagcccatggtgctgggccacgaggccagcggcaccgtggagaaggtgggcagcagcgtgaagcacctgaagcccggcgacagagtggccatcgagcccggcgcccccagagagaacgacgagttctgcaagatgggcagatacaacctgagccccagcatcttcttctgcgccaccccccccgacgacggcaacctgtgcagattctacaagcacaacgccgccttctgctacaagctgcccgacaacgtgaccttcgaggagggcgccctgatcgagcccctgagcgtgggcatccacgcctgcagaagaggcggcgtgaccctgggccacaaggtgctggtgtgcggcgccggccccatcggcatggtgaccctgctggtggccaaggccatgggcgccgcccaggtggtggtgaccgacctgagcgccaccagactgagcaaggccaaggagatcggcgccgacctggtgctgcagatcagcaaggagagcccccaggagatcgccagaaaggtggagggccagctgggctgcaagcccgaggtgaccatcgagtgcaccggcgccgaggccagcatccaggccggcatctacgccaccagaagcggcggcaacctggtgctggtgggcctgggcagcgagatgaccaccgtgcccctgctgcacgccgccatcagagaggtggacatcaagggcgtgttcagatactgcaacacctggcccgtggccatcagcatgctggccagcaagagcgtgaacgtgaagcccctggtgacccacagattccccctggagaaggccctggaggccttcgagaccttcaagaagggcctgggcctgaagatcatgctgaagtgcgaccccagcgaccagaacccctag

SEQ ID NO: 135173 - DNA, 1074 bp, Artificial Sequence
  derived and/or modified sequence
atggccgcggctgcaaaacccaataatctgtccctagtcgtgcacggaccaggcgatctaagattagagaactatcctataccagagcctggtccaaacgaagttttgttgcgaatgcactctgtcggaatatgtgggagtgacgttcattactgggaatacggtcgcatcggcaacttcatcgtgaagaagcccatggttctgggtcacgaggccagcggaactgtcgagaaagtgggcagctctgtcaagcatcttaagcccggtgatcgagttgcgattgaaccgggagcccccagggagaatgatgagttttgcaagatgggccgatacaacctctcaccatccattttcttctgtgcaacccctccagacgatgggaatctctgtaggttttacaagcataacgctgctttttgctacaaattacctgataacgttacctttgaggaaggtgctctaattgaacccctgtctgtggggatccacgcttgtagaaggggcggtgtgacgctgggccacaaggtgctggtttgtggcgccggccccattggaatggtgacactgttagtggctaaagccatgggggcagctcaggtggtggtcaccgacttgtctgccacgagactctccaaggcaaaggaaatcggggctgatctagttctgcagatctcaaaagagtcacctcaggaaatagcccgcaaggtggagggccagttaggctgcaaaccagaggtgactatagagtgtaccggggctgaggcttctattcaggccggaatctatgcaacgaggtcggggggcaaccttgtgctcgtgggcctaggatcagagatgaccacagtgcctctgctccatgcagctataagagaggttgatattaagggtgttttccggtactgcaatacatggcccgtcgcaatatccatgctcgctagcaaatcagtcaatgttaagcctctggtaactcacagattccccctcgaaaaggcgctggaggcctttgagacttttaaaaaaggattaggcctgaagatcatgctgaagtgcgaccccagtgaccagaacccatag

SEQ ID NO: 135174 - DNA, 1074 bp, Artificial Sequence
  derived and/or modified sequence
atggctgctgctgccaagcccaacaacctgagcctggtggtgcacggccctggggacctgcggctggagaactaccccatccctgagcccggccccaatgaggtgctgctgaggatgcacagcgtgggcatctgtggcagtgatgtgcactactgggagtatggaagaattggcaacttcatcgtgaagaagcccatggtgctgggccacgaggccagcggcaccgtggagaaggtgggcagctctgtgaagcacctgaagccaggggacagagtggccatcgagcccggggcccccagagaaaatgatgagttctgcaagatgggccgctacaacctgagccccagcatcttcttctgtgccaccccaccagatgatggcaacctgtgccgcttctacaagcacaatgctgccttctgctacaagctgcctgacaacgtgacctttgaggagggcgccctgattgagcccctgtctgtgggcatccacgcctgccggcggggcggcgtgaccctgggccacaaggtgctggtgtgtggggccggccccatcggcatggtgaccctgctggtggccaaggccatgggcgccgcccaggtggtggtgacagacctgagcgccacccggctgagcaaggccaaggagatcggggctgacctggtgctgcagatcagcaaggagagcccccaggagatcgccaggaaggtggagggccagctgggctgcaagccagaggtgaccattgaatgtactggagctgaggccagcatccaggccggcatctatgccaccaggtctgggggcaacctggtgctggtgggcctgggcagcgagatgaccaccgtgcccctgctgcatgctgccatccgggaggtggacatcaagggcgtcttccgctactgcaacacctggcctgtggccatctccatgctggccagcaagtctgtgaatgtgaagcccctggtgacccaccgcttccccctggagaaggccctggaggcctttgagaccttcaagaagggcctgggcctgaagatcatgctgaagtgtgaccccagcgaccagaacccctag

SEQ ID NO: 135175 - DNA, 1074 bp, Artificial Sequence
  derived and/or modified sequence
atggccgccgccgccaagcccaacaacctgagcctggtggtgcacggaccgggggacctgcgacttgaaaactatcccatacccgaacctgggcccaatgaagtgctactgcggatgcacagcgtaggcatttgtggttctgacgtgcactactgggaatacggccgcatcgggaacttcatcgttaaaaaacccatggtgttgggccacgaagcctcagggactgttgaaaaagttggatcgtccgttaaacatctcaagcctggggatagggtggcaatcgagcccggtgctcctagagagaacgatgagttttgtaaaatggggcggtacaatctctcaccatcaatcttcttctgcgcaacaccacccgacgatggcaatctatgcagattttataaacataacgccgcgttttgctacaagttgcccgacaatgtgaccttcgaggaaggggctttgattgagccgctcagcgtagggatccatgcttgcagaagggggggagtgactttgggccacaaagtcctggtgtgtggcgctgggccaatcggaatggtgactcttctcgtggcaaaggccatgggggctgcccaggtcgttgtgactgatttgtctgcaacccgtctgagcaaggcaaaggaaattggggcagaccttgtgttgcaaatcagcaaagaatctcctcaggagatagcacggaaagtagaagggcaactggggtgcaagccagaggttacaatcgagtgtacaggggctgaagcatcaatccaggctggtatttatgctacccgctcggggggtaatctggtcctcgtcgggctgggatcagaaatgacaaccgtgccactgcttcacgccgcgatccgagaagttgatatcaaaggtgttttccgatactgcaacacctggccagtcgccatcagcatgcttgccagcaaatcggttaatgtcaaacctctggtgactcacaggtttcccctcgagaaagcgctcgaggcatttgagacctttaaaaaaggtctgggactcaagatcatgctcaaatgcgacccatctgatcaaaatccatag

SEQ ID NO: 135176 - DNA, 1074 bp, Artificial Sequence
  derived and/or modified sequence
atggctgcagccgctaaacccaacaatctgtcgctcgtggtgcacgggccaggtgatctgcgattggagaactacccaataccagagccgggacctaacgaggtcctgctccgcatgcactctgttggaatctgcggctccgatgtccactactgggaatacgggcgtatcggcaacttcattgtaaaaaaacccatggttctggggcacgaagcatctggcaccgtggagaaagtgggtagtagcgtaaagcatctgaagcctggcgacagagtggcgattgagcctggtgctccaagggagaacgacgaattctgcaagatggggaggtacaatctgtccccaagcatcttcttttgcgcaacacctccagatgatggcaacctgtgccgattttataaacataatgccgctttctgttacaagctgcctgacaatgtcaccttcgaggagggggcactgatagagcctttgtcagtaggaatacacgcatgcagacgcggaggtgtgaccctcggccacaaggtgttagtctgtggagctggtcctattggtatggtcacactcttggtggccaaggcgatgggcgcagctcaggttgtggtgaccgacctgtctgcgacaaggctgagcaaggccaaggagatcggggcagacctggtcctgcaaattagcaaagaatccccgcaggaaattgccagaaaggtggaaggacagctcggctgcaagccagaagtcactatcgaatgtactggagccgaagctagcatccaggccggaatttacgctacccgaagtggcggaaatctcgttctggtgggcctgggcagcgaaatgacaaccgttcccctgcttcatgccgctattagagaagttgacatcaaaggagtgttccgatactgtaacacctggcccgttgccatcagcatgttagctagcaaatcagtcaacgtaaagccgcttgtgacacaccgcttcccactggagaaagccttggaggcctttgagaccttcaagaaggggttaggcttgaagattatgctaaaatgtgatccgtccgatcaaaatccctag

SEQ ID NO: 135177 - DNA, 2569 bp, Artificial Sequence
  derived and/or modified sequence
ctccacgctagcgccgcccaggctggcacaaaggaggaagcctagtcccgcccctgcgtgcggcgcttctcccaggccccaccttccatccagtgccctggaccctcggctgggtagcgccaccagagcgaccaaacgtcccgcgccttccaggccgcactccagagccaaaagagctccatggcggcggcggccaagcccaacaacctttccctggtggtgcacggaccgggggacttgcgcctggagaactatcctatccctgaaccaggcccaaatgaggtcttgctgaggatgcattctgttggaatctgtggctcagatgtccactactgggagtatggtcgaattgggaattttattgtgaaaaagcccatggtgctgggacatgaagcttcgggaacagtcgaaaaagtgggatcatcggtaaagcacctaaaaccaggtgatcgtgttgccatcgagcctggtgctccccgagaaaatgatgaattctgcaagatgggccgatacaatctgtcaccttccatcttcttctgtgccacgccccccgatgacgggaacctctgccggttctataagcacaatgcagccttttgttacaagcttcctgacaatgtcacctttgaggaaggcgccctgatcgagccactttctgtggggatccatgcctgcaggagaggcggagttaccctgggacacaaggtccttgtgtgtggagctgggccaatcgggatggtcactttgctcgtggccaaagcaatgggagcagctcaagtagtggtgactgatctgtctgctacccgattgtccaaagccaaggagattggggctgatttagtcctccagatctccaaggagagccctcaggaaatcgccaggaaagtagaaggtcagctggggtgcaagccggaagtcaccatcgagtgcacgggggcagaggcctccatccaggcgggcatctacgccactcgctctggtgggaacctcgtgcttgtggggctgggctctgagatgaccaccgtacccctactgcatgcagccatccgggaggtggatatcaagggcgtgtttcgatactgcaacacgtggccagtggcgatttcgatgcttgcgtccaagtctgtgaatgtaaaacccctcgtcacccataggtttcctctggagaaagctctggaggcctttgaaacatttaaaaagggattggggttgaaaatcatgctcaagtgtgaccccagtgaccagaatccctgatgttaatgggctctgccctcatccccacagtcttgggatctcagggcacaatggctggacatgggtgggctctgatgcagaactttctcttttgaatgttaagaataactaatacaattcattgtgaacagaagtccttaagcagaggaattggtgtgccttaaagatacaatctgggatagtttgggggaacttgtagccagaatgccctgttcatgctgagcaaagttcagcaagtagagcagagtttggcaggcaggtgccaggaactccccttcttcctggagtgccttcattgaggaaggaaatctggcccttgggtttcctggttccactgctactgacccagaggggaatgagggctgagttatgaaaagataacttcatgaagacttaactggcccagaagctgattttcatgaaaatctgccactcagggtctgggatgaaggcttgtcagcacttccagtttagaacgcaatgtttctagagacatattggctgtttgttttgatgataaaaggagaataagaaaaggcatcactttcctggatccaggataatttttaaaccaatcaaatgaaaaaaacaaacaaacaaaaaaggaaatgtcatgtgaggttaaaccagtttgcattcccctaatgtggaaaaagtaagaggactactcagcactgtttgaagattgcctcttctacagcttctgagaattgtgttatttcacttgccaagtgaaggaccccctccccaacatgccccagcccacccctaagcatggtcccttgtcaccaggcaaccaggaaactgctacttgtggacctcaccagagaccaggagggtttggttagctcacaggacttcccccaccccagaagattagcatcccatactagactcatactcaactcaactaggctcatactcaattgatggttattagacaattccatttctttctggttattataaacagaaaatctttcctcttctcattaccagtaaaggctcttggtatctttctgttggaatgatttctatgaacttgtcttattttaatggtgggttttttttctggtaagatttagacctaaatcgcatcatgccaacttgtgactttgagactattcatcaagaatgaggatatagtagccatgacatagcttgagctatagcctttaattccttactttggctatgggtggagggtgagtttgaagaggttctgattttcttgtaacctgggaaagccatgaccttgtgcccgattctttcagattgctttgggtaataaatattggtggtggtatctgactca

SEQ ID NO: 135178 - protein, 2214 aa, Artificial Sequence
  derived and/or modified sequence
MATRSSRRESRLPFLFTLVALLPPGALCEVWTQRLHGGSAPLPQDRGFLVVQGDPRELRLWARGDARGASRADEKPLRRKRSAALQPEPIKVYGQVSLNDSHNQMVVHWAGEKSNVIVALARDSLALARPKSSDVYVSYDYGKSFKKISDKLNFGLGNRSEAVIAQFYHSPADNKRYIFADAYAQYLWITFDFCNTLQGFSIPFRAADLLLHSKASNLLLGFDRSHPNKQLWKSDDFGQTWIMIQEHVKSFSWGIDPYDKPNTIYIERHEPSGYSTVFRSTDFFQSRENQEVILEEVRDFQLRDKYMFATKVVHLLGSEQQSSVQLWVSFGRKPMRAAQFVTRHPINEYYIADASEDQVFVCVSHSNNRTNLYISEAEGLKFSLSLENVLYYSPGGAGSDTLVRYFANEPFADFHRVEGLQGVYIATLINGSMNEENMRSVITFDKGGTWEFLQAPAFTGYGEKINCELSQGCSLHLAQRLSQLLNLQLRRMPILSKESAPGLIIATGSVGKNLASKTNVYISSSAGARWREALPGPHYYTWGDHGGIITAIAQGMETNELKYSTNEGETWKTFIFSEKPVFVYGLLTEPGEKSTVFTIFGSNKENVHSWLILQVNATDALGVPCTENDYKLWSPSDERGNECLLGHKTVFKRRTPHATCFNGEDFDRPVVVSNCSCTREDYECDFGFKMSEDLSLEVCVPDPEFSGKSYSPPVPCPVGSTYRRTRGYRKISGDTCSGGDVEARLEGELVPCPLAEENEFILYAVRKSIYRYDLASGATEQLPLTGLRAAVALDFDYEHNCLYWSDLALDVIQRLCLNGSTGQEVIINSGLETVEALAFEPLSQLLYWVDAGFKKIEVANPDGDFRLTIVNSSVLDRPRALVLVPQEGVMFWTDWGDLKPGIYRSNMDGSAAYHLVSEDVKWPNGISVDDQWIYWTDAYLECIERITFSGQQRSVILDNLPHPYAIAVFKNEIYWDDWSQLSIFRASKYSGSQMEILANQLTGLMDMKIFYKGKNTGSNACVPRPCSLLCLPKANNSRSCRCPEDVSSSVLPSGDLMCDCPQGYQLKNNTCVKQENTCLRNQYRCSNGNCINSIWWCDFDNDCGDMSDERNCPTTICDLDTQFRCQESGTCIPLSYKCDLEDDCGDNSDESHCEMHQCRSDEYNCSSGMCIRSSWVCDGDNDCRDWSDEANCTAIYHTCEASNFQCRNGHCIPQRWACDGDTDCQDGSDEDPVNCEKKCNGFRCPNGTCIPSSKHCDGLRDCSDGSDEQHCEPLCTHFMDFVCKNRQQCLFHSMVCDGIIQCRDGSDEDAAFAGCSQDPEFHKVCDEFGFQCQNGVCISLIWKCDGMDDCGDYSDEANCENPTEAPNCSRYFQFRCENGHCIPNRWKCDRENDCGDWSDEKDCGDSHILPFSTPGPSTCLPNYYRCSSGTCVMDTWVCDGYRDCADGSDEEACPLLANVTAASTPTQLGRCDRFEFECHQPKTCIPNWKRCDGHQDCQDGRDEANCPTHSTLTCMSREFQCEDGEACIVLSERCDGFLDCSDESDEKACSDELTVYKVQNLQWTADFSGDVTLTWMRPKKMPSASCVYNVYYRVVGESIWKTLETHSNKTNTVLKVLKPDTTYQVKVQVQCLSKAHNTNDFVTLRTPEGLPDAPRNLQLSLPREAEGVIVGHWAPPIHTHGLIREYIVEYSRSGSKMWASQRAASNFTEIKNLLVNTLYTVRVAAVTSRGIGNWSDSKSITTIKGKVIPPPDIHIDSYGENYLSFTLTMESDIKVNGYVVNLFWAFDTHKQERRTLNFRGSILSHKVGNLTAHTSYEISAWAKTDLGDSPLAFEHVMTRGVRPPAPSLKAKAINQTAVECTWTGPRNVVYGIFYATSFLDLYRNPKSLTTSLHNKTVIVSKDEQYLFLVRVVVPYQGPSSDYVVVKMIPDSRLPPRHLHVVHTGKTSVVIKWESPYDSPDQDLLYAVAVKDLIRKTDRSYKVKSRNSTVEYTLNKLEPGGKYHIIVQLGNMSKDSSIKITTVSLSAPDALKIITENDHVLLFWKSLALKEKHFNESRGYEIHMFDSAMNITAYLGNTTDNFFKISNLKMGHNYTFTVQARCLFGNQICGEPAILLYDELGSGADASATQAARSTDVAAVVVPILFLILLSLGVGFAILYTKHRRLQSSFTAFANSHYSSRLGSAIFSSGDDLGEDDEDAPMITGFSDDVPMVIA

SEQ ID NO: 135179 - DNA, 6645 bp, Artificial Sequence
  derived and/or modified sequence
atggccaccagaagcagcagaagagagagcagactgcccttcctgttcaccctggtggccctgctgccccccggcgccctgtgcgaggtgtggacccagagactgcacggcggcagcgcccccctgccccaggacagaggcttcctggtggtgcagggcgaccccagagagctgagactgtgggccagaggcgacgccagaggcgccagcagagccgacgagaagcccctgagaagaaagagaagcgccgccctgcagcccgagcccatcaaggtgtacggccaggtgagcctgaacgacagccacaaccagatggtggtgcactgggccggcgagaagagcaacgtgatcgtggccctggccagagacagcctggccctggccagacccaagagcagcgacgtgtacgtgagctacgactacggcaagagcttcaagaagatcagcgacaagctgaacttcggcctgggcaacagaagcgaggccgtgatcgcccagttctaccacagccccgccgacaacaagagatacatcttcgccgacgcctacgcccagtacctgtggatcaccttcgacttctgcaacaccctgcagggcttcagcatccccttcagagccgccgacctgctgctgcacagcaaggccagcaacctgctgctgggcttcgacagaagccaccccaacaagcagctgtggaagagcgacgacttcggccagacctggatcatgatccaggagcacgtgaagagcttcagctggggcatcgacccctacgacaagcccaacaccatctacatcgagagacacgagcccagcggctacagcaccgtgttcagaagcaccgacttcttccagagcagagagaaccaggaggtgatcctggaggaggtgagagacttccagctgagagacaagtacatgttcgccaccaaggtggtgcacctgctgggcagcgagcagcagagcagcgtgcagctgtgggtgagcttcggcagaaagcccatgagagccgcccagttcgtgaccagacaccccatcaacgagtactacatcgccgacgccagcgaggaccaggtgttcgtgtgcgtgagccacagcaacaacagaaccaacctgtacatcagcgaggccgagggcctgaagttcagcctgagcctggagaacgtgctgtactacagccccggcggcgccggcagcgacaccctggtgagatacttcgccaacgagcccttcgccgacttccacagagtggagggcctgcagggcgtgtacatcgccaccctgatcaacggcagcatgaacgaggagaacatgagaagcgtgatcaccttcgacaagggcggcacctgggagttcctgcaggcccccgccttcaccggctacggcgagaagatcaactgcgagctgagccagggctgcagcctgcacctggcccagagactgagccagctgctgaacctgcagctgagaagaatgcccatcctgagcaaggagagcgcccccggcctgatcatcgccaccggcagcgtgggcaagaacctggccagcaagaccaacgtgtacatcagcagcagcgccggcgccagatggagagaggccctgcccggcccccactactacacctggggcgaccacggcggcatcatcaccgccatcgcccagggcatggagaccaacgagctgaagtacagcaccaacgagggcgagacctggaagaccttcatcttcagcgagaagcccgtgttcgtgtacggcctgctgaccgagcccggcgagaagagcaccgtgttcaccatcttcggcagcaacaaggagaacgtgcacagctggctgatcctgcaggtgaacgccaccgacgccctgggcgtgccctgcaccgagaacgactacaagctgtggagccccagcgacgagagaggcaacgagtgcctgctgggccacaagaccgtgttcaagagaagaaccccccacgccacctgcttcaacggcgaggacttcgacagacccgtggtggtgagcaactgcagctgcaccagagaggactacgagtgcgacttcggcttcaagatgagcgaggacctgagcctggaggtgtgcgtgcccgaccccgagttcagcggcaagagctacagcccccccgtgccctgccccgtgggcagcacctacagaagaaccagaggctacagaaagatcagcggcgacacctgcagcggcggcgacgtggaggccagactggagggcgagctggtgccctgccccctggccgaggagaacgagttcatcctgtacgccgtgagaaagagcatctacagatacgacctggccagcggcgccaccgagcagctgcccctgaccggcctgagagccgccgtggccctggacttcgactacgagcacaactgcctgtactggagcgacctggccctggacgtgatccagagactgtgcctgaacggcagcaccggccaggaggtgatcatcaacagcggcctggagaccgtggaggccctggccttcgagcccctgagccagctgctgtactgggtggacgccggcttcaagaagatcgaggtggccaaccccgacggcgacttcagactgaccatcgtgaacagcagcgtgctggacagacccagagccctggtgctggtgccccaggagggcgtgatgttctggaccgactggggcgacctgaagcccggcatctacagaagcaacatggacggcagcgccgcctaccacctggtgagcgaggacgtgaagtggcccaacggcatcagcgtggacgaccagtggatctactggaccgacgcctacctggagtgcatcgagagaatcaccttcagcggccagcagagaagcgtgatcctggacaacctgccccacccctacgccatcgccgtgttcaagaacgagatctactgggacgactggagccagctgagcatcttcagagccagcaagtacagcggcagccagatggagatcctggccaaccagctgaccggcctgatggacatgaagatcttctacaagggcaagaacaccggcagcaacgcctgcgtgcccagaccctgcagcctgctgtgcctgcccaaggccaacaacagcagaagctgcagatgccccgaggacgtgagcagcagcgtgctgcccagcggcgacctgatgtgcgactgcccccagggctaccagctgaagaacaacacctgcgtgaagcaggagaacacctgcctgagaaaccagtacagatgcagcaacggcaactgcatcaacagcatctggtggtgcgacttcgacaacgactgcggcgacatgagcgacgagagaaactgccccaccaccatctgcgacctggacacccagttcagatgccaggagagcggcacctgcatccccctgagctacaagtgcgacctggaggacgactgcggcgacaacagcgacgagagccactgcgagatgcaccagtgcagaagcgacgagtacaactgcagcagcggcatgtgcatcagaagcagctgggtgtgcgacggcgacaacgactgcagagactggagcgacgaggccaactgcaccgccatctaccacacctgcgaggccagcaacttccagtgcagaaacggccactgcatcccccagagatgggcctgcgacggcgacaccgactgccaggacggcagcgacgaggaccccgtgaactgcgagaagaagtgcaacggcttcagatgccccaacggcacctgcatccccagcagcaagcactgcgacggcctgagagactgcagcgacggcagcgacgagcagcactgcgagcccctgtgcacccacttcatggacttcgtgtgcaagaacagacagcagtgcctgttccacagcatggtgtgcgacggcatcatccagtgcagagacggcagcgacgaggacgccgccttcgccggctgcagccaggaccccgagttccacaaggtgtgcgacgagttcggcttccagtgccagaacggcgtgtgcatcagcctgatctggaagtgcgacggcatggacgactgcggcgactacagcgacgaggccaactgcgagaaccccaccgaggcccccaactgcagcagatacttccagttcagatgcgagaacggccactgcatccccaacagatggaagtgcgacagagagaacgactgcggcgactggagcgacgagaaggactgcggcgacagccacatcctgcccttcagcacccccggccccagcacctgcctgcccaactactacagatgcagcagcggcacctgcgtgatggacacctgggtgtgcgacggctacagagactgcgccgacggcagcgacgaggaggcctgccccctgctggccaacgtgaccgccgccagcacccccacccagctgggcagatgcgacagattcgagttcgagtgccaccagcccaagacctgcatccccaactggaagagatgcgacggccaccaggactgccaggacggcagagacgaggccaactgccccacccacagcaccctgacctgcatgagcagagagttccagtgcgaggacggcgaggcctgcatcgtgctgagcgagagatgcgacggcttcctggactgcagcgacgagagcgacgagaaggcctgcagcgacgagctgaccgtgtacaaggtgcagaacctgcagtggaccgccgacttcagcggcgacgtgaccctgacctggatgagacccaagaagatgcccagcgccagctgcgtgtacaacgtgtactacagagtggtgggcgagagcatctggaagaccctggagacccacagcaacaagaccaacaccgtgctgaaggtgctgaagcccgacaccacctaccaggtgaaggtgcaggtgcagtgcctgagcaaggcccacaacaccaacgacttcgtgaccctgagaacccccgagggcctgcccgacgcccccagaaacctgcagctgagcctgcccagagaggccgagggcgtgatcgtgggccactgggccccccccatccacacccacggcctgatcagagagtacatcgtggagtacagcagaagcggcagcaagatgtgggccagccagagagccgccagcaacttcaccgagatcaagaacctgctggtgaacaccctgtacaccgtgagagtggccgccgtgaccagcagaggcatcggcaactggagcgacagcaagagcatcaccaccatcaagggcaaggtgatccccccccccgacatccacatcgacagctacggcgagaactacctgagcttcaccctgaccatggagagcgacatcaaggtgaacggctacgtggtgaacctgttctgggccttcgacacccacaagcaggagagaagaaccctgaacttcagaggcagcatcctgagccacaaggtgggcaacctgaccgcccacaccagctacgagatcagcgcctgggccaagaccgacctgggcgacagccccctggccttcgagcacgtgatgaccagaggcgtgagaccccccgcccccagcctgaaggccaaggccatcaaccagaccgccgtggagtgcacctggaccggccccagaaacgtggtgtacggcatcttctacgccaccagcttcctggacctgtacagaaaccccaagagcctgaccaccagcctgcacaacaagaccgtgatcgtgagcaaggacgagcagtacctgttcctggtgagagtggtggtgccctaccagggccccagcagcgactacgtggtggtgaagatgatccccgacagcagactgccccccagacacctgcacgtggtgcacaccggcaagaccagcgtggtgatcaagtgggagagcccctacgacagccccgaccaggacctgctgtacgccgtggccgtgaaggacctgatcagaaagaccgacagaagctacaaggtgaagagcagaaacagcaccgtggagtacaccctgaacaagctggagcccggcggcaagtaccacatcatcgtgcagctgggcaacatgagcaaggacagcagcatcaagatcaccaccgtgagcctgagcgcccccgacgccctgaagatcatcaccgagaacgaccacgtgctgctgttctggaagagcctggccctgaaggagaagcacttcaacgagagcagaggctacgagatccacatgttcgacagcgccatgaacatcaccgcctacctgggcaacaccaccgacaacttcttcaagatcagcaacctgaagatgggccacaactacaccttcaccgtgcaggccagatgcctgttcggcaaccagatctgcggcgagcccgccatcctgctgtacgacgagctgggcagcggcgccgacgccagcgccacccaggccgccagaagcaccgacgtggccgccgtggtggtgcccatcctgttcctgatcctgctgagcctgggcgtgggcttcgccatcctgtacaccaagcacagaagactgcagagcagcttcaccgccttcgccaacagccactacagcagcagactgggcagcgccatcttcagcagcggcgacgacctgggcgaggacgacgaggacgcccccatgatcaccggcttcagcgacgacgtgcccatggtgatcgcctag

SEQ ID NO: 135180 - DNA, 6645 bp, Artificial Sequence
  derived and/or modified sequence
atggcaacacggagtagccggcgggagtcaagactgcccttcctttttacattggttgcactcttgccccccggcgcgctgtgcgaggtgtggactcagcgccttcatggcggcagcgccccactcccacaagacagaggatttctggtggtccagggcgatccaagagaactgcgtttgtgggctaggggagatgcacggggggcttcgagagctgatgaaaagccgcttagaaggaaacgaagtgctgctctccaaccagagccgattaaagtgtacggccaagtcagtctgaacgactctcataaccagatggttgtccactgggccggagagaaaagcaatgttattgtggccctggcaagagattccctggctctcgcccggccaaagtcatcagacgtctacgtgagctacgactatggaaaaagctttaagaaaatcagtgacaagctgaatttcggtttgggtaaccggtcagaggccgtgatagctcagttctaccatagtccagccgataacaagcggtatatctttgccgatgcctatgcacagtacctttggatcacatttgatttctgtaataccttgcagggattctcaattccctttcgtgccgccgatttactactgcacagtaaggcctctaacttgctactagggttcgatagatctcatccaaataagcagctgtggaaatccgacgattttggacaaacatggatcatgatacaagagcacgttaaatctttcagctggggtattgacccctacgacaaaccaaataccatttacattgaacggcacgaaccgtctggttactcaacggtgttcagatcaacggatttctttcagtcacgcgagaaccaggaggtgatcctggaagaagtccgcgacttccagttaagggataagtatatgttcgctactaaagttgtgcatctattggggtctgagcagcagagcagcgtacagctgtgggtgagcttcggcaggaagcccatgcgcgctgcccagtttgttacacgccatcctattaacgaatactacattgcagatgcgagtgaggaccaggtgtttgtctgcgtgtcccatagtaacaacagaactaacctctatatctccgaagcagagggtctaaaattcagccttagcctggagaacgtgttgtattactcgcccggcggagcggggagtgataccctggtaaggtatttcgcaaatgagccttttgcggattttcaccgggtagagggtctgcaaggcgtttacattgctacattaattaatggttccatgaacgaggaaaacatgagaagtgtgataacgtttgacaaaggcggcacctgggaattcctacaggcaccggctttcactggatacggagagaaaatcaattgtgaactcagccaggggtgctccctccatttggcccaaagactgagccagcttctcaatttacagttacgacgcatgccaatactgtccaaggagagcgccccgggcctcattatcgctacggggagcgtcggaaagaatctggcctcaaaaactaacgtgtacatctccagctctgcgggcgctcggtggcgcgaggccttgccggggccccattattacacctggggcgatcacggcggaattataacagccatcgcacagggcatggagaccaatgagcttaaatacagtacaaatgaaggtgaaacttggaagacattcattttcagcgagaaaccagtttttgtctatggactcctgactgagcccggggagaagagcacggtctttactatttttggcagcaacaaggagaacgtacatagctggctgatcctgcaagtcaacgcgacggacgccttaggggtgccttgcacagagaatgactacaagttgtggagcccttccgatgagaggggaaatgaatgtctcttgggccacaaaaccgtgttcaagcgccgcacgcctcatgccacgtgcttcaacggagaggacttcgaccgaccagtggtggtgtcaaactgctcatgcaccagagaggattacgagtgcgactttggcttcaaaatgtccgaagacctgtctctagaggtctgtgtgcccgaccctgaattcagcggcaagtcttacagtccaccagttccctgtccggtcggttcaacgtataggcgaacgaggggctatcggaagatcagcggagatacctgctccggtggcgatgtagaggcgaggctcgaaggggagctggttccatgccctctggccgaagagaatgaatttattctttatgccgtgcggaagagtatctatcggtacgacctggcgtccggcgccaccgagcagttgcctcttaccggactgagggccgcagttgcgctggattttgactatgagcataattgcctatattggtcagatctggccctggatgtgatccagcgcctgtgcctgaatgggagcaccgggcaagaagtcattattaactcaggcttagagaccgtcgaagccctcgcattcgagccacttagtcagttactctactgggtggacgccgggtttaagaaaattgaagtggctaaccccgatggcgacttcagacttacaattgtcaactcaagcgtgctcgaccggccgagggccctggttcttgtgcctcaggagggggtgatgttctggaccgattggggtgacctcaagcccggcatctacagatctaatatggacggatctgctgcatatcacctcgtgtcagaggacgtaaaatggcctaacgggatatccgtcgacgaccagtggatctactggacggacgcctatcttgagtgtatcgaacgcatcacgttttcgggacaacagaggtcagtgatcctggataatctgccgcatccatatgcaatcgctgtgttcaagaacgagatttattgggatgactggagccaactcagtatctttagggcctcaaaatatagcgggagtcagatggagatcctcgccaatcaactaactggcctgatggacatgaagattttctacaagggaaagaatacgggcagcaacgcctgcgtcccaaggccctgcagtcttctgtgcttgcccaaggcaaataactcacgttcttgcagatgtcccgaggacgtgtccagctctgtcttgccctctggggatctcatgtgtgattgccctcagggataccagctaaagaataacacctgcgtcaagcaggaaaatacttgcctgaggaaccaatatagatgcagtaacgggaactgcattaacagcatatggtggtgtgactttgacaatgattgtggggacatgtctgacgagcggaactgcccgactaccatctgtgatttggacactcagtttaggtgccaggaatctgggacctgtattccactctcttacaagtgtgatctagaagacgattgtggggacaattcggatgagagccattgtgagatgcaccagtgccgttcagacgagtataattgctcttcgggcatgtgtattcgttcctcctgggtctgtgatggggacaacgattgtagagattggtccgatgaagccaactgcacagcaatttaccatacctgcgaggccagtaactttcaatgccgtaatggacactgcatcccgcagcggtgggcatgtgacggggatacggattgccaggacggaagtgacgaagacccggtgaactgcgaaaagaagtgcaacggcttccgctgtcccaacggcacatgcatcccatccagcaagcactgcgatgggcttcgggattgctccgacggcagtgatgaacagcactgtgagcccctgtgtacgcattttatggatttcgtgtgcaaaaaccgacagcagtgcctctttcattccatggtgtgcgacggcattatccaatgcagggatggcagtgatgaggatgcggcattcgcaggctgtagccaggatcccgagttccacaaggtatgtgacgagtttgggtttcagtgccagaatggagtgtgcattagcctgatctggaagtgtgacggtatggatgactgcggggactatagtgatgaggcaaattgcgaaaatcccaccgaagccccaaactgttcgagatacttccagttcaggtgcgagaacgggcactgtatcccgaatagatggaagtgtgatagggaaaacgactgtggcgactggagcgacgagaaagactgtggagatagccacatcctgcctttctccacacctgggccatcaacctgcctccccaattactatcgatgtagttctggcacctgtgtgatggatacttgggtctgtgacggatatagggactgtgcagatggctccgacgaggaggcttgcccgcttctagctaacgtgacagctgcctctacacccactcaactagggcggtgtgacagattcgagtttgagtgccatcaaccaaaaacctgcatcccgaattggaaacgttgtgacgggcaccaggattgccaagatggacgggacgaagcgaattgccccactcactcaacactgacatgcatgagcagagagttccagtgcgaggacggcgaagcctgcatcgtgctctccgagagatgcgatggattcctcgactgtagcgatgagtctgacgaaaaggcttgttctgatgagttgaccgtgtacaaagtgcagaatttgcagtggaccgctgatttcagcggcgatgtgaccctcacgtggatgcgtcctaagaaaatgcccagcgcttcctgtgtctataatgtatattatagggtagtgggagaaagcatatggaaaacactggagacccactctaacaagaccaacacagtcctaaaagtgctgaaacctgacactacctaccaggtgaaagtccaggttcagtgtttaagcaaggctcataacaccaacgacttcgtgacgcttaggacacctgagggactaccggacgccccacgtaaccttcagctatccctgcctcgcgaggccgagggagttattgttggacattgggccccccctattcatactcacgggctgataagagaatacatcgtggagtactcgcgttccggaagcaagatgtgggccagtcagcgggctgcaagcaatttcactgaaattaagaatctgcttgttaatactctatatacagtgcgcgtcgcggccgtgacctctcgcggcatcggcaattggagtgactctaagtcaataacaaccataaaaggcaaagtcatcccaccacctgatatccacatcgatagctacggcgagaactacttgtccttcacgttaactatggagtccgatatcaaggtaaatgggtacgtcgtcaacctgttctgggccttcgatacacacaagcaggagaggaggacccttaacttcagagggagtatcttgagccacaaagtgggcaatctcacagcccacacgagctacgagatatccgcctgggccaaaaccgatcttggcgacagtcccctagccttcgaacacgtaatgactcgcggtgtgcggccaccagccccttcccttaaagcaaaggcaatcaatcaaaccgcggtagaatgcacctggacaggaccacggaatgtggtgtacgggatcttttatgccacaagtttcttggatctttataggaaccctaagagtctaacaacctctctgcataacaaaaccgtgatagtgtctaaggatgaacaatacctttttctggtccgggtggtcgtgccctatcagggaccctcatctgactacgtggtggtcaaaatgattcccgacagtaggttgccccctaggcatcttcacgtcgtgcatactggaaagacaagtgtagtgatcaaatgggaatctccctatgattccccagaccaggacctgttgtacgccgttgcggtgaaggatctgatacggaaaaccgaccggagctacaaagttaaatccaggaactccacagtagagtacaccctgaacaaactggagcccggagggaaataccatattatagtgcaactcggaaatatgagtaaagactctagcattaagattacaacagtctctctgtccgcgcctgatgccttaaagatcattaccgagaacgaccatgtgctcctgttctggaagagccttgccctgaaggaaaaacacttcaacgagagccgcgggtatgagatccatatgtttgacagcgccatgaatatcactgcctacctcggaaacacaacagataactttttcaaaatatccaatctcaaaatgggccacaactacaccttcacggtgcaggccagatgcctctttggtaatcagatttgtggagagccagcaattctactgtacgatgaactggggagtggcgctgatgcttccgctacacaggccgcccgctctacagacgtagctgcagtcgtggtgcctatcctgtttcttatcttattgtcactaggtgttggttttgccatcctctacactaaacatagacggcttcagtccagtttcacagcgtttgctaattctcattacagctctcggttgggtagcgccatcttttcttctggcgatgatctgggggaggatgatgaagatgctcccatgattactgggttttcagatgatgtaccgatggtcatagcatag

SEQ ID NO: 135181 - DNA, 6645 bp, Artificial Sequence
  derived and/or modified sequence
atggccaccaggagcagcagaagagagagccggctgcccttcctgttcaccctggtggccctgctgcccccaggggccctgtgtgaggtgtggacccagaggctgcacggcggcagcgcccccctgccccaggaccggggcttcctggtggtgcagggcgacccccgggagctgcggctgtgggcccggggagatgcccggggggccagcagagcagatgagaagcccctgcggaggaagaggtctgctgccctgcagcctgagcccatcaaggtgtatggccaggtgtccctgaatgacagccacaaccagatggtggtgcactgggccggggagaagagcaatgtgattgtggccctggcccgggacagcctggccctggcccggcccaagagcagtgatgtgtatgtgtcctatgactatggcaagagcttcaagaagatcagtgacaagctgaactttggcctgggcaacagaagtgaggccgtcatcgcccagttctaccacagccctgctgacaacaagcgctacatctttgctgatgcctatgcccagtacctgtggatcacctttgacttctgcaacaccctgcagggcttcagcatccccttccgggctgctgacctgctgctgcacagcaaggccagcaacctgctgctgggctttgacaggagccaccccaacaagcagctgtggaagagtgatgactttggccagacctggatcatgatccaggagcacgtgaagagcttctcctggggcatcgacccctatgacaagcccaacaccatctacatcgagagacatgagcccagcggctacagcaccgtcttccgcagcacagacttcttccagagccgggagaaccaggaggtgatcctggaggaggtgcgggacttccagctgcgggacaagtacatgtttgccaccaaggtggtgcacctgctgggcagcgagcagcagagctctgtgcagctgtgggtgtcctttggaaggaagcccatgagagctgcccagtttgtgaccaggcaccccatcaatgagtactacatcgcagatgccagcgaggaccaggtgtttgtgtgtgtgagccacagcaacaacagaaccaacctgtacatcagcgaggccgagggcctgaagttcagcctgagcctggagaatgtgctgtactacagccctgggggcgccggcagtgacaccctggtgcgctactttgccaatgagccctttgctgacttccaccgggtggagggcctgcagggcgtgtacatcgccaccctcatcaatggctccatgaatgaggagaacatgaggagcgtcatcacctttgacaagggcggcacctgggagttcctgcaggccccagccttcaccggctatggagagaagatcaactgtgagctgagccagggctgcagcctgcacctggcccagaggctgagccagctgctgaacctgcagctgcggaggatgcccatcctgagcaaggagagcgcccctggcctcatcatcgccactggatctgtgggcaagaacctggccagcaagaccaacgtgtacatcagcagcagcgctggggcccgctggagggaggccctgcccggcccccactactacacctggggagaccatggaggcatcatcacagccatcgcccagggcatggagaccaatgagctgaagtacagcaccaatgaaggagagacctggaagaccttcatcttcagcgagaagcctgtgtttgtgtatggcctgctgacagagcccggggagaagagcacagtgttcaccatcttcggcagcaacaaggaaaatgtgcacagctggctgatcctgcaggtgaatgccacagatgccctgggcgtgccctgcacagaaaatgactacaagctgtggagccccagtgatgaaagaggaaatgaatgtctgctgggccacaagacagtgttcaagaggaggacccctcatgccacctgcttcaacggggaggactttgacaggcctgtggtggtgagcaactgcagctgcacccgggaggactatgaatgtgactttggcttcaagatgtctgaggacctgagcctggaggtgtgtgtgcctgaccctgagttcagcggcaagagctacagcccccctgtgccctgccctgtgggcagcacctacagaaggacccggggctacaggaagatcagcggggacacctgcagcggaggagatgtggaggcccggctggagggggagctggtgccctgccccctggccgaggagaatgagttcatcctgtatgctgtgaggaagagcatctaccgctatgacctggccagcggggccacagagcagctgcccctgaccggcctgcgggctgctgtggccctggactttgattatgagcacaactgcctgtactggagcgacctggccctggatgtgatccagaggctgtgcctgaatggcagcacaggccaggaggtgatcatcaacagcggcctggagaccgtggaggccctggcctttgagcccctgagccagctgctgtactgggtggatgctggcttcaagaagattgaggtggccaacccagatggagacttccggctgaccatcgtgaacagctctgtgctggaccggccccgggccctggtgctggtgccccaggagggcgtgatgttctggacagactggggagacctgaagccaggcatctaccgcagcaacatggatggcagcgctgcctaccacctggtgtctgaagatgtgaagtggcccaacggcatctctgtggatgaccagtggatctactggacagatgcctacctggagtgcatcgagcgcatcaccttcagcggccagcagaggagcgtcatcctggacaacctgccccacccctatgccatcgctgtgttcaagaatgagatctactgggatgactggagccagctgagcatcttccgggccagcaagtacagcggcagccagatggagatcctggccaaccagctgaccggcctgatggacatgaagatcttctacaagggcaagaacacaggcagcaatgcctgtgtgccccggccctgcagcctgctgtgcctgcccaaggccaacaacagccgcagctgccgctgcccagaagatgtgagcagctctgtgctgcccagcggggacctgatgtgtgactgcccccagggctaccagctgaagaacaacacctgtgtgaagcaggagaacacctgcctgaggaaccagtaccgctgcagcaatggaaactgcatcaacagcatctggtggtgtgactttgacaatgactgtggggacatgtctgatgagaggaactgccccaccaccatctgtgacctggacacccagttccgctgccaggagagcggcacctgcatccccctgagctacaagtgtgacctggaggatgactgtggggacaacagtgatgagagccactgtgagatgcaccagtgccgcagtgatgagtacaactgcagcagcggcatgtgcatccgcagctcctgggtgtgtgatggagacaatgactgccgggactggagcgatgaggccaactgcacagccatctaccacacctgtgaggccagcaacttccagtgcagaaatggccactgcatcccccagcgctgggcctgtgatggagacacagactgccaggacggcagtgatgaggaccctgtgaactgtgagaagaagtgcaatggcttccgctgccccaacggcacctgcatccccagcagcaagcactgtgatggcctgcgggactgcagtgatggcagtgatgagcagcactgtgagcccctgtgcacccacttcatggactttgtgtgcaagaaccggcagcagtgcctcttccacagcatggtgtgtgatggcatcatccagtgcagagatggcagtgatgaagatgctgcctttgctggctgcagccaggaccctgagttccacaaggtgtgtgatgaatttggcttccagtgccagaatggagtgtgcatcagcctcatctggaagtgtgatggcatggatgactgtggggactacagtgatgaggccaactgtgagaaccccacagaggcccccaactgcagccgctacttccagttccgctgtgaaaatggccactgcatccccaaccgctggaagtgtgacagagaaaatgactgtggggactggagcgatgagaaggactgtggggacagccacatcctgcccttcagcaccccaggccccagcacctgcctgcccaactactaccgctgcagcagcggcacctgtgtgatggacacctgggtgtgtgatggctacagagactgtgctgatggcagtgatgaggaggcctgccccctgctggccaacgtgacagctgccagcacccccacccagctgggccgctgtgacagatttgaatttgagtgccaccagcccaagacctgcatccccaactggaagagatgtgatggccaccaggactgccaggacggcagagatgaggccaactgccccacccacagcaccctgacctgcatgagccgggagttccagtgtgaagatggagaggcctgcatcgtgctgtctgagcgctgtgatggcttcctggactgcagtgatgaaagtgatgagaaggcctgcagtgatgagctgactgtgtacaaggtgcagaacctgcagtggacagctgacttctctggagatgtgaccctgacctggatgaggcccaagaagatgcccagcgccagctgtgtgtacaacgtgtactacagagtggtgggggagagcatctggaagaccctggagacccacagcaacaagaccaacacagtgctgaaggtgctgaagccagacaccacctaccaggtgaaggtgcaggtgcagtgcctgagcaaggcccacaacaccaatgactttgtgaccctgcggaccccagagggcctgcctgatgcccccaggaacctgcagctgagcctgccccgggaggccgagggcgtgattgtgggccactgggccccacccatccacacccacggcctcatccgggagtacatcgtggagtacagccgcagcggcagcaagatgtgggccagccagagagctgccagcaacttcacagagatcaagaacctgctggtgaacaccctgtacacagtgcgggtggccgctgtgaccagccggggcatcggcaactggagcgacagcaagagcatcaccaccatcaagggcaaggtgattcctcctccagacatccacatcgacagctatggagagaactacctgtccttcaccctgaccatggagagtgacatcaaggtgaatggctacgtggtgaacctcttctgggcctttgacacccacaagcaggagaggaggaccctgaacttccggggcagcatcctgagccacaaggtgggcaacctgacagcccacaccagctatgagatcagcgcctgggccaagacagacctgggggacagccccctggcctttgaacatgtgatgacccggggcgtgcggcccccagcccccagcctgaaggccaaggccatcaaccagacagctgtggagtgcacctggacaggccccagaaatgtggtgtatggcatcttctacgccaccagcttcctggacctgtacagaaaccccaagagcctgaccaccagcctgcacaacaagacagtcatcgtgtccaaggatgagcagtacctgttcctggtgcgggtggtggtgccctaccagggccccagcagtgactatgtggtggtgaagatgatcccagacagccggctgccccccaggcacctgcacgtggtgcacacaggcaagacctctgtggtgatcaagtgggagagcccctatgacagcccagaccaggacctgctgtatgctgtggccgtgaaggacctgatcaggaagacagacaggagctacaaggtgaagagcaggaacagcacagtggagtacaccctgaacaagctggagcccggcggcaagtaccacatcatcgtgcagctgggcaacatgagcaaggacagcagcatcaagatcaccaccgtgtccctgagcgccccagatgccctgaagatcatcacagaaaatgaccacgtgctgctcttctggaagagcctggccctgaaggagaagcacttcaatgaaagccggggctatgagatccacatgtttgacagcgccatgaacatcacagcctacctgggcaacaccacagacaacttcttcaagatcagcaacctgaagatgggccacaactacaccttcaccgtgcaggcccgctgcctgtttggaaaccagatctgtggggagcccgccatcctgctgtatgatgagctgggcagcggggctgatgccagcgccacccaggccgcccggagcacagatgtggccgctgtggtggtgcccatcctcttcctgatcctgctgagcctgggcgtgggctttgccatcctgtacaccaagcaccggcggctgcagagcagcttcaccgcctttgccaacagccactacagcagccggctgggcagcgccatcttcagcagtggagatgacctgggggaggatgatgaagatgcccccatgatcaccggcttcagtgatgatgtgcccatggtgattgcctag

SEQ ID NO: 135182 - DNA, 6645 bp, Artificial Sequence
  derived and/or modified sequence
atggccacccggagcagccggcgggagagccggctgcccttcctgttcaccctcgtggctctcctgccacctggcgccctttgtgaagtgtggacacagcgtctgcacgggggctcagcaccactgcctcaggacagaggattccttgttgttcagggcgaccctcgagagctgcgactctgggctaggggtgatgctagaggtgcctctagggcagatgaaaaaccactgcgtagaaagcgcagcgcagccttacagcccgagcccatcaaagtgtacggccaagtgagtctgaacgatagccacaatcaaatggtggtccattgggccggcgaaaaatcgaatgtgattgttgctttagcaagggactctctggccctggcgcggccaaagagttcagacgtgtatgtgtcgtacgattacggaaaaagctttaaaaagatctctgacaagcttaacttcgggcttggtaatagatcagaggccgttatcgcccagttctaccacagccccgcggataacaagaggtacatctttgctgacgcatatgcacagtacctatggataaccttcgatttctgtaacacacttcaggggttcagcatcccatttcgggccgcggacctgctgctccatagcaaagcgagtaatctgctgctcggattcgatcgaagccatccaaacaaacagctatggaagagcgacgacttcgggcagacatggattatgatccaggagcatgtaaagagctttagctggggcattgacccctacgacaaacctaataccatctatattgaacgccacgagccatcaggttactcaaccgttttcagaagtacggacttcttccaatccagggagaatcaggaggtcatcctcgaggaagtgcgcgatttccagctgcgggacaaatatatgttcgcgacaaaagtggtgcaccttcttggaagtgagcagcagtccagtgtccagttgtgggtaagttttggccggaagccgatgcgtgccgctcagttcgttacaaggcatcccatcaatgagtactacatcgccgatgcttccgaagaccaggttttcgtctgcgttagtcactccaataatcgtactaatctgtatatctcagaggctgaagggctgaagttttccctctccctggagaatgtcctgtactattcgcctggaggcgcagggtcggatacgcttgtccgctatttcgccaatgagccttttgctgacttccatagggtcgaagggctgcaaggcgtgtacatcgctacactgatcaacggatcgatgaacgaggagaacatgcggtctgttattacctttgacaagggtgggacttgggaattcttacaggccccagcgttcactggttatggggaaaaaataaattgtgaactgagccagggatgctcgctccatcttgcccaaaggctgagtcaacttcttaatctgcaattgaggcgtatgcccattctgtccaaagaatccgcccctgggctgatcattgctacagggtcagtcgggaagaatctggcatccaagaccaacgtttacatcagctcttcagccggggcacgctggcgggaagcccttcctggtccacattactatacctggggggatcatggaggaataattaccgcgatcgcccaaggcatggaaacgaacgagctcaagtattccactaatgaaggggagacttggaaaacatttattttcagcgaaaaacctgtatttgtatatggccttcttaccgagcccggagagaagtctaccgtgttcactattttcggaagtaataaggagaatgtgcactcttggttgattctccaggtaaatgcaacggacgctctaggagtcccctgcacggaaaatgactataagttgtggtcaccgtccgatgagcgcgggaatgagtgtctactcggccacaaaacagtattcaagaggagaacccctcatgccacgtgctttaatggggaggacttcgatagacccgtggttgtgagcaactgttcctgcaccagggaggactatgagtgcgacttcggtttcaagatgtctgaggatctcagcctggaagtgtgcgtaccggaccccgagtttagcggcaagtcctattcccctcccgtgccttgccctgttggatctacttatcggcggaccagaggttacaggaagatttccggcgatacatgttccggaggcgacgtggaagctagacttgagggtgagttggtcccttgccccttggccgaggaaaacgagttcatactgtatgctgtccgcaagagcatatatagatatgacctggcttcaggtgcgactgaacagctcccactgaccgggctccgcgccgccgtggctctggatttcgactatgaacataactgtctatattggagcgatcttgctcttgatgtcattcaaagattatgccttaatgggtccactggacaagaggtcattatcaactccgggcttgagacagtggaggcgttggcctttgagccgctgtctcaactattgtattgggtggatgctggcttcaagaagattgaagttgccaacccagatggggactttcgactgaccatcgtcaacagtagcgttctggataggccacgggcgctggttctggtacctcaagaaggagttatgttctggacggactggggcgatctcaagcccggcatttatagatccaacatggacggttccgcagcataccatctggtcagcgaggatgtgaaatggccaaacgggattagcgtggatgatcagtggatttactggaccgatgcgtatttggagtgtatcgagagaatcacgttctctggccagcagagatctgtgatcttggataaccttccccacccatatgctattgcagtatttaagaacgagatctattgggatgactggtctcagttgtccattttcagggcaagcaagtacagtggctcccagatggagatcctggcaaaccaacttaccggcctgatggatatgaagattttctataaaggcaaaaataccggtagcaatgcttgtgtgccgcgcccctgctctctgctgtgtttgcctaaggccaataactcacgtagctgccgttgtccagaggacgtgtcatcaagtgtacttcctagcggcgacctgatgtgcgactgccctcaaggatatcaactaaagaacaatacatgtgttaaacaagagaacacgtgtttgaggaaccagtatcgatgtagcaacggcaactgcatcaactctatctggtggtgtgacttcgacaatgattgtggggatatgtctgatgaacgtaactgtccaaccaccatctgcgatctcgacacccagttccggtgtcaggagagcggcacctgtataccactgtcttataagtgtgatctcgaggacgattgcggtgacaactccgacgagtctcactgtgaaatgcaccagtgtaggagcgacgagtataattgctcctcgggcatgtgtattagatcatcatgggtgtgcgatggggacaatgactgtcgagactggagcgatgaagcaaactgtacagccatataccatacctgtgaagcgtcgaactttcaatgtagaaacgggcactgcatcccccagcgctgggcctgcgacggggataccgattgccaggatggctcagatgaggaccccgtgaattgcgagaaaaagtgcaatggctttaggtgccctaatggcacatgtatcccatcatcaaagcactgtgatggccttcgagactgtagcgacggtagcgacgagcagcactgcgagcccctgtgcacccacttcatggacttcgtctgcaaaaatagacagcagtgcctgttccattctatggtttgtgacggcatcattcagtgcagggacgggagcgatgaggacgcagcattcgccgggtgttcacaagatcccgagttccataaggtttgtgacgaatttggattccagtgccagaacggggtctgtataagtctcatctggaagtgtgacggtatggacgactgtggcgattacagcgatgaggccaactgtgagaaccccacggaggcaccgaattgttccagatacttccagtttcgctgtgagaacggccattgcattccaaatagatggaagtgcgatcgtgaaaacgattgtggggactggtccgatgagaaggactgcggcgactcacatatccttcctttctcaaccccgggaccgagcacttgccttcccaactattatcggtgctcctctggcacctgcgttatggatacttgggtatgcgatggatatagggattgcgccgacggtagcgacgaggaagcatgccctctgctcgcgaacgttacggccgcctccactcctacccagttgggacgatgtgataggtttgagttcgagtgccaccagccaaagacctgtattccgaactggaagaggtgtgacgggcatcaagactgccaagacggaagggatgaggcaaattgtcccactcactctacactgacatgtatgtcgcgcgagttccagtgcgaggacggtgaagcctgcatagtcctaagcgagagatgtgatggcttcctggattgctctgacgagagcgacgaaaaggcttgcagcgatgagctgactgtgtataaggtacagaacctccagtggactgccgactttagcggggatgttactcttacctggatgcggccaaaaaagatgcccagtgcgtcctgtgtatataacgtttactatcgggtggtgggagaatctatatggaaaaccctcgagactcattccaataagaccaacacagtactgaaggtgctgaagcctgacactacataccaggtgaaagtccaggtccagtgtctgtccaaagctcacaataccaacgactttgttacactccggaccccggaaggcttgccagatgccccaaggaacctgcagttaagtctccctcgcgaagcagagggggtcattgttggccattgggcgcctcctatccatacccatggcctgatcagggagtatatagtcgaatatagtagatcgggttctaagatgtgggcatcacagagagccgcctctaacttcacagaaattaaaaacctcttagtaaacaccctttacacagttagagtcgcagccgtgacctcccgcggcatcgggaattggagtgatagcaaaagcattactactattaaaggaaaagtaatccccccgcccgatatccacatagatagttacggagagaattatttgagtttcactctcacaatggagagcgacatcaaggtaaacggctacgtggtcaatctattttgggccttcgacactcacaagcaagagagacgcacgctcaactttaggggttcgatcctgtctcataaggtaggaaatcttaccgcccacacctcatacgagatctccgcctgggctaagactgatctcggcgattcgccccttgctttcgagcatgtcatgacaaggggcgtgcggccacccgctccgagtctgaaggccaaggctatcaatcagaccgccgtggaatgtacctggacagggccaaggaatgtggtctatggaatcttttacgcgaccagctttctggacctgtacagaaatcccaagtccctgactacatcactgcacaacaaaaccgtcatcgtttcaaaggatgagcagtacctcttcctggtgagagtcgtggtcccctaccagggcccctcctcggactatgtagtggtcaagatgataccagatagtcgattaccgccaagacacttgcatgtggtgcatacaggcaagacaagtgtggtgatcaaatgggaatcaccttacgattccccagaccaggacttgctttacgcggtcgcagtaaaggatctcattaggaagacggatagatcttataaagtcaaatcaagaaatagcaccgtggagtacaccttaaacaagcttgaaccaggcggcaagtaccatattattgtgcagctgggtaacatgtcaaaagactcttccatcaaaataacaacggtgagtctgagtgccccagacgctctgaaaatcatcactgaaaacgatcacgtactgttgttttggaagagtctggcgcttaaggagaagcattttaacgaaagccgggggtacgaaatccatatgttcgactcagctatgaatataacagcgtacttggggaacactacagacaatttctttaagataagtaatttaaaaatggggcacaactatacgtttaccgtgcaggcacggtgcctgttcggcaaccaaatctgtggcgaaccagccatcctcctgtacgatgagctcggaagcggtgctgatgcgagtgctacacaggccgccagatcaaccgatgtcgccgccgtggtggtgccaatcctgttcctgatactgctaagtctgggggtgggctttgctatcctatacactaaacataggaggcttcagagctcatttacggcctttgctaattcccattactcctctcgtctaggcagcgccatttttagttcaggggacgatctgggtgaagacgatgaagacgcacctatgatcactggcttttcagatgacgtgcctatggttattgcttag

SEQ ID NO: 135183 - DNA, 105 bp, Artificial Sequence
  derived and/or modified sequence
atgtctgattctaaggagccaaggctgcagcaactgggcctgctcgaagaagaacaactccggggactgggcttcagacagaccaggcggaatcagaaatgctag

SEQ ID NO: 135184 - DNA, 6644 bp, Artificial Sequence
  derived and/or modified sequence
atggcaacccgaagctcccgaagggagtcccggctcccttttttgtttaccttggtagccttgctgcctcccggagccttgtgtgaggtttggacacagagactgcacgggggttcggctccactgccgcaggacaggggattcttggtggtccaaggtgaccctagggaactacgcctgtgggcaaggggggatgcccgtggagcctcgcgggcagacgaaaagccactgcgtcggaaacggtctgctgcccttcaaccagagcctatcaaggtgtatgggcaggtgagtttaaacgatagccacaatcagatggtcgtgcactgggcaggcgagaagtctaatgttattgtggctcttgcccgtgacagcttggctctagcgaggccaaagtcgtctgatgtgtacgtgagctatgactacggtaaaagttttaaaaagattagtgataaactcaactttggattgggcaaccgctctgaggcagtgattgctcagttttatcattcccccgcagacaacaagagatacatatttgcagatgcatacgcccagtacttatggatcacatttgatttttgtaatacactgcagggtttcagtatacccttcagagccgcagacctgctgctgcacagcaaggcttccaacctgctgcttgggtttgacagaagccaccccaacaaacagctctggaagtctgacgactttggacaaacctggattatgatccaggagcacgtcaaaagttttagctgggggatcgatccctacgacaaacctaatactatatacattgagcggcatgagcccagtggttatagcacagttttccgaagcacagatttttttcagagtagagagaatcaagaagtgatcctggaagaagtcagggacttccagctgcgcgataagtatatgttcgccacaaaagtcgttcacctgctaggctctgaacagcagagttcagttcagttatgggtgtcctttgggaggaaacccatgcgagccgctcaattcgtcacacggcacccaataaatgaatattacatcgctgatgcctcagaagaccaggtttttgtgtgtgtgagtcactccaataacaggactaatttatacatctcggaagcagaagggttgaaattctctctatcactcgaaaacgtcctgtattatagtccaggtggggcaggttccgacacccttgtgaggtatttcgcaaatgaaccattcgctgatttccacagagtcgaaggcttgcaaggagtctatatagccaccctgatcaacggcagcatgaatgaagagaacatgcggagcgtaattacattcgacaagggtggaacttgggagttcttgcaggcacccgcattcaccggatacggggagaagatcaactgtgaactaagccaggggtgctctctacacctggcgcagagactgagccagctgctgaacctacagttgagaaggatgcccattctcagcaaagagtccgcccctgggctgatcatcgccactgggagtgtggggaagaacctcgccagcaaaacaaacgtctacatttcgtcttcagccggtgctaggtggcgtgaggctctccctgggcctcactattatacctggggagatcacgggggaataattaccgccatcgcccagggcatggagaccaatgaactcaagtactccacaaatgaaggtgaaacgtggaagacattcatcttctctgagaagccggtgtttgtctacgggctcctgacagaaccaggcgaaaagagcacagtgttcaccatattcggctctaacaaggagaatgtccacagctggcttatcctgcaggttaacgcaaccgatgcactaggtgtgccttgcaccgaaaacgactacaagttgtggtcacccagcgacgagaggggtaatgagtgtcttctcgggcacaagacggtgtttaaacgtcgcacacctcacgcgacatgctttaacggcgaggacttcgatcgcccagtggtggtcagtaactgctcctgcacacgggaagattatgaatgtgactttggtttcaagatgagcgaggatctcagtctggaagtttgtgttcctgatccagaattcagcggcaagtcttatagtccccctgttccatgtcctgtcggttccacctacagacgaacacgagggtaccgaaagattagcggcgatacttgcagcggcggtgacgtcgaggccagactggaaggggaattggtgccctgtccattagctgaggagaatgagtttatattgtacgcagtgcggaaatccatataccggtacgacctggcgtcaggggctacagaacaattgccactcaccggactccgggctgctgttgcccttgactttgactatgagcacaactgtctgtattggtctgacctcgcactcgatgtgatccagcggctgtgtttaaacggcagcacggggcaagaggtgatcataaatagcgggttggaaaccgttgaggcactggcatttgagcccctctcccagttgctgtactgggtggacgccggattcaagaagattgaagtggccaatccggacggagatttccgcctgacaatagttaattctagcgtcctggacaggcccagagccctagtacttgtgccccaggagggagtcatgttttggacagattggggggacctgaaacccggaatctacagaagcaatatggatggttctgctgcctaccacctggttagcgaagacgttaagtggcccaatggaatctccgttgacgatcagtggatctattggaccgatgcttacctggaatgtatcgagaggataacattcagcggccagcagagaagtgtcatcttggataacttgcctcacccctacgccattgcagtctttaagaacgaaatttactgggacgactggagtcagttgtccatcttccgcgcatcaaagtactctggatcccagatggaaatcctcgccaaccaattaaccggcctcatggacatgaagattttttataaggggaagaatactggcagcaacgcttgcgtgccgagaccttgtagtctactgtgtcttcctaaggccaacaacagcaggagctgtaggtgccccgaggatgtgtcctcatcggttctgccgagcggcgatctgatgtgcgactgtcctcaggggtaccagctcaaaaacaacacatgcgttaaacaagaaaatacctgcctacggaaccaatacaggtgttccaacggtaattgcatcaacagcatttggtggtgcgacttcgacaacgactgtggagatatgtctgatgaacgtaactgccccacaactatatgtgatttagacacccagtttcgctgtcaagagagcggaacctgtattcccttgagctataaatgtgacctcgaggacgactgcggagataatagcgatgagtcccattgcgagatgcatcaatgtagatccgacgaatacaattgcagttccggcatgtgcatccgctcttcctgggtgtgcgatggcgacaacgattgccgggattggagcgatgaggcaaactgcaccgcgatctaccatacctgcgaagcttccaacttccagtgccggaacgggcactgtattccccagcgctgggcctgtgatggcgacactgattgtcaggatggcagtgacgaggacccagtaaattgtgaaaaaaagtgtaacggattccgctgcccaaacgggacgtgcattccatcgtccaaacactgcgacggcctccgcgactgcagcgatgggtcagacgaacagcattgtgagccgttgtgtacacatttcatggattttgtgtgcaagaataggcagcaatgtctgtttcactctatggtgtgtgatggtatcatacagtgtcgagacggaagtgacgaagacgccgctttcgcaggttgctcacaggatcctgaattccataaagtctgcgacgaatttggctttcagtgccagaacggcgtctgcatttcgttgatctggaaatgcgacggaatggacgactgcggtgattatagcgatgaagccaactgtgagaacccgaccgaggcccctaactgtagtagatatttccagttcagatgtgaaaatggccactgtattccaaaccgctggaagtgcgatcgcgagaacgattgcggagattggagtgatgagaaggactgcggggatagccacattctcccgttttcaacccccggaccttcaacctgcctccctaattactatagatgtagttccggcacatgtgtcatggatacttgggtctgcgatggatatagggactgtgctgatggttcagacgaagaagcgtgccccctgctggcaaatgtcacagctgcctctactcctacacagcttggtcgatgtgatcgctttgaattcgagtgccaccagcctaaaacttgcataccaaactggaaaaggtgcgatgggcatcaggattgtcaggatggtagagacgaagctaactgcccaactcattcgacgctaacctgcatgtccagagagttccaatgcgaggacggcgaagcctgcattgtactctccgagcgctgtgacgggttcctggattgttcagatgaatctgacgagaaagcttgtagtgatgaactgactgtctataaggtacagaatctgcagtggaccgccgacttttctggcgacgtaacactcacatggatgaggcctaaaaagatgcccagcgctagctgcgtgtataatgtgtattatcgagtagtgggcgagtctatctggaagacactggagacccattccaataaaactaacaccgtcctgaaagtactgaagccagacactacctaccaggttaaggtccaagtgcagtgcctcagcaaggcccacaataccaacgactttgttaccctccggacccctgaaggcctgcccgatgcccctcgaaacttacagctcagcctgcccagggaggccgaaggggtcatagtaggacattgggcaccccctatacatacgcacggtctcatcagagagtacattgtcgaatattctcggagcggttctaagatgtgggccagccagagagccgcttctaattttacagagataaagaacctgttggtcaataccctgtacacagttcgggtggctgcggttacaagtagaggcatcgggaactggagcgacagcaagtccatcacaactattaagggaaaggtgattccgcctcccgacatccatatcgactcgtacggggagaactacctaagtttcacgttgaccatggaatccgatatcaaggtgaatggatacgtggttaatctcttttgggctttcgacacacacaagcaggaacgcagaaccctgaacttcagaggctccattctgagccataaggtgggaaacttaaccgcccacaccagctatgagatatctgcctgggccaaaaccgacctgggggactcccccctcgcatttgagcacgtgatgactcgcggagtgagacctcctgccccttcccttaaggccaaggccatcaaccagactgctgtggagtgcacttggacaggcccacggaatgtcgtctacggcatcttctacgcgaccagttttctggacctgtataggaaccctaagtccctgactacatctttgcacaataaaaccgtgatcgtgtctaaggatgaacaatacctgttccttgtccgcgtcgtggtcccttaccagggacccagttccgattacgttgtggtcaaaatgatcccggacagcaggctaccaccccgtcacctccatgtggtacataccggtaagacaagtgtggtaattaaatgggagtccccatatgactccccagaccaggatctgctttacgctgtggcagtgaaggacctgatccggaaaacagatcgcagctataaggtgaaaagcagaaactcaacagtagagtacacactgaacaagctggagccgggtggcaagtatcatatcatagtgcaacttggaaatatgtcaaaggactcttctatcaagatcactacagtatctctgagtgccccagatgcacttaagattatcacagaaaatgaccatgtcttactgttttggaagtccctggccctgaaagaaaagcattttaatgagagtagaggctatgaaatccacatgttcgatagcgcgatgaacatcacagcctacctaggaaatacaaccgataattttttcaagataagcaatttgaaaatggggcacaattatacattcacggtacaggctcggtgcttgtttggcaaccagatctgcggggagccggcaattctgttatatgatgaactgggaagtggagctgacgcctctgctacgcaggcggctcggagtaccgatgtggccgcagttgtggtccctattctgtttctgatcctgttgagtctcggcgttggattcgccatcctctatactaaacaccgccgattgcagtccagttttaccgcatttgctaattctcattacagctctcggctaggatccgctatttttagctccggcgatgatctgggggaggacgacgaagatgcgcctatgataaccggtttttccgatgacgtcccaatggtgattgcgta

SEQ ID NO: 135185 - DNA, 10889 bp, Artificial Sequence
  derived and/or modified sequence
cccggagcggcgcgggcggcctggagccccgggagcggcgcgcgcggtcccggcccagcggctctcctggcctcgcgctgcacattctctcctggcggcggcgccacctgcagtagcgttcgcccgaacatggcgacacggagcagcaggagggagtcgcgactcccgttcctattcaccctggtcgcactgctgccgcccggagctctctgcgaagtctggacgcagaggctgcacggcggcagcgcgcccttgccccaggaccggggcttcctcgtggtgcagggcgacccgcgcgagctgcggctgtgggcgcgcggggatgccaggggggcgagccgcgcggacgagaagccgctccggaggaaacggagcgctgccctgcagcccgagcccatcaaggtgtacggacaggttagtctgaatgattcccacaatcagatggtggtgcactgggctggagagaaaagcaacgtgatcgtggccttggcccgagatagcctggcattggcgaggcccaagagcagtgatgtgtacgtgtcttacgactatggaaaatcattcaagaaaatttcagacaagttaaactttggcttgggaaataggagtgaagctgttatcgcccagttctaccacagccctgcggacaacaagcggtacatctttgcagacgcttatgcccagtacctctggatcacgtttgacttctgcaacactcttcaaggcttttccatcccatttcgggcagctgatctcctcctacacagtaaggcctccaaccttctcttgggctttgacaggtcccaccccaacaagcagctgtggaagtcagatgactttggccagacctggatcatgattcaggaacatgtcaagtccttttcttggggaattgatccctatgacaaaccaaataccatctacattgaacgacatgaaccctctggctactccactgtcttccgaagtacagatttcttccagtcccgggaaaaccaggaagtgatccttgaggaagtgagagattttcagcttcgggacaagtacatgtttgctacaaaggtggtgcatctcttgggcagtgaacagcagtcttctgtccagctctgggtctcctttggccggaagcccatgagagcagcccagtttgtcacaagacatcctattaatgaatattacatcgcagatgcctccgaggaccaggtgtttgtgtgtgtcagccacagtaacaaccgcaccaatttatacatctcagaggcagaggggctgaagttctccctgtccttggagaacgtgctctattacagcccaggaggggccggcagtgacaccttggtgaggtattttgcaaatgaaccatttgctgacttccaccgagtggaaggattgcaaggagtctacattgctactctgattaatggttctatgaatgaggagaacatgagatcggtcatcacctttgacaaagggggaacctgggagtttcttcaggctccagccttcacgggatatggagagaaaatcaattgtgagctttcccagggctgttcccttcatctggctcagcgcctcagtcagctcctcaacctccagctccggagaatgcccatcctgtccaaggagtcggctccaggcctcatcatcgccactggctcagtgggaaagaacttggctagcaagacaaacgtgtacatctctagcagtgctggagccaggtggcgagaggcacttcctggacctcactactacacatggggagaccacggcggaatcatcacggctattgcccagggcatggaaaccaacgagctaaaatacagtaccaatgaaggggagacctggaaaacattcatcttctctgagaagccagtgtttgtgtatggcctcctcacagaacctggggagaagagcactgtcttcaccatctttggctcgaacaaagagaatgtccacagctggctgatcctccaggtcaatgccacggatgccttgggagttccctgcacagagaatgactacaagctgtggtcaccatctgatgagcgggggaatgagtgtttgctgggacacaagactgttttcaaacggcggaccccccatgccacatgcttcaatggagaggactttgacaggccggtggtcgtgtccaactgctcctgcacccgggaggactatgagtgtgacttcggtttcaagatgagtgaagatttgtcattagaggtttgtgttccagatccggaattttctggaaagtcatactcccctcctgtgccttgccctgtgggttctacttacaggagaacgagaggctaccggaagatttctggggacacttgtagcggaggagatgttgaagcgcgactggaaggagagctggtcccctgtcccctggcagaagagaacgagttcattctgtatgctgtgaggaaatccatctaccgctatgacctggcctcgggagccaccgagcagttgcctctcaccgggctacgggcagcagtggccctggactttgactatgagcacaactgtttgtattggtccgacctggccttggacgtcatccagcgcctctgtttgaatggaagcacagggcaagaggtgatcatcaattctggcctggagacagtagaagctttggcttttgaacccctcagccagctgctttactgggtagatgcaggcttcaaaaagattgaggtagctaatccagatggcgacttccgactcacaatcgtcaattcctctgtgcttgatcgtcccagggctctggtcctcgtgccccaagagggggtgatgttctggacagactggggagacctgaagcctgggatttatcggagcaatatggatggttctgctgcctatcacctggtgtctgaggatgtgaagtggcccaatggcatctctgtggacgaccagtggatttactggacggatgcctacctggagtgcatagagcggatcacgttcagtggccagcagcgctctgtcattctggacaacctcccgcacccctatgccattgctgtctttaagaatgaaatctactgggatgactggtcacagctcagcatattccgagcttccaaatacagtgggtcccagatggagattctggcaaaccagctcacggggctcatggacatgaagattttctacaaggggaagaacactggaagcaatgcctgtgtgcccaggccatgcagcctgctgtgcctgcccaaggccaacaacagtagaagctgcaggtgtccagaggatgtgtccagcagtgtgcttccatcaggggacctgatgtgtgactgccctcagggctatcagctcaagaacaatacctgtgtcaaacaagagaacacctgtcttcgcaaccagtatcgctgcagcaacgggaactgtatcaacagcatttggtggtgtgactttgacaacgactgtggagacatgagcgatgagagaaactgccctaccaccatctgtgacctggacacccagtttcgttgccaggagtctgggacttgtatcccactgtcctataaatgtgaccttgaggatgactgtggagacaacagtgatgaaagtcattgtgaaatgcaccagtgccggagtgacgagtacaactgcagttccggcatgtgcatccgctcctcctgggtatgtgacggggacaacgactgcagggactggtctgatgaagccaactgtaccgccatctatcacacctgtgaggcctccaacttccagtgccgaaacgggcactgcatcccccagcggtgggcgtgtgacggggatacggactgccaggatggttccgatgaggatccagtcaactgtgagaagaagtgcaatggattccgctgcccaaacggcacttgcatcccatccagcaaacattgtgatggtctgcgtgattgctctgatggctccgatgaacagcactgcgagcccctctgtacgcacttcatggactttgtgtgtaagaaccgccagcagtgcctgttccactccatggtctgtgacggaatcatccagtgccgcgacgggtccgatgaggatgcggcgtttgcaggatgctcccaagatcctgagttccacaaggtatgtgatgagttcggtttccagtgtcagaatggagtgtgcatcagtttgatttggaagtgcgacgggatggatgattgcggcgattattctgatgaagccaactgcgaaaaccccacagaagccccaaactgctcccgctacttccagtttcggtgtgagaatggccactgcatccccaacagatggaaatgtgacagggagaacgactgtggggactggtctgatgagaaggattgtggagattcacatattcttcccttctcgactcctgggccctccacgtgtctgcccaattactaccgctgcagcagtgggacctgcgtgatggacacctgggtgtgcgacgggtaccgagattgtgcagatggctctgacgaggaagcctgccccttgcttgcaaacgtcactgctgcctccactcccacccaacttgggcgatgtgaccgatttgagttcgaatgccaccaaccgaagacgtgtattcccaactggaagcgctgtgacggccaccaagattgccaggatggccgggacgaggccaattgccccacacacagcaccttgacttgcatgagcagggagttccagtgcgaggacggggaggcctgcattgtgctctcggagcgctgcgacggcttcctggactgctcggacgagagcgatgaaaaggcctgcagtgatgagttgactgtgtacaaagtacagaatcttcagtggacagctgacttctctggggatgtgactttgacctggatgaggcccaaaaaaatgccctctgcttcttgtgtatataatgtctactacagggtggttggagagagcatatggaagactctggagacccacagcaataagacaaacactgtattaaaagtcttgaaaccagataccacgtatcaggttaaagtacaggttcagtgtctcagcaaggcacacaacaccaatgactttgtgaccctgaggaccccagagggattgccagatgcccctcgaaatctccagctgtcactccccagggaagcagaaggtgtgattgtaggccactgggctcctcccatccacacccatggcctcatccgtgagtacattgtagaatacagcaggagtggttccaagatgtgggcctcccagagggctgctagtaactttacagaaatcaagaacttattggtcaacactctatacaccgtcagagtggctgcggtgactagtcgtggaataggaaactggagcgattctaaatccattaccaccataaaaggaaaagtgatcccaccaccagatatccacattgacagctatggtgaaaattatctaagcttcaccctgaccatggagagtgatatcaaggtgaatggctatgtggtgaaccttttctgggcatttgacacccacaagcaagagaggagaactttgaacttccgaggaagcatattgtcacacaaagttggcaatctgacagctcatacatcctatgagatttctgcctgggccaagactgacttgggggatagccctctggcatttgagcatgttatgaccagaggggttcgcccacctgcacctagcctcaaggccaaagccatcaaccagactgcagtggaatgtacctggaccggcccccggaatgtggtttatggtattttctatgccacgtcctttcttgacctctatcgcaacccgaagagcttgactacttcactccacaacaagacggtcattgtcagtaaggatgagcagtatttgtttctggtccgtgtagtggtaccctaccaggggccatcctctgactacgttgtagtgaagatgatcccggacagcaggcttccaccccgtcacctgcatgtggttcatacgggcaaaacctccgtggtcatcaagtgggaatcaccgtatgactctcctgaccaggacttgttgtatgcagttgcagtcaaagatctcataagaaagactgacaggagctacaaagtaaaatcccgtaacagcactgtggaatacacccttaacaagttggagcctggcgggaaataccacatcattgtccaactggggaacatgagcaaagattccagcataaaaattaccacagtttcattatcagcacctgatgccttaaaaatcataacagaaaatgatcatgttcttctgttttggaaaagcctggctttaaaggaaaagcattttaatgaaagcaggggctatgagatacacatgtttgatagtgccatgaatatcacagcttaccttgggaatactactgacaatttctttaaaatttccaacctgaagatgggtcataattacacgttcaccgtccaagcaagatgcctttttggcaaccagatctgtggggagcctgccatcctgctgtacgatgagctggggtctggtgcagatgcatctgcaacgcaggctgccagatctacggatgttgctgctgtggtggtgcccatcttattcctgatactgctgagcctgggggtggggtttgccatcctgtacacgaagcaccggaggctgcagagcagcttcaccgccttcgccaacagccactacagctccaggctggggtccgcaatcttctcctctggggatgacctgggggaagatgatgaagatgcccctatgataactggattttcagatgacgtccccatggtgatagcctgaaagagctttcctcactagaaaccaaatggtgtaaatattttatttgataaagatagttgatggtttattttaaaagatgcactttgagttgcaatatgttatttttatatgggccaaaaacaaaaaacaaaaaaaaaaaaaaggaaagaaaggaatgaataaactttgtagtaatcaactgtgaacttcaaaccaggttgattttagtaacccaattgctttgatttgacattaatgtagtcttacagggctgtgcttgctgggcatgcttttacgtctgtgagataatttcggttcagtaaattggccaatctttttatttttctaagacacagaaatgtatttaataaaaacctcgagagagtgatgggtggaaccccttctccttgaaagtgtgtacagatattccattttgtttggatatagtttataggaaagtgtgtggatgtattatggcggaaggtttctttatgttattttgttaatttattgggactctgtgtaaggccaggctttagtggtcattagacaccacatgtgttatgagccccttacccatagggttgggggtgggaagagaagcatatttttttgccattccggaagcaatccatttttattcacttgtgtgtcatgtaatggtctttggcaggagagagcactgagtcattgctggagttcagttcaacagagctgcagcttgggaagccctgtaagcccacagcttcctctcttatattaattgatggaattttactgtatgtgcctctgtacaagatgtagctttgagagctacaaaatgataacactgctttattacacactggtttcattgtcattgcaaaaacttaccctggttgtgggggagagttctagatctgtgccatgatccatacactggctaatagagtacataatttttccattttccattttttgtttttacttactactgaaggatctcagatgtaaaattatgtatttggtttgagatggccacttattgtccttaaaaatccatactgatatatgcagtcattttgaattggacagtgccttctctttttttttctcctcttcttccatctccctcacccatgcccccacccaatctaaagagacagtgctgtacattctcatagagatagagaagatctaaaaagttgagactactcaatccagttaacaacagcaggagcactagagtttgttcatttattctctctgtaaaacaagctgtgctttttttcttctgcctttaaaatgccacccgtgtattcaaaccatggccacttgatacttatgtagaatccatcgtgggctgatgcaagccctttatttaggcttagtgttgtgggcaccaatgtcgagcatcgttgtgacttgtgctgtatgattctcactgaagaatttcctttcagccaagaagcagtgaggtctgggaatattccaaagtcatgtctctgaatatgtgtccttgacgtgcaagctttgtaaaaccccatccccgcttaggtgcgaggcatcaccttctcacaagtgtttagtttcttttaaccacaagtatcattcttgggtgataatatagtttcattctacttagggattgtttagaaaacaaagaaagagccaattaaattttttagtttttgaaatttttatttatatgtatacttagatgagtattttaagctgtcgacctttagtttgccatacgggtaggactgtatttcatgttaacaactggtggtaatgataagccttcttctagcgtattttctcttctttcctgtcactttcctaagtttttttttttaaagactggaattttttttggctttatcttgtcttaccgtagagatttgttcaaaactctaagccctaccacctcccctttaataagctctttaaatagttgaatcattaacaacctggtgggaggcaagtcatttaattgaaccactaggaagtgtattttcttttctttttctgccaactttttggtggcatttgtaaaagctgatataaaaggctctgagatgttattttcagttattccataggcaagcctttttacagagcatatgtctccagttggcagcttgagatatttccgagcatccggttctagctaccagtgcctcccaatgcttagtgcacagtactgtagactggccatcacccctctccttggaaaatgccactgtgctgtttgaaaaaaagcagccttttagggctagagtattttatataaacagaagagctaagttcctgaagactaagctagatagctgcagctatatgtaaattgtatatttttatgaacttttgaagcacacactcctgtttccctctgtgtagctttgtggggatttcatgtatatatgctgtctgaaagaatccagaggttggagtgccaatagaaaatgaaaacaaatgccttgtactacaggcagcctctgaaggtgaccacataactgtcttcactgtgaccaatcggagtccctgcttgcttgtgaagaaggggcttttgtaccttgttggagatgccacctcagaagttcacactgtgcaggaaaaaggttttattctctcctggcatacattagaatgtcagatgcttgcatccatgtggaccacgatgggcctctaaaaattggtgggcagggggtttgcttatgagttttctctggaaaccgattttactcctggatgtattgaatgccccttgagctttatgagatacgagtccacatggataaaatgttagagagtggagttctacagaggattccaggaagaggccatgtctgtgcagtcctagttccagacaggtgagaagctccaggaactactggctaccttgacaagctgggtaaatagttatcattctgggtaactggttgaaactctgacttttggacaagtaattcctggggttctgtctttggtagcatcaccagggatatttgggtgggacagacagaagacacacagctgcctgttctctcctgcccatcatgtttggcccactagatgaagctgtactcagcaatttagggaatgtaacccttctcagaactggccattttcaggggaagcttgggagagcaatagtatggtgagccccttagagatgagcgcctactccttcttggcgaatgctgccttcagatgcttaccaagtggtcactgcatctagtaagattatatttccagtacacttccttagggcagaaacaccatcctatcaggtttggtcagtcccttcttcatgaagggagtcatggggaattcctgaaaattttcttccttctgcagacagttggatgagtcccttagagaaggcatccagagacataactaaactgaatatcatcccatattgattttaggaattgactctaaaactctgtgcagaatcttgtgttgggattgtatcttgacattcctgttgtgttatttttcttaactggagtgtgtgctgcctttcaggtacaatttttgtgtaataaaagccagtgcattaagtttatatagactactttctatgcaagactgagatatggaatagataggaagagatatgtactgctgggtacatggacagtaagtgtgttttcagatggagtaccagcaccgaaaatgggttgagggaggatgggttgtatgtatgtttctgcccactaattttgagcagccatattatgaattaaatcgtcacagccaagtaataacccaagaatggtatgagtttcatgtgtaatagctcaaatggaataagcatgaatgctggagtggaccattatcctcaaatattctatgtcacttctcatttaaagactcttgttatgaactattagaaactttaggcaaaatcaaaagtatttgcggcaaaataaaggcctattctactcttatttaaagtgaaacactgtatacttgtttctctccaaagcgaaattaagtatttataatttcaattgcctcgataagtttccaagtcactgaaatctgctgaaggttttactgtattgttgcacaactttaagataatttttgtctcaatgtcaacttttttcactgaataaaaatttaactgggtcaagaaaaca

SEQ ID NO: 135186 - protein, 317 aa, Artificial Sequence
  derived and/or modified sequence
MYNMMETELKPPGPQQTSGGGGGNSTAAAAGGNQKNSPDRVKRPMNAFMVWSRGQRRKMAQENPKMHNSEISKRLGAEWKLLSETEKRPFIDEAKRLRALHMKEHPDYKYRPRRKTKTLMKKDKYTLPGGLLAPGGNSMASGVGVGAGLGAGVNQRMDSYAHMNGWSNGSYSMMQDQLGYPQHPGLNAHGAAQMQPMHRYDVSALQYNSMTSSQTYMNGSPTYSMSYSQQGTPGMALGSMGSVVKSEASSSPPVVTSSSHSRAPCQAGDLRDMISMYLPGAEVPEPAAPSRLHMSQHYQSGPVPGTAINGTLPLSHM

SEQ ID NO: 135187 - DNA, 28 bp, Artificial Sequence
  derived and/or modified sequence
tacaacatgatggagacggagctgaagc

SEQ ID NO: 135188 - DNA, 2520 bp, Artificial Sequence
  derived and/or modified sequence
ggatggttgtctattaacttgttcaaaaaagtatcaggagttgtcaaggcagagaagagagtgtttgcaaaagggggaaagtagtttgctgcctctttaagactaggactgagagaaagaagaggagagagaaagaaagggagagaagtttgagccccaggcttaagcctttccaaaaaataataataacaatcatcggcggcggcaggatcggccagaggaggagggaagcgctttttttgatcctgattccagtttgcctctctctttttttcccccaaattattcttcgcctgattttcctcgcggagccctgcgctcccgacacccccgcccgcctcccctcctcctctccccccgcccgcgggccccccaaagtcccggccgggccgagggtcggcggccgccggcgggccgggcccgcgcacagcgcccgcatgtacaacatgatggagacggagctgaagccgccgggcccgcagcaaacttcggggggcggcggcggcaactccaccgcggcggcggccggcggcaaccagaaaaacagcccggaccgcgtcaagcggcccatgaatgccttcatggtgtggtcccgcgggcagcggcgcaagatggcccaggagaaccccaagatgcacaactcggagatcagcaagcgcctgggcgccgagtggaaacttttgtcggagacggagaagcggccgttcatcgacgaggctaagcggctgcgagcgctgcacatgaaggagcacccggattataaataccggccccggcggaaaaccaagacgctcatgaagaaggataagtacacgctgcccggcgggctgctggcccccggcggcaatagcatggcgagcggggtcggggtgggcgccggcctgggcgcgggcgtgaaccagcgcatggacagttacgcgcacatgaacggctggagcaacggcagctacagcatgatgcaggaccagctgggctacccgcagcacccgggcctcaatgcgcacggcgcagcgcagatgcagcccatgcaccgctacgacgtgagcgccctgcagtacaactccatgaccagctcgcagacctacatgaacggctcgcccacctacagcatgtcctactcgcagcagggcacccctggcatggctcttggctccatgggttcggtggtcaagtccgaggccagctccagcccccctgtggttacctcttcctcccactccagggcgccctgccaggccggggacctccgggacatgatcagcatgtatctccccggcgccgaggtgccggaacccgccgcccccagcagacttcacatgtcccagcactaccagagcggcccggtgcccggcacggccattaacggcacactgcccctctcacacatgtgagggccggacagcgaactggaggggggagaaattttcaaagaaaaacgagggaaatgggaggggtgcaaaagaggagagtaagaaacagcatggagaaaacccggtacgctcaaaaagaaaaaggaaaaaaaaaaatcccatcacccacagcaaatgacagctgcaaaagagaacaccaatcccatccacactcacgcaaaaaccgcgatgccgacaagaaaacttttatgagagagatcctggacttctttttgggggactatttttgtacagagaaaacctggggagggtggggagggcgggggaatggaccttgtatagatctggaggaaagaaagctacgaaaaactttttaaaagttctagtggtacggtaggagctttgcaggaagtttgcaaaagtctttaccaataatatttagagctagtctccaagcgacgaaaaaaatgttttaatatttgcaagcaacttttgtacagtatttatcgagataaacatggcaatcaaaatgtccattgtttataagctgagaatttgccaatatttttcaaggagaggcttcttgctgaattttgattctgcagctgaaatttaggacagttgcaaacgtgaaaagaagaaaattattcaaatttggacattttaattgtttaaaaattgtacaaaaggaaaaaattagaataagtactggcgaaccatctctgtggtcttgtttaaaaagggcaaaagttttagactgtactaaattttataacttactgttaaaagcaaaaatggccatgcaggttgacaccgttggtaatttataatagcttttgttcgatcccaactttccattttgttcagataaaaaaaaccatgaaattactgtgtttgaaatattttcttatggtttgtaatatttctgtaaatttattgtgatattttaaggttttcccccctttattttccgtagttgtattttaaaagattcggctctgtattatttgaatcagtctgccgagaatccatgtatatatttgaactaatatcatccttataacaggtacattttcaacttaagtttttactccattatgcacagtttgagataaataaatttttgaaatatggacactgaaaaaaaaaa

SEQ ID NO: 135189 - DNA, 1109 bp, Artificial Sequence
  derived and/or modified sequence
  misc_feature (829)..(829): n is a, c, g, or t
cggcgggctgggcccgcgcacagcgcccgcatgtacaacatgatggagacggagctgaagccgccgggcccgcagcaaacttcggggggcggcggcggcaactccaccgcggcggcggccggcggcaaccagaaaaacagcccggaccgcgtcaagcggcccatgaatgccttcatggtgtggtcccgcgggcagcggcgcaagatggcccaggagaaccccaagatgcacaactcggagatcagcaagcgcctgggcgccgagtggaaacttttgtcggagacggagaagcggccgttcatcgacgaggctaagcggctgcgagcgctgcacatgaaggagcacccggattataaataccggccccggcggaaaaccaagacgctcatgaagaaggataagtacacgctgcccggcgggctgctggcccccggcggcaatagcatggcgagcggggtcggggtgggcgccggcctgggcgcgggcgtgaaccagcgcatggacagttacgcgcacatgaacggctggagcaacggcagctacagcatgatgcaggaccagctgggctacccgcagcacccgggcctcaatgcgcacggcgcagcgcagatgcagcccatgcaccgctacgacgtgagcgccctgcagtacaactccatgaccagctcgcagacctacatgaacggctcgcccacctacagcatgtcctactcgcagcagggcacccctggcatggctcttggctccatgggttcggtggtcaagtccgaggccagctccagcccccctgtggttacctcttcctcccactccagggcgccctgccagnccggggacctccgggacatgatcagcatgtatctccccggcgccgaggtgccggaacccgccgcccccagcagacttcacatgtcccagcactaccagagcggcccggtgcccggcacggccattaacggcacactgcccctctcacacatgtgagggccggacagcgaactggaggggggagaaattttcaaagaaaaacgagggaaatgggaggggtgcaaaagaggagagtaagaaacagcatggagaaaacccggtacgctccacaaaaaaaaaaa

SEQ ID NO: 135190 - DNA, 951 bp, Artificial Sequence
  derived and/or modified sequence
atgtacaacatgatggagactgaactgaagccgcctggacctcaacagactagcggcggcggaggcggcaactctaccgccgcggccgccggaggcaaccagaagaatagcccagatcgcgtcaaacgccctatgaacgcattcatggtgtggtcccgcgggcaaaggagaaagatggcgcaggaaaacccgaagatgcacaattcagaaatctccaagaggctgggcgctgaatggaaactgctgtcggagactgaaaagaggccgttcatcgacgaggcgaagcggcttcgggccctccatatgaaggagcatccggactacaagtacagaccccggcggaaaacgaaaacgctcatgaagaaggacaaatacaccctgcctggcggattgctcgccccgggaggaaattcgatggccagcggtgtcggtgtgggagctggactgggagccggagtgaaccagcggatggattcgtacgctcacatgaatggttggagcaacggatcatattcgatgatgcaagaccagcttggatacccacaacacccggggctgaacgcgcatggcgccgcccagatgcagcctatgcatcgctacgacgtctccgcgctccaatacaattctatgaccagctcacagacgtacatgaacggatcccctacctactcgatgtcatactcccagcaaggaactccgggaatggcgctgggaagcatgggcagcgtggtgaagagcgaagcgtcgtcgtcacctccggtggtcacttcgtcgtcccactcccgggcgccatgtcaggcaggagacttgagggacatgattagcatgtacctgccaggcgccgaggtgcccgagccggcggccccctcgagactgcatatgagccaacactaccaatcgggaccggttccaggcaccgccatcaacggaaccttgccgctgtcccacatg

SEQ ID NO: 135191 - DNA, 951 bp, Artificial Sequence
  derived and/or modified sequence
atgtacaatatgatggaaactgagctgaagcccccaggtccccaacagacctccggcggaggaggaggcaattcgactgccgcggcggcgggcggcaaccagaagaattcgcctgaccgcgttaaacggcccatgaacgccttcatggtctggtcccggggccagcgccgtaaaatggcccaggagaacccgaagatgcataactcggaaatcagcaaacggctgggtgcagagtggaagctgttgtcagaaactgagaagaggccctttatcgatgaggctaagcgcctgcgagctctccatatgaaggagcaccccgactacaaataccgaccgcgacgcaaaaccaagacgctgatgaagaaggacaagtacacgcttccgggcggcctcttggctccaggcggaaattcgatggcatccggagtgggagtgggagccggactgggcgcaggagtgaaccagcgaatggacagctatgcgcacatgaacgggtggtctaatggttcatattcaatgatgcaggatcaactgggttatccacagcatccgggattgaacgcacacggagccgctcaaatgcagccgatgcaccggtacgacgtgtcggctctgcagtacaactcaatgacctcatcgcaaacttacatgaacggctcgcctacctactcaatgtcgtactctcaacaagggaccccggggatggcactgggatccatgggttctgttgtgaaatccgaagcgagctcctcgcctccggtcgtgaccagctcctcgcactcccgggcgccatgccaggccggcgatctgagagacatgatctctatgtacttgccaggagccgaagtccctgaacctgcggcgccgtcgagattgcacatgagccagcattaccaatcggggcctgtgcctggtactgcgattaatggcactctcccactgtcacacatg

SEQ ID NO: 135192 - DNA, 951 bp, Artificial Sequence
  derived and/or modified sequence
atgtataacatgatggagactgaactcaaaccgcctggtccacaacagacgtcgggaggcggcgggggaaattccaccgcagcagcggccggtggaaaccagaagaattcaccagatagggtgaaacgtccaatgaacgcatttatggtgtggtcacgggggcagagacgaaaaatggcacaagagaaccccaaaatgcataactcggaaatctcaaagcggctgggcgcagaatggaagctgttgtcggaaaccgagaaacgcccatttatcgacgaagcaaagcgacttagggcgctgcacatgaaagaacatcctgattacaagtaccggccccgtcgtaagaccaaaaccctgatgaaaaaggacaagtacactctccccggagggcttcttgcacctggaggtaatagcatggcaagcggtgtgggggtcggggctggtcttggtgccggtgtcaaccaacgcatggattcctacgcccatatgaacggatggtccaacggttcgtactcgatgatgcaggatcaacttggatacccacaacatcctggactgaatgcacacggtgctgcacaaatgcagccgatgcatagatacgatgtgtcggctctccaatacaattccatgaccagctcacagacttacatgaatggcagcccgacctacagcatgtcgtactcgcagcagggcaccccagggatggcccttgggtcgatggggtcagtggtgaagagcgaagcctcctcatccccgcctgtcgttactagttcgtcgcactcccgtgcaccctgccaagcaggagatcttcgtgacatgatctcaatgtacctgccgggcgcagaagtcccggaaccagccgctcccagcagactccacatgagccagcactaccaatcaggacccgtccctggtaccgccatcaacggcactctccctctctcacatatg

SEQ ID NO: 135193 - DNA, 951 bp, Artificial Sequence
  derived and/or modified sequence
atgtacaatatgatggaaactgaactgaagccgccaggccctcaacagacctccggcggaggaggcggcaactccactgcggcagcagccggcggcaaccaaaagaattccccggaccgggtgaaaagaccaatgaacgctttcatggtgtggagcagaggacaaaggcgcaaaatggcgcaggaaaaccctaagatgcataacagcgaaatctcgaagcgcctgggagccgaatggaaactcctgtctgaaactgagaagaggccgttcatcgacgaggccaagcgccttcgggctttgcatatgaaagagcatcccgattacaagtacagaccacgcaggaagaccaagaccttgatgaagaaggataagtacaccctgccgggtggacttctggctcctggcggcaactctatggcctcaggggtgggagtgggagccggcctcggcgcgggggtcaatcagcggatggactcctacgcccatatgaatggatggtcaaatggatcctacagcatgatgcaagaccaactgggataccctcagcaccctggcctgaacgcgcacggagccgcgcagatgcagccgatgcaccgctacgatgtttcggcgctgcaatataactctatgacttcctcacagacgtacatgaacggctctccgacctattccatgagctactcccagcagggaacccctggcatggctctcggatccatgggctcggtcgtgaagtcggaagccagctcgagcccgcctgtggtgacctcgtcatcccactcgcgggccccctgccaggcgggtgacctcagggatatgatttccatgtacctgcccggcgctgaagtgcctgagcccgccgctccaagccgactccatatgtcgcagcactaccagtctgggccggtgccaggcaccgccatcaacggaactctgccgctcagccatatg

SEQ ID NO: 135194 - DNA, 951 bp, Artificial Sequence
  derived and/or modified sequence
atgtacaacatgatggagactgaactcaagcccccaggccctcaacagacgagtggaggtggaggcggaaactcaaccgcggcggctgctggtggcaaccagaaaaacagccctgatcgagtcaagcgcccaatgaatgcctttatggtgtggtctagagggcaaagacggaaaatggctcaggaaaatcccaagatgcacaactccgaaatttccaagaggctgggtgcagaatggaagcttctaagtgaaacagagaaacggccattcatagatgaagccaagagattgcgggctctgcacatgaaggaacatcctgactataagtaccgacctcgcaggaagaccaagactctgatgaagaaagacaagtatacgctgccaggaggccttttggcacctggcgggaacagcatggcctcaggcgtgggtgtgggtgcagggctgggcgctggcgtgaaccagaggatggatagttacgcgcatatgaacgggtggagcaatggaagctactctatgatgcaagaccagctgggctaccctcagcatccaggtctcaacgcacacggtgctgcccaaatgcagcctatgcacaggtatgacgtcagcgccctccagtataattccatgacatcatctcaaacatacatgaacggcagtccaacttactctatgtcatactcccaacaaggaactcccgggatggcgcttggcagcatggggtctgttgtgaagtctgaggctagtagtagtccacctgtcgtgacatcgagctctcacagcagggccccgtgtcaggccggagatctccgggacatgatcagcatgtatctgcctggcgcagaggtccccgagcctgccgccccaagtcgccttcacatgtcacagcactaccagtccggaccggttcctggcaccgccatcaatggcacactgccgttgtcccacatg

SEQ ID NO: 135195 - DNA, 951 bp, Artificial Sequence
  derived and/or modified sequence
atgtacaacatgatggaaaccgaattgaaaccgccgggaccacaacagacgagcgggggcggaggaggtaattccacggccgccgcggccggaggaaaccagaagaatagtcctgatcgggtgaagcggcctatgaacgccttcatggtgtggagccgcggacagcgcagaaaaatggctcaagagaatccaaagatgcataactctgaaatctcaaagcggctcggggcggaatggaagttgctttccgagactgagaagcgaccattcattgatgaggcaaagcggctccgcgccctccacatgaaggaacacccggactacaagtaccgcccgcggcgaaagaccaagactcttatgaagaaggacaaatacacgctgccgggtggactcctggccccaggaggcaactcaatggcatccggagtgggcgtcggagccggactgggagccggtgtgaaccagcggatggattcatacgcacacatgaacgggtggagcaacggatcgtactcgatgatgcaggatcagctgggatacccgcagcatccagggttgaacgcccacggagctgcccaaatgcagcctatgcacaggtatgatgtgtcggcgctgcagtacaactcgatgacttcctcgcaaacctacatgaatggatcgccgacttattcaatgtcgtactcgcagcagggaactcctggcatggcactgggatcgatgggatcagtcgtgaagtcggaagccagctcttctccacccgtcgtgacctcgtcgtcccactcccgcgcgccgtgccaggccggcgacctgcgggacatgatctccatgtaccttccaggtgcggaagtgccggagcccgccgcgccgagccggctgcacatgagccaacactaccagtccggaccggtgccgggaaccgccatcaacgggaccctgccgctgtcacacatg

SEQ ID NO: 135196 - DNA, 951 bp, Artificial Sequence
  derived and/or modified sequence
atgtacaacatgatggaaaccgaacttaagccaccaggtcctcaacaaacctccggaggaggaggcggtaacagcaccgcagcagcggccgggggaaatcaaaagaattcccccgatcgtgtgaagcgacccatgaatgcatttatggtgtggtccagaggacaaaggagaaaaatggcgcaggaaaaccctaagatgcacaatagcgaaatctccaagcgtctgggggcggaatggaagctgctttccgaaaccgagaaacggccctttatcgatgaagcaaagaggcttcgggccctgcatatgaaagagcaccctgattacaaataccgccctcgtaggaaaaccaagactctgatgaaaaaggacaaatacacccttcctggtgggctcctggcccccggagggaacagcatggcctcgggagtgggtgtcggagccggcttgggtgcaggcgtgaaccagcgcatggactcttacgcgcacatgaatggatggtccaacggatcctattccatgatgcaagatcagctcggatacccacaacatcctggccttaacgcgcatggcgcggcccaaatgcagcctatgcaccggtacgacgtatcggctctgcaatacaattcgatgacttcttcacagacttacatgaatggcagccctacctactcgatgtcctactcacaacagggtacgccaggcatggcgctgggctcgatgggtagcgtggtcaagtccgaagcctcatcctccccacctgtggtgacctcatcaagccattcgcgcgcaccttgtcaggcaggcgacctccgagacatgatttcgatgtacctgcctggggccgaagtgccagaaccagcggccccgtcgagacttcatatgagccaacattaccaatcgggacccgttccgggtaccgcaatcaacggtaccctccctttgagtcacatg

SEQ ID NO: 135197 - DNA, 951 bp, Artificial Sequence
  derived and/or modified sequence
atgtataatatgatggagacagagctcaagcccccaggcccacagcagaccagcggaggcgggggcggaaactccacagccgcagccgcaggcggtaatcagaaaaatagtccggacagagtgaagagacctatgaatgcttttatggtatggtcgcgagggcagaggaggaaaatggcacaggaaaatcctaagatgcacaatagtgaaatcagtaaaaggctcggagccgaatggaaactgctctctgagacagaaaagaggccttttatcgacgaagctaagcgactgagggccctgcacatgaaggaacaccctgactacaagtatagaccccgcaggaagacgaagactctgatgaagaaagataagtataccctccccggcgggcttctggcacccggagggaactctatggcatccggtgtaggcgtgggggccggcttgggggcaggagtgaatcaacgaatggactcgtacgcacacatgaatgggtggtccaacgggtcctactccatgatgcaagatcagctgggatacccgcaacatccgggactgaatgcacacggagccgctcagatgcagcccatgcatcgctacgatgtgagcgcgttacagtacaatagcatgacatccagtcaaacttacatgaacggatcacctacatatagtatgtcgtatagtcaacagggtacacctgggatggccttggggagcatgggttcagtggtgaagagtgaggcatctagttcccctcctgtagttacatcatctagccactcacgagctccctgtcaggcgggcgacctcagggatatgatttccatgtatttacccggtgccgaggttcccgaacctgccgccccttcaaggctccatatgtcacagcactatcaaagtggacccgtccccgggacagctatcaatggcacactgcctctgagccacatg

SEQ ID NO: 135198 - DNA, 951 bp, Artificial Sequence
  derived and/or modified sequence
atgtacaacatgatggaaaccgaacttaagccacccggacctcaacagacttcgggtgggggcggcggcaatagcacggccgccgcagcaggaggtaatcagaagaacagccccgacagagtcaagcgtcctatgaacgcatttatggtgtggtcacgcggtcaaaggcggaaaatggcgcaagagaaccccaaaatgcacaattccgagatttctaagcgtctgggtgcagagtggaagctgctgtccgaaaccgaaaaacgacctttcatcgatgaggcaaagcggctgcgggcattgcatatgaaggaacaccccgattacaagtacaggccaagacgcaagaccaaaactctcatgaagaaagacaagtacaccttgccaggagggctccttgccccaggcggcaattcaatggcgagcggagttggcgtgggtgccggactcggcgcgggagtgaaccagagaatggattcatacgcacatatgaatggatggtccaatggatcgtactctatgatgcaggaccaactgggatacccccagcatccgggactgaacgcacatggggcggcacaaatgcagccgatgcaccgatacgatgtgagcgctctgcagtataactccatgacctcttcccaaacttacatgaacggatctcctacctactcgatgtcgtattcacaacaagggactcctggtatggccctcggatctatggggtccgtcgtgaaaagcgaagcctcctcttcgccaccggtggtcacgtcatcctcccatagccgcgctccgtgtcaagcaggcgatcttagggacatgatctccatgtacttgccaggcgcggaggtgccagaacctgccgcaccatccagactgcatatgtcccaacactaccagtccggacctgtccccggtactgcaattaacggtaccctgccacttagccatatg

SEQ ID NO: 135199 - DNA, 951 bp, Artificial Sequence
  derived and/or modified sequence
atgtacaatatgatggaaaccgaactgaagcctccggggcctcaacaaacttccggaggaggagggggaaattcgaccgcggcagccgcaggtggcaaccaaaagaattccccggatcgcgtgaagcgcccgatgaatgcctttatggtctggtcgcgcggtcagcgcaggaaaatggcacaagagaatccgaaaatgcataattcagagatctccaagagactgggagctgaatggaagttgctgtcagaaactgagaagcggcccttcatcgacgaggctaagcgcctccgggctctgcacatgaaagaacacccggattacaagtaccgtccgcgacgcaagaccaaaactctcatgaaaaaggacaagtacactctgccaggtgggctccttgctccaggaggaaactcgatggcttcgggagtgggcgtcggagcgggtttgggagctggagtcaaccagcggatggactcgtacgcccatatgaatgggtggagcaacgggtcatactctatgatgcaagatcagctgggatacccacagcatccaggcctgaacgcacacggcgccgctcaaatgcaaccgatgcaccgctacgacgttagcgctctccagtataactccatgacctcgtcgcaaacttacatgaacggatccccgacgtactcgatgtcttatagccaacagggcactccgggaatggcactggggtcaatgggatcagtggtgaagtcggaagcatcctcctcgcctccggtggtcaccagcagctcccattcccgtgctccatgccaggccggtgacctgcgggacatgatctccatgtacctgccgggcgccgaagtgcctgaacctgccgccccgagccggctgcacatgtcacagcattatcagtccggtccagtgcccggaaccgctattaacggtaccctgcctctctcccatatg

SEQ ID NO: 135200 - DNA, 951 bp, Artificial Sequence
  derived and/or modified sequence
atgtacaacatgatggaaacggagcttaagcccccaggacctcaacaaacttcaggaggtggcggcggtaactctactgcagcggcggcgggcggcaaccaaaagaactcgccggaccgcgtgaaacggcccatgaatgcctttatggtgtggtcgagaggacagcgccggaagatggcgcaggaaaaccctaaaatgcataactccgaaatttcgaaacggctcggcgcagagtggaagctcctgtcggagacggagaaaagaccttttatcgatgaagcgaaaagactgcgggcactgcatatgaaagaacatccagattacaagtacaggcctaggcgtaaaaccaagacccttatgaagaaagataagtacactctccctggaggacttctggcgcccggggggaactcaatggcctcgggagtcggagttggcgcagggttgggggcaggagtcaaccaaagaatggattcgtatgctcatatgaatgggtggagcaacggaagctactccatgatgcaggatcagctcggttatccacagcatcccgggcttaacgcccacggagcagctcaaatgcaacctatgcacagatacgatgtgtctgcactgcagtacaattcgatgacttcttcccaaacttacatgaacggctccccgacctactccatgtcgtacagccagcaaggtactcctgggatggctctcggatcgatgggttccgtggtgaagtccgaggcatcgtcgtcaccccccgtggtcacctcatcgtcccattctcgcgcaccgtgtcaggcaggggatctgagagacatgatttccatgtaccttccaggagcagaagtgccggaaccagctgctccttcgagactgcatatgtcccagcactaccaatccggacccgtgcctggtacggcaataaacggaactctgccactgtcacacatg

SEQ ID NO: 135201 - DNA, 951 bp, Artificial Sequence
  derived and/or modified sequence
atgtataacatgatggaaacagagctcaaaccccctggcccccagcaaacctctgggggtggaggaggaaactccaccgcggcggcagcaggcggaaaccagaagaacagcccagatcgagtgaaaaggcccatgaatgctttcatggtgtggagcaggggtcagcgtcgcaaaatggcccaggaaaatccaaagatgcataatagcgagatatcaaagagattgggcgctgaatggaagctgctgtccgagacggagaagaggcccttcatcgatgaggccaagcgcttgagagccctgcatatgaaggaacatccagactacaagtacaggcccagaaggaagaccaagacactcatgaaaaaggacaaatatacgctgccaggcgggctgttagcccccggcggcaatagcatggctagcggggtgggcgtcggagccgggctaggagcaggtgtgaaccagcggatggatagctacgctcacatgaatgggtggtcaaatgggtcctattcgatgatgcaggaccagctggggtaccctcaacaccccggtctgaacgctcatggcgctgctcagatgcagccaatgcacaggtacgatgtgtcagcgctgcaatacaattctatgacctcttcccagacctatatgaatgggtcccccacctacagcatgagctactcacagcagggcaccccagggatggcactggggagtatgggatctgtggtaaaaagcgaggcctcttcttctcctcccgtcgtgacatcttcctcccatagcagggcgccatgccaagccggcgatttgcgggacatgatcagcatgtacctgccaggagccgaggtcccagagcctgcagctccatcacggctacatatgtcacaacactatcagtctggcccagtaccaggtaccgctatcaatggtacactgcccttgagccacatg

SEQ ID NO: 135202 - DNA, 951 bp, Artificial Sequence
  derived and/or modified sequence
atgtacaacatgatggaaaccgagctcaagccgcctgggcctcagcaaacctcgggaggtggagggggaaactcgaccgctgccgcagccggaggtaaccagaagaattcgccggaccgggtgaaacgcccgatgaacgccttcatggtctggtcacgcggacagcggcggaaaatggcgcaggaaaatccgaagatgcacaacagcgaaatctccaagagactgggcgccgaatggaagttgctgagcgaaaccgaaaaacggcctttcatcgacgaagccaagagactgagagcactccacatgaaggagcacccagattacaagtaccggccgaggagaaagactaaaaccctgatgaagaaggacaagtacaccctgcccgggggactcctggcaccgggcggtaactccatggcttcaggtgtgggagtcggcgcgggtctgggtgccggagtgaatcagcggatggattcttatgcgcacatgaacggatggtccaacgggagctactctatgatgcaggaccagctgggatacccgcagcatccgggacttaacgcacatggagccgcgcagatgcagccgatgcaccgctatgatgtctccgctctgcagtacaactcgatgacctcctcacaaacctacatgaatggatcaccgacttactcaatgagctactcccaacaaggcactcctggcatggcgctgggatcgatgggatcagttgtgaaatcggaggcctcctcgtccccgccagttgtgacgtcctcctcccacagccgcgcgccgtgccaagcaggagatctccgggacatgatttccatgtacctgcctggagcagaggtgccggaaccggccgcaccgtcccgcctccacatgagccagcactaccaatcagggccggtgccgggcacggcgatcaacggaaccctgccgctgtcgcacatg

SEQ ID NO: 135203 - DNA, 951 bp, Artificial Sequence
  derived and/or modified sequence
atgtataatatgatggagaccgaactgaagcccccgggcccacagcagacctcaggtggcgggggtgggaactccacagccgcagcagcaggtggcaaccagaaaaacagcccagaccgggtcaagcgacccatgaacgcattcatggtctggagtagaggtcaaaggcggaagatggcgcaggaaaacccaaaaatgcataacagcgagatctcaaagaggctgggggcggagtggaaactcctctcagagaccgagaagagaccttttatcgatgaggccaaaaggttgcgggccctgcacatgaaagagcacccagactacaagtaccggccacgccgaaagactaagactctgatgaagaaggacaagtatacactgcccggcggtctgttggctccgggcggcaactcaatggcctccggggtcggggttggcgcaggccttggcgcgggagttaaccagcggatggactcttatgcgcatatgaacggttggtccaacgggtcctactccatgatgcaggaccaactgggctatccccagcatcccggccttaacgcacatggtgcagcacagatgcagcccatgcatcggtacgatgttagcgcccttcagtacaacagtatgacgagtagtcagacatacatgaatggaagtcccacgtactcaatgagttacagccagcaaggaacgccaggaatggctcttggtagtatgggttcagtggttaagagcgaggccagctcaagtccgccagttgtcacgagctcaagccactcccgggctccttgtcaagcaggtgatctcagagacatgatttcaatgtacctgccgggtgccgaagtccccgaacctgcagccccctcacgactgcacatgagtcagcactatcagtcaggcccagtgccagggacagctatcaacggtacattgcccttgagtcacatg

SEQ ID NO: 135204 - DNA, 951 bp, Artificial Sequence
  derived and/or modified sequence
atgtacaatatgatggagacggagctgaagccgccaggaccgcaacagacttcaggcggaggcggaggaaacagcactgcggccgctgcaggaggaaaccagaagaactcgccggaccgcgtgaagcgaccaatgaacgccttcatggtgtggtccaggggccagcgccggaaaatggcccaagagaacccgaagatgcacaactctgaaatttccaaaagattgggtgccgaatggaagctgctttccgaaaccgaaaagcggcccttcatcgacgaagcgaagagactgcgcgccctccacatgaaggagcatcctgactacaaataccggccgaggaggaaaactaaaactctcatgaagaaggataagtacaccctgccgggaggtctgctcgcgccgggtggaaatagcatggcttccggagttggtgtgggagccggactgggagcgggggtcaaccagcggatggatagctacgcacatatgaacggatggtcaaatggaagctacagcatgatgcaggatcagctgggatatcctcagcatcctggccttaacgcacatggagccgcacagatgcagccaatgcacagatacgatgtgagcgccctgcagtacaactccatgacgtcaagccaaacttacatgaacggatcgccaacctactcgatgtcttacagccagcaggggaccccggggatggcactcggttctatgggatccgtggtcaagtccgaagcgtcaagctcgcctcctgtggtcacctcgagctcgcacagcagagccccttgccaagctggtgatctccgcgatatgatctcaatgtacctcccgggtgccgaagtgcctgaacctgctgcaccgtcgcgactgcacatgtcacagcattaccaaagcggaccggtgccgggcaccgcaatcaacggcacccttcctctgtctcacatg

SEQ ID NO: 135205 - DNA, 951 bp, Artificial Sequence
  derived and/or modified sequence
atgtataatatgatggaaacggaattaaaaccgccgggtccgcaacaaacgtcgggtggtggtggtggtaattcgacggcggcggcggcgggtggtaatcaaaaaaattcgccggatcgtgtaaaacgtccgatgaatgcgtttatggtttggtcgcgtggtcaacgacgtaaaatggcgcaagaaaatccgaaaatgcataattcggaaatatcgaaacgtttaggtgcggaatggaaactattatcggaaacggaaaaacgaccgtttatagatgaagcgaaacgattacgtgcgttacatatgaaagaacatccggattataaatatcgaccgcgacgtaaaacgaaaacgctaatgaaaaaagataaatatacgctaccgggtggtttattagcgccgggtggtaattcgatggcgtcgggtgtaggtgttggtgcgggtctaggtgcgggtgtaaatcaacgaatggattcgtatgcgcatatgaatggttggtcgaatggttcgtattcgatgatgcaagatcaactaggttatccgcaacatccgggtctaaatgcgcatggtgcggcgcaaatgcaaccgatgcatcgatatgatgtatcggcgctacaatataattcgatgacgtcgtcgcaaacgtatatgaatggttcgccgacgtattcgatgtcgtattcgcaacaaggtacgccgggtatggcgttaggttcgatgggttcggtagttaaatcggaagcgtcgtcgtcgccgccggtagtaacgtcgtcgtcgcattcgcgagcgccgtgtcaagcgggtgatctacgagatatgatatcgatgtatctaccgggtgcggaagtaccggaaccggcggcgccgtcgcgattacatatgtcgcaacattatcaatcgggtccggtaccgggtacggcgataaatggtacgttaccgttatcgcatatg

SEQ ID NO: 135206 - DNA, 951 bp, Artificial Sequence
  derived and/or modified sequence
atgtacaatatgatggagactgagctgaaacccccagggccacagcagacttcaggaggtgggggcggaaactcaactgcggcagccgccggagggaaccagaagaactctcctgaccgagtgaaacgcccaatgaacgcttttatggtttggagtaggggccagagaaggaaaatggcccaggaaaatccaaagatgcataatagcgaaatttccaagagactaggagcagagtggaagctcctgagcgagacagagaaacgaccttttatcgacgaggcgaagcggctacgagcactacatatgaaggaacaccctgactataagtaccgcccacgtcggaagaccaaaaccttaatgaaaaaagacaaatatactctgccgggcggtctgctcgctccgggagggaattcaatggcctctggagtcggagtgggcgcagggttgggcgccggggtcaatcagcgtatggacagctacgctcacatgaatgggtggtccaacggatcttatagcatgatgcaggatcaattaggatacccacaacaccctggccttaatgcacatggggcggcccaaatgcagcccatgcatcgatatgacgtatccgcccttcagtacaatagcatgacttcctcacaaacctacatgaacggcagtccaacatattccatgtcttacagccagcaggggacacctgggatggctttaggaagtatggggtcagttgttaaaagcgaggcaagtagttctcctcctgtggtgacttcctcttcacatagccgggccccctgccaggcaggcgacttgagggatatgatcagcatgtatctgcccggggcagaggttcctgagcccgctgccccttcccggttgcacatgtcgcagcactatcagagtggtcccgtgcctgggactgccataaacggcaccctaccgctctcacatatg

SEQ ID NO: 135207 - DNA, 951 bp, Artificial Sequence
  derived and/or modified sequence
atgtacaacatgatggagactgagcttaagccgcctggaccgcaacagacttcaggaggtgggggcggaaattcaaccgccgcagcggccggcggcaaccagaaaaactcccccgatcgggtgaagcggcctatgaatgccttcatggtgtggagtcgggggcagaggcgcaagatggcgcaagaaaatccaaagatgcacaactcggagatctcaaagcgcctcggagcagagtggaagctgctgtccgaaaccgagaagcggccgtttatagacgaagccaaacggctgagagccctgcacatgaaagaacaccccgattacaaataccgccccagacgtaagaccaagaccctgatgaaaaaggataagtacaccctcccaggcggcctcttggccccggggggaaactcgatggcttcgggcgtcggtgtgggtgcaggactcggagccggagtcaaccagaggatggacagctacgcacatatgaatggttggtcgaacggatcgtacagcatgatgcaagaccagcttggttacccccaacacccgggcctgaacgcgcatggagccgctcaaatgcagccgatgcataggtacgacgtttccgcgctgcaatacaactcgatgacctcatcgcaaacttatatgaatggatcgccgacctattcaatgtcctacagtcaacagggaacgccggggatggctctgggttctatggggtcggtggtgaagtcggaggcatcatcctcaccacccgtggtgactagcagctctcactcgcgagcaccatgtcaggcaggagatctgagggacatgatctcaatgtacctcccgggcgcggaagtcccggaaccggcggccccttcacggttgcatatgagccagcactaccagtcgggacctgttccgggaacggccattaatggaactctcccactctcacacatg

SEQ ID NO: 135208 - DNA, 951 bp, Artificial Sequence
  derived and/or modified sequence
atgtacaacatgatggaaacagagctcaagcctcctggaccgcaacagacctccggcgggggtggcggtaactcgaccgctgcagccgcaggggggaaccagaagaattcccctgatagggtgaagcggcccatgaatgcatttatggtatggtctagggggcaacggcggaagatggctcaagaaaaccccaaaatgcacaattccgagatcagcaaacgcctcggcgcagaatggaagctgctctcagagacggagaaaaggccctttattgatgaagccaaacgacttagagcactgcacatgaaagagcaccccgactacaaatacagacctagaaggaaaactaaaacactcatgaagaaagacaaatacacactgccaggcggactgctcgccccaggcgggaactcaatggcttccggggttggggtgggggccggcctaggagccggggtaaaccaaaggatggacagttacgcacacatgaatggttggtcaaacggttcttacagtatgatgcaggaccagctgggctacccccagcatccaggccttaatgcgcacggagcggctcaaatgcagcctatgcatcggtacgatgtgtcagcattacagtacaattctatgactagttcccaaacttatatgaatggttctcctacatatagtatgtcctactcccaacaggggacacctggcatggctcttggatccatgggcagcgtggtcaagtcagaggccagctcttcccccccagttgtgacttcaagctctcactccagagcaccatgccaagccggcgatctgcgggacatgattagtatgtacctacctggggcagaagttccagaacccgctgccccttcccgcctgcacatgagccagcattaccagtctggtccagtgccagggaccgctatcaatggcaccctgcccctgtctcatatg

SEQ ID NO: 135209 - DNA, 951 bp, Artificial Sequence
  derived and/or modified sequence
atgtacaatatgatggaaaccgagctcaagccgcccggaccgcaacaaacctcgggagggggaggaggcaactcaaccgcggccgctgcgggtggaaaccagaagaattcaccggatcgggtgaaaagaccgatgaatgctttcatggtgtggtcccggggacagcgcagaaagatggcccaagaaaatccaaagatgcataattcggagattagcaagcggctcggagcagagtggaagctcctgtcggaaactgaaaaacggcctttcattgacgaagcgaagcgcctgagggctctccacatgaaagaacacccggactataagtaccggccgcggaggaaaactaagaccctcatgaaaaaagacaagtacaccctgccaggaggactcctcgccccgggtggaaattcgatggcgtcaggagtcggtgtcggagcggggttgggggccggtgttaaccaacgcatggactcttacgcccatatgaacggatggtccaacgggagctactcaatgatgcaagatcaacttgggtacccgcagcatccgggactgaacgcgcacggcgccgcccagatgcagcctatgcaccggtatgatgtctccgcgcttcagtacaattcgatgacctcatcacagacctacatgaacggatcgccaacttactcgatgtcctacagccaacaagggacccctggaatggcactgggatccatgggatccgtggtgaaatccgaggcctctagctcgccacctgttgtgacctccagctcgcactccagagccccgtgccaggctggcgacctgagggatatgatttcgatgtacctgccaggagctgaagtgcccgaaccggcagcaccgtcacgcctgcatatgtcccaacactaccagagcggtccggtgcctggtaccgccatcaatggcaccttgccgcttagccatatg

SEQ ID NO: 135210 - DNA, 951 bp, Artificial Sequence
  derived and/or modified sequence
atgtataatatgatggagacagaacttaaacctcctggaccacaacaaacttcagggggaggtggaggaaattcaacagctgcagcagcaggtggaaatcaaaagaattctcctgatagagttaaacgaccaatgaatgcatttatggtttggtcaagaggacaaagaagaaagatggctcaagaaaatccaaaaatgcataattctgaaattagtaaaagattaggagctgaatggaaattattatcagaaacagaaaaaaggccatttattgatgaagctaaaagacttagagcacttcatatgaaagaacatccagattataaatatcgtcctcgtagaaaaactaaaactttaatgaaaaaagataagtatacattaccaggtggtttattagcaccaggaggaaactctatggcatcaggtgttggagtaggtgctggtttgggagctggagttaatcaaagaatggactcttatgcacatatgaatggatggtcaaatggatcttattccatgatgcaagatcaactaggatatccacaacacccaggtttaaatgctcatggagctgcacaaatgcaaccaatgcatcgttatgatgtatcagcacttcaatataattcaatgactagtagtcaaacatatatgaatggatcaccaacatatagtatgtcttattcacaacaaggaactccaggaatggcattaggatctatgggatcagttgttaaatcagaagctagttcttccccacctgttgtaacctcatcatctcatagtcgagctccatgtcaagcaggagatttaagagatatgatttctatgtatttaccaggagctgaagtaccagaaccagcagctccttcacgacttcatatgtcacaacattaccaatctggacctgtaccaggaactgcaattaatggtactcttccattatcacatatg

SEQ ID NO: 135211 - DNA, 951 bp, Artificial Sequence
  derived and/or modified sequence
atgtacaatatgatggaaactgaactgaagccgccaggaccacagcagacgtcgggcggtggcggaggaaacagcaccgcggctgcagctggaggcaaccagaaaaactccccggacagggtgaaacggccaatgaacgcattcatggtgtggtcacgcggccagagacgcaagatggctcaggaaaatcctaagatgcacaacagcgaaatctcgaagcggttgggagcagaatggaagctgctgtcagaaactgaaaagaggccgtttatcgacgaagcgaagcggctccgggctctccacatgaaggaacacccggattacaaataccggccacgccggaaaactaagacgcttatgaagaaggacaagtacactctgccagggggactgcttgcgccgggtgggaactcgatggcgagcggagtcggagtgggagcggggctgggagctggagtcaatcagcgcatggactcctacgcccacatgaatgggtggagcaatggaagctacagcatgatgcaggaccagttgggctacccgcagcatccgggactgaacgcgcatggagccgcccagatgcaacctatgcaccggtacgacgtctcagcgcttcagtacaattcaatgaccagctcgcagacttatatgaacggatccccgacgtactcgatgtcatactcccagcagggtacgccaggtatggccctgggatcaatgggatcggtggtcaaatcagaggccagctcgtcgccacctgtggtgacttcctcatcccactctcgcgccccgtgccaggccggggatctgcgagatatgatctcaatgtacctcccgggagcggaggtgccagagccagcagctccctcccgcctgcatatgagccaacattaccagagcggacctgttccgggaaccgcgattaacgggaccctcccgttgtcgcacatg

SEQ ID NO: 135212 - DNA, 951 bp, Artificial Sequence
  derived and/or modified sequence
atgtataacatgatggaaaccgagctgaagccgccgggaccgcagcagacgtctggaggaggagggggcaactccaccgcggctgccgcgggcggaaaccagaagaatagccctgacagagtgaagcggccgatgaatgcgttcatggtgtggagccgggggcagcgccgcaaaatggcacaggaaaacccaaagatgcacaactcagagatttcaaagcggctgggagcagaatggaaacttctgagtgagacggaaaaacggccgttcattgatgaggcgaaacgactccgggcgctgcatatgaaggaacaccctgactacaaatacaggccacgccgtaagacgaaaactcttatgaagaaagataagtacaccttgccaggaggcctgttggcacctggcggaaattccatggcgtccggcgtgggtgtgggagccggactcggagctggagtgaaccagcgcatggattcatacgcgcacatgaatggttggtccaacggatcgtactcgatgatgcaagaccaactcggataccctcagcatccggggcttaacgctcatggtgcggcccagatgcaaccaatgcaccgctacgatgtgtccgctcttcagtacaatagcatgacttcctcacagacgtacatgaacggatcgcctacgtactcaatgtcctacagccaacagggaacccccggaatggctctcggatcgatgggttcagtcgtcaagagcgaagcatcctcctcaccgccggtggtgacctcgagctcccattccagggccccttgccaagccggcgatttgagagacatgatctcaatgtatctgcccggagcggaagtcccggagccagcagcaccatcacggctccacatgtcgcaacactaccagtccggaccggtgccgggcactgcgatcaatggaaccctgccgctctcgcatatg

SEQ ID NO: 135213 - DNA, 951 bp, Artificial Sequence
  derived and/or modified sequence
atgtataacatgatggagacggaacttaaacctcccggtccacagcagacttccggaggaggtgggggaaattctaccgccgcagccgctggggggaaccaaaagaacagccctgaccgagtgaagcgaccgatgaatgccttcatggtgtggagtcgcggtcaaaggaggaaaatggctcaggagaatccaaagatgcacaattcggaaatatccaagcgtttaggcgccgaatggaaactgttatccgagacagagaagagacctttcatcgacgaggccaaaagactccgagccctgcacatgaaggagcatcctgactataagtataggcctcgaagaaagacaaagacacttatgaaaaaggataaatataccctccccggtgggctcttagcccccggcggtaactccatggcctccggtgtgggcgttggggccggcctgggagctggggtcaatcaacggatggacagctacgcacatatgaacggatggtctaacggttcatacagcatgatgcaagaccagctaggttatccccaacatccaggcctcaacgcccatggagcagcacagatgcagccgatgcatagatacgatgtatcagcactccagtataattccatgacaagctcacaaacttatatgaacggctctccgacctactcgatgtcttattcacaacagggcacccctgggatggcgctgggctctatgggcagcgtagtgaagagcgaggcctccagcagtcccccagttgtgacaagttctagccatagtcgcgccccttgtcaggctggcgatctcagggatatgatcagcatgtacctgccaggcgcggaagtgccagagcccgcggcaccatcacgacttcacatgtctcagcactaccagagtggaccggtgccagggactgccatcaatggaaccctgccacttagccatatg

SEQ ID NO: 135214 - DNA, 951 bp, Artificial Sequence
  derived and/or modified sequence
atgtataatatgatggaaaccgaactgaaaccccctggccctcagcaaacatctggtgggggagggggcaactcaacggcggccgctgcggggggaaaccagaagaattcccccgacagagtcaagagacctatgaacgctttcatggtgtggagccgggggcagcgtaggaagatggcacaggagaatcctaagatgcacaattccgaaatctcgaagagactgggcgctgagtggaagctgctctccgaaactgagaagcgccccttcatcgacgaagccaaaaggctgcgggcactgcacatgaaggagcaccccgattacaagtatcggccaaggaggaaaactaagactctgatgaaaaaagacaagtacacactacccggcggcctccttgccccagggggtaatagtatggcctccggggtcggtgtgggagccggactcggcgccggggttaatcagcgcatggattcatatgcccacatgaatggatggtctaatggatcgtacagcatgatgcaggaccaactgggttatccacaacaccctggcctcaacgctcatggcgcagcacagatgcagccgatgcacaggtacgacgtgtccgcgttgcagtacaacagtatgacaagttcccaaacctacatgaatgggtctccaacttactcaatgtcctatagccagcagggaactcccggaatggccctggggagcatgggcagtgtggtgaaatccgaagccagcagcagcccccccgttgtgaccagtagcagccactctcgggcaccctgccaggcgggggacctacgagatatgatcagcatgtatctgcccggcgcggaggtacccgagcccgccgccccgtctcggttgcatatgtcccagcattaccagtctgggcccgttccaggcacggccatcaacggcaccctgccactgagccatatg

SEQ ID NO: 135215 - DNA, 951 bp, Artificial Sequence
  derived and/or modified sequence
atgtacaacatgatggaaacagagcttaagcccccggggccccagcagacctccggtggcgggggcggaaattccacagcagccgccgctgggggaaatcaaaaaaactctccggatagagtgaaaaggccaatgaacgcattcatggtgtggtccaggggacagcgacgcaagatggcccaggaaaacccaaagatgcataacagtgaaatcagcaaacgacttggcgctgagtggaagctgctctcagagacggagaagagaccatttattgacgaggcaaagagactccgggctcttcacatgaaagagcatcctgattataagtaccgcccgcgccgaaagacaaaaactctgatgaagaaggacaaatacaccctccccggagggctgctggctcccgggggaaatagcatggcctcaggggttggggtgggggctggactgggcgccggcgtcaaccagagaatggacagctacgctcacatgaacgggtggagcaatgggtcatactctatgatgcaggaccagctgggctacccccagcacccaggcttgaacgcccatggggcagcccaaatgcaacccatgcacagatacgacgtgagcgcacttcagtacaactccatgacgtcctcacagacatacatgaacggctcccccacgtacagtatgtcatactctcagcaggggacgcccgggatggccctgggcagcatgggatccgtcgtcaagtccgaggccagttcttcaccccccgtggtaacaagtagttctcacagcagggccccttgtcaagcaggagacctccgcgatatgatctcaatgtatctgcccggcgcagaagttccagaacctgctgcgccctcccggctccatatgtcacagcattatcaatctgggcctgttccaggcaccgccatcaatggtactctgccccttagtcacatg

SEQ ID NO: 135216 - DNA, 951 bp, Artificial Sequence
  derived and/or modified sequence
atgtacaatatgatggaaactgagcttaagcctcccggccctcagcagaccagtgggggagggggcggtaatagtaccgccgccgccgccggcggcaaccaaaagaatagccccgaccgtgttaagaggccgatgaatgcgttcatggtgtggagtagggggcagaggcgaaagatggcccaggagaatccaaagatgcacaattccgaaatctcaaagaggttgggggccgagtggaagctactcagcgagacagagaagaggccatttatcgacgaggctaagcgactgagggccctacacatgaaggaacaccccgactacaaatacagaccacgtcggaagacaaagacacttatgaagaaagataagtataccttgcccggcggactgctggcccccggaggtaacagcatggcttccggcgtcggagtaggggccggacttggcgccggcgtgaatcagcggatggattcttacgctcatatgaacggatggtccaatggatcctacagcatgatgcaggatcagctggggtacccccagcaccccggtctaaacgctcatggagccgcgcagatgcagccaatgcacagatatgacgtttccgctctgcagtataactctatgacctcttcacaaacatacatgaatggctctcctacctacagtatgagctatagtcaacaggggacacccggaatggcgctggggagtatgggaagcgtggtgaagagcgaggccagctccagtcctcctgttgtgacgtcctcctcacattcacgtgccccctgccaggcaggcgatctgcgtgatatgatttccatgtatctgcccggtgccgaggttccagagcctgccgccccatcgcggttgcatatgagtcagcattaccagagtgggcccgtaccaggaacggcaatcaacggaaccctgccattatcacacatg

SEQ ID NO: 135217 - DNA, 951 bp, Artificial Sequence
  derived and/or modified sequence
atgtacaatatgatggaaacagaactaaagcccccggggccacagcagacatcaggaggcggcggcggcaactctacagcagcagccgccggggggaaccagaaaaattcacctgatcgagtgaagagaccaatgaacgcattcatggtatggtcacgggggcagagacggaagatggcccaggaaaaccccaagatgcacaattccgaaatctccaaacggttgggcgctgagtggaagctgttaagtgagaccgaaaagcggccctttatcgacgaggcgaaacgtctgagagccttgcacatgaaagaacatcctgattataaatacagaccgagacgaaaaacaaagaccttgatgaaaaaagacaaatacactctacctggcggcctactcgcccccggaggtaatagcatggcatcgggcgtgggggttggcgcaggcctgggggccggcgtgaaccagagaatggacagctacgcacacatgaatgggtggtccaatggtagttatagcatgatgcaggaccagcttggttatcctcaacatccaggtctgaacgctcacggggcagcgcaaatgcagccaatgcatagatatgacgtttcggccctccaatacaatagcatgacaagttcccagacgtacatgaatgggtcccctacatattctatgtcttacagtcagcagggtacccctggaatggccctgggctccatggggtccgtcgtcaaatcagaggcaagtagcagcccccctgttgtgacctctagcagccactcccgcgcaccttgccaggcgggtgatctgcgagacatgatttccatgtatctgccaggcgcagaggtgccagaaccagctgctccttctaggctccacatgagccagcactatcagtcaggacccgttccgggtaccgcaattaatgggaccctgcccttgtcgcacatg

SEQ ID NO: 135218 - DNA, 951 bp, Artificial Sequence
  derived and/or modified sequence
atgtacaatatgatggagacggaattgaagccaccaggccctcagcagacttcaggagggggaggagggaattcaactgccgcagcggccgggggcaaccagaaaaactcgccggacagagtcaagcgcccgatgaatgctttcatggtgtggtcccggggacagcgccgcaagatggcccaggaaaacccaaagatgcacaactcagagatcagcaaacgcctcggagcagaatggaagctgctcagcgagactgaaaagaggcccttcatcgatgaggcaaagagactgcgcgctttgcacatgaaggaacaccccgactacaagtacaggccgcgccggaaaacgaaaaccctcatgaaaaaggacaagtacaccctgccgggaggtcttttggccccgggtggaaattccatggcctcgggagtgggagttggtgccggactgggagctggagtgaaccaacgcatggattcatacgcgcacatgaatggatggtcgaacggttcatactcaatgatgcaagatcagctgggctaccctcagcatcctggactgaacgctcacggagcggcgcagatgcagccgatgcaccggtacgatgtctcagccttgcagtacaactcgatgaccagctcacaaacgtatatgaatggctcgccgacttattcgatgtcgtacagccaacaaggaaccccgggaatggcgttgggatcaatgggctcggtggtgaagagcgaggcgtcatcatccccacctgtggtgactagctcctcgcacagccgcgcaccgtgccaggctggcgaccttagggatatgatctcaatgtacttgccgggagccgaagtgccagaacctgcggcgccatcccggctgcatatgtcccagcactaccagtcaggaccggtgccgggaaccgccatcaatggcactcttccgctctcgcatatg

SEQ ID NO: 135219 - DNA, 951 bp, Artificial Sequence
  derived and/or modified sequence
atgtacaacatgatggaaaccgagctcaagccacccggaccacagcagacaagtggcgggggaggtggaaactcgacagccgccgccgcgggaggcaatcagaagaattctcccgatcgggttaagcggccgatgaacgcttttatggtgtggtccaggggacagaggagaaagatggcgcaggagaatccaaaaatgcacaacagcgagataagcaaaaggttaggcgccgaatggaagttactctccgaaactgaaaaaagacctttcattgatgaggcaaagcgactacgagctctgcatatgaaggaacacccagattataaatatagacctcgccgtaagaccaagacactcatgaagaaggataagtataccttacctgggggcttgcttgccccaggggggaacagcatggccagtggagtgggggttggtgccgggctgggtgcaggagtgaaccagcgaatggactcgtatgcgcacatgaacggttggagtaacggctcctactctatgatgcaggaccagctggggtaccctcagcatcccgggctgaacgcacacggcgctgcacaaatgcagcccatgcatcgctatgacgtgtccgcgcttcagtataattctatgacttctagccagacatacatgaatggaagcccaacatattcgatgagttattcccaacagggtaccccaggcatggcgctgggttctatgggctcagtcgtgaaatcggaagcttcaagcagcccaccggtggtgacaagcagtagccactcacgggccccctgccaagccggggatctccgagatatgatatcaatgtacctgccaggagcggaagtgccagagcccgcagctccctctcgccttcacatgtcacagcactaccaatccgggcctgtcccaggaactgccatcaatgggactctgcccctatcgcacatg

SEQ ID NO: 135220 - DNA, 951 bp, Artificial Sequence
  derived and/or modified sequence
atgtataacatgatggaaacagaactcaagccaccagggccacagcagacatctggaggagggggggggaattccactgcagccgcagctgggggaaatcagaaaaatagtcccgaccgggtaaagcgccccatgaatgccttcatggtttggagtcggggacagcgaagaaagatggcccaggagaaccctaaaatgcacaactctgagatatcaaaaagactcggggctgaatggaaactattatcagaaacagaaaaacgcccctttattgatgaagcaaagaggctgcgagccctacatatgaaagagcatccagattacaagtaccggcccaggaggaaaactaagactctcatgaagaaagataaatatacacttccaggagggctactggcccctgggggaaactctatggcaagtggagttggggttggggccggactaggagccggggtgaaccagaggatggatagttatgcacatatgaacgggtggagtaatggaagttactctatgatgcaggatcagcttggatacccacaacatcctgggctcaatgcccatggggccgcccaaatgcagcccatgcacagatacgatgtctccgctctacagtataatagtatgacgagttctcagacatatatgaacggatctcccacatacagtatgtcgtactctcagcagggaacacccggaatggccctcgggtccatgggatctgttgtcaaatcagaagccagttcctccccccccgtggtgacttcatcttctcacagtcgagccccttgtcaggctggagatttaagggatatgatttccatgtatcttcctggagctgaggttcccgagccagctgcgccaagtcggttgcacatgtcacagcactaccagagtggacccgtgcccggaactgccataaatggaacacttccattatctcacatg

SEQ ID NO: 135221 - DNA, 951 bp, Artificial Sequence
  derived and/or modified sequence
atgtacaatatgatggaaactgaactgaagcctcccggacctcagcagactagcggtggaggtggaggaaactctaccgctgccgcagcaggcggcaatcaaaagaacagccctgaccgcgtgaaacggcctatgaatgcatttatggtgtggtcccgcggacaacggagaaagatggcgcaggagaaccccaagatgcataactccgagatctcaaagcggttgggggcagaatggaaacttctgtccgaaaccgaaaaaagaccctttattgatgaggccaagcggctgcgagcactccatatgaaagaacatcctgactataagtacagacctcgccgcaagactaagactctcatgaaaaaagacaagtacacccttcccggcggcctgctggcaccagggggaaattcgatggcctcgggagtgggagtcggagccggactcggtgcgggagtgaaccagagaatggacagctacgcacacatgaacggatggtccaacggctcctattccatgatgcaagaccaacttggttacccgcagcaccctggacttaatgcccacggagcagcccagatgcaaccaatgcatagatacgacgtctccgccttgcaatacaattcaatgacctcaagccagacttacatgaacgggtcgccgacctatagtatgtcgtactcgcagcaggggacccctgggatggccctggggtcgatgggctcagtggtgaagagcgaggcctcatcaagccctcctgtcgtgactagctcatcgcatagcagagcaccatgtcaagcaggcgacttgagagacatgatttcgatgtacctgcccggagccgaggtgccagaaccagcggcaccttccagactgcacatgtcccaacattaccagtcgggtccagtgcctggaaccgcgatcaacggaacccttcccctttcgcatatg

SEQ ID NO: 135222 - DNA, 951 bp, Artificial Sequence
  derived and/or modified sequence
atgtacaacatgatggagaccgagttgaaaccccctggaccgcagcagaccagcggcggcggtggtggtaattcaacggccgctgcagctgggggtaaccagaagaactctccagatcgggtcaaacgtcccatgaatgccttcatggtttggagcaggggccagaggcgaaagatggcccaggaaaatccaaagatgcataactcggaaattagcaagcggttgggggccgagtggaagctgctgtcagaaacggaaaagaggccatttattgacgaggccaagagactgcgggccttgcatatgaaagagcaccctgactacaagtacaggcctcgccgcaaaactaaaaccctgatgaaaaaagataagtacaccctgcccggaggcctgctggctccaggcgggaacagcatggctagcggcgtcggcgtgggcgcaggtctcggagcgggagtcaaccagcgcatggacagctacgcgcacatgaacggatggagcaacggttcatacagcatgatgcaggaccagctgggctatccccagcaccccgggctgaacgctcacggcgccgctcagatgcagccgatgcaccgatacgacgtttctgctctccagtataactccatgacgtcaagccaaacctatatgaacggcagtcctacctactccatgagctatagccagcagggtacgccaggcatggctcttggatccatgggctccgtcgtgaagagtgaagcttctagtagcccacccgtcgtgacatcatcctcacacagtagggctccctgtcaggccggagacctgcgagatatgattagcatgtatctccccggcgccgaagtcccagagccagcagcgccctctcgcctgcacatgagccagcattatcagtccggaccggtcccagggacggcaataaacggcacattgcccctctcgcatatg

SEQ ID NO: 135223 - DNA, 951 bp, Artificial Sequence
  derived and/or modified sequence
atgtataatatgatggagacagagctgaaaccgccaggacctcagcagaccagtgggggcggcggtggcaacagtactgccgcagcagcaggaggaaaccagaaaaattcgccagaccgggtgaaacggcctatgaacgccttcatggtgtggtccagaggacagaggcgtaaaatggcacaggagaaccctaagatgcataatagcgaaatatcaaaaaggctgggagcagagtggaagctgctctctgaaacagagaagagacccttcattgacgaagcaaagcgtctaagggccctgcatatgaaggaacacccagattacaaatacaggccaagacgtaagactaaaactctcatgaaaaaagataagtatactctacccggcgggctgctggcaccgggggggaatagcatggctagtggggtgggagtgggtgctggtctcggcgcaggtgtcaatcagcggatggattcttatgcccacatgaacgggtggagcaacggaagttatagcatgatgcaggatcagctggggtacccccagcacccgggcctcaatgcacatggggccgcccagatgcagccaatgcaccgttatgacgttagtgccttgcagtataactctatgaccagctctcagacctatatgaatggatcgcccacctactcaatgagttactctcaacagggaacacctgggatggctctgggttcgatgggctccgttgtgaagtcggaagcctcaagcagtcccccggtggtaacttcctctagccattctcgggccccatgccaggcaggcgaccttagagatatgatatcaatgtatctgcccggtgccgaggtgccagaacccgctgcgccttccaggttacacatgagccagcactaccagagtggcccagtcccgggcacggccattaatgggacattaccactgtcacacatg

SEQ ID NO: 135224 - DNA, 951 bp, Artificial Sequence
  derived and/or modified sequence
atgtataatatgatggagacagaattgaagcctccaggtcctcagcaaacttccgggggcggaggaggaaactctactgccgcagctgccggaggcaatcagaaaaactccccggaccgcgtgaagagaccgatgaacgctttcatggtgtggtcacggggccagcggcggaaaatggcccaggagaaccctaaaatgcacaactcagagatctcgaaacggctcggagcggagtggaagctgctctcagaaacagagaagaggcccttcatcgatgaggccaagcgactgcgagcactccacatgaaagaacaccctgactataagtaccggccaaggagaaaaacaaagactctgatgaagaaggacaaatacactctgccgggcggcctcctggcaccaggaggcaattctatggcttccggagtgggcgtcggcgccggcctaggcgctggagtaaatcaaagaatggattcttacgcccacatgaatgggtggtccaatggcagttattccatgatgcaggatcaactcggttatccacagcatccgggcttgaacgctcacggcgctgcacagatgcagcccatgcacagatacgacgtcagtgctctacagtacaactcaatgaccagcagtcaaacgtacatgaatggttcacccacgtatagcatgtcctactcacagcagggcacacccggcatggctctgggctctatgggaagtgtcgtcaagtcagaagcatccagctcccccccggtcgtaacatctagttcccactcccgcgctccctgtcaagccggcgatttacgggatatgatctctatgtacctgcccggagcggaggttccggagcccgcagccccgtctaggctccacatgagtcagcactaccagtccggccccgtgccaggaacagccatcaatggtacattacccctgtcacacatg

SEQ ID NO: 135225 - DNA, 951 bp, Artificial Sequence
  derived and/or modified sequence
atgtataacatgatggagaccgagctgaaacctcctggcccacagcagacttctggaggcggaggcggcaacagcaccgcagctgcagcaggggggaaccagaagaattccccggacagagtgaaacgtcccatgaatgcatttatggtctggagtagaggacagcggcggaaaatggcacaagagaatccaaagatgcacaactctgagatttctaaaaggcttggggctgagtggaagctgctgtccgagacagagaaaaggccctttatcgatgaggctaagaggcttagagctcttcacatgaaagaacatccagactacaaatatagacctcggaggaagaccaagaccctgatgaagaaggataaatacacattgccaggaggactgctggcccccggcggcaattcaatggcaagtggcgttggcgtgggcgctgggctaggtgcaggcgtcaaccagcgcatggattcatacgcccatatgaatggatggagtaacggctcttacagtatgatgcaggaccagctgggctacccccaacatcctggcctgaatgctcatggcgccgctcagatgcagccaatgcataggtacgacgttagcgccctccagtacaacagcatgactagctcccagacctacatgaatggcagcccaacatattccatgagctactcacagcaaggaacaccaggcatggccctgggcagcatgggatcagtggttaagtctgaggcctccagctccccccccgtcgtcacttctagttcccattcacgcgccccatgtcaggctggcgacctacgcgacatgatatctatgtatctccctggtgccgaggtgccagaacctgcagctcctagtagactgcacatgagccagcactaccaatccggccccgtgcctggcacagccataaacggcaccctgcctctcagccatatg

SEQ ID NO: 135226 - DNA, 951 bp, Artificial Sequence
  derived and/or modified sequence
atgtacaacatgatggagactgaattgaagcccccaggtccacagcaaacaagtggtggcggcggaggtaatagcactgctgcagccgcaggcggaaaccagaagaactctccagatagagtgaagaggcccatgaacgcttttatggtgtggtctaggggacagcgccgcaagatggcacaggagaaccccaagatgcacaactcagagatcagcaagcgcttgggtgctgagtggaagcttctgtccgagactgaaaaaagaccttttatagacgaggcgaagcgcctgcgcgcgctgcacatgaaggagcaccctgattacaaatacaggccgagacgcaagacgaaaacccttatgaagaaggataagtataccttgcctggaggcctgctggccccaggcggaaatagcatggcttctggcgtgggcgtcggagccggtctcggcgcgggcgtcaaccagcgcatggactcctatgcgcatatgaatggctggtccaatggctcctactctatgatgcaggatcagctcggatacccccagcaccctggactgaatgctcacggagccgctcaaatgcaaccaatgcaccgctacgatgtcagcgctcttcaatataattccatgacctcttcccagacgtatatgaacggaagtcccacctattctatgtcttactcccaacagggtacaccgggtatggcccttggatcaatgggtagtgtcgtgaaatccgaggccagctcttcaccccccgtagtgacaagttccagccatagcagggcaccatgccaggccggtgacctccgcgacatgatttctatgtatctccccggagcagaagtacccgagcccgctgcgcctagccgcctgcacatgtcacaacactaccaaagcggacccgtgcccggaacagcaatcaacggaaccctgcccctctcacacatg

SEQ ID NO: 135227 - DNA, 951 bp, Artificial Sequence
  derived and/or modified sequence
atgtacaacatgatggaaaccgagctcaaaccccccggaccgcaacaaacctcgggaggtgggggagggaattccactgcagcagccgcaggcggaaatcagaagaactctcccgacagggtcaaaagaccaatgaacgcatttatggtatggagcagaggccagcgcagaaagatggcacaagaaaatccaaaaatgcataattccgaaatctccaagaggctcggtgcagaatggaaactgctgtcagaaactgaaaagcgccccttcattgatgaagccaaacgtctgcgggcactgcacatgaaggaacacccagattacaagtaccgaccgagacgcaagactaagactttgatgaaaaaggacaagtatacccttccgggaggcctcttggcccccgggggaaactcaatggcatctggagtgggagtgggagcaggactgggtgcgggtgttaaccaaagaatggattcgtacgcacatatgaacgggtggtccaacgggtcctactcgatgatgcaagatcagctgggatatccgcagcatcctggacttaacgcacatggagcggcgcagatgcagccaatgcacagatacgacgtgtcggcactgcagtacaactcgatgacttcgtcccagacgtacatgaacggatccccaacttacagcatgtcctacagccaacaaggtacccctggcatggcacttggctcaatgggatcagtggtgaagtcggaggcgtcgtcgtcgcctccagtcgtgacttcatcgtcacactcacgcgcaccctgtcaagccggggaccttcgcgacatgatctcgatgtacttgcctggagccgaggtcccggaacctgcggcgccctccagactgcatatgagccagcattaccagtccgggccagtgcctggtaccgccatcaacggaactctcccactctcccatatg

SEQ ID NO: 135228 - DNA, 951 bp, Artificial Sequence
  derived and/or modified sequence
atgtacaatatgatggaaactgaactcaagcccccgggcccacaacagacttcgggaggtggaggaggaaacagcaccgccgcagccgcaggtggaaatcagaagaactctcctgacagagtgaagcgtcctatgaatgcatttatggtgtggtcccggggacaaaggcgaaagatggcacaggaaaatcctaagatgcataacagcgaaattagcaaacgacttggagcagaatggaaacttctttcggaaactgaaaagcggccatttatcgatgaagcgaagcgtctccgggcactgcatatgaaagagcatcctgactacaagtaccgcccccgaagaaagactaaaactctcatgaagaaggataagtacaccctgcctggcggattgcttgcacctggaggcaactcaatggcctcgggagtgggagtgggagcgggtctgggtgccggggtgaaccaaagaatggactcctatgcacatatgaatggatggtcaaacgggtcgtactcgatgatgcaggatcaactgggatacccccaacaccctggtcttaatgcacatggagcggcacagatgcaaccaatgcatcgatacgatgtgtccgcacttcagtacaatagcatgaccagcagccagacttacatgaatggatctccaacctactccatgtcgtactcacaacaggggactcctgggatggcattgggttctatgggatcagtggtcaagtccgaggcttcatcatcgccacctgtcgtgacctcctcgtcgcattcgcgcgctccttgtcaggcaggtgatctgcgtgacatgatttcgatgtacctgccgggagccgaagtgcccgaacctgctgcaccatcgcgccttcacatgtcgcagcactaccaaagcggtcctgtgccaggcactgcaattaacggaactctgccactcagccatatg

SEQ ID NO: 135229 - DNA, 951 bp, Artificial Sequence
  derived and/or modified sequence
atgtacaacatgatggagactgagctgaagcctcccggtcctcaacaaactagtggcggcggaggcggtaactctactgccgcggcagccggaggtaaccagaagaattcgcctgaccgagtcaaaagaccgatgaatgccttcatggtatggtcacgaggacagcgtagaaagatggcccaggaaaacccgaagatgcacaattcagagatctctaaaagattgggagctgagtggaaactgttgtcagagaccgagaagagacctttcatcgatgaggctaaacgactaagggccctgcacatgaaagagcaccctgattataagtacagacctaggaggaagaccaagaccttaatgaaaaaggataaatacacactgcccggaggactgctcgcccctggtgggaactctatggcctcgggcgtgggcgtgggcgccgggttgggagccggagtgaaccaacgaatggattcttatgcccacatgaatgggtggagcaacggcagttattctatgatgcaggatcaacttggatatccccagcaccccggactcaacgcacacggagcagcccagatgcagcctatgcatcgttacgatgtttctgccctacagtataactcaatgaccagcagtcagacatacatgaacggctctccaacctactctatgagctatagccagcagggcacccccggcatggcattgggctccatgggttccgtagtgaagagcgaggcctcttccagccccccagtggtcacctcatcttcacactccagggccccatgccaggcaggagatctgcgggacatgatatccatgtatctgcccggggccgaagtgccagaaccggctgccccatcaagattgcacatgagccagcactaccagtccggccctgtgcctggtaccgccatcaacggtaccctgcctctgtcacacatg

SEQ ID NO: 135230 - DNA, 951 bp, Artificial Sequence
  derived and/or modified sequence
atgtacaatatgatggagaccgaacttaagccgccaggacctcaacagactagcggaggaggcggtggaaactccacggcagcggccgcaggcggcaaccagaagaattcaccggacagagttaagcgccctatgaacgcttttatggtttggagcagaggacaacgccgcaagatggctcaggaaaatccaaagatgcataatagcgaaatctcgaaacgcttaggtgcggaatggaaattgcttagtgagacagaaaaacgcccttttatcgatgaagctaagaggttgcgtgcacttcatatgaaagagcatcctgactataagtatcgtccacgtaggaaaacaaagaccctcatgaagaaagacaaatataccctgcctggggggctccttgctccaggcggcaattcaatggcatcgggggttggcgttggggcgggattaggagcgggggtcaatcaacgtatggacagttacgcccatatgaatggttggtccaatggttcatattccatgatgcaggatcagcttggttacccgcaacatccagggttaaatgctcatggcgctgcccaaatgcagccgatgcatagatacgatgtatcagcactgcaatataactctatgacgtcaagccagacatacatgaacggtagtccgacgtactcgatgtcatactcccagcagggaaccccgggaatggcacttggatccatgggaagcgtagtgaaatcggaggcctcctcttcaccgcctgtggtaacaagttccagccattcacgcgcaccatgtcaggccggtgacctacgcgatatgatctcaatgtacctcccgggcgctgaagttccggaacccgcggcaccgagtcggctccatatgtcacagcattatcaatcggggccggttccggggacagccatcaacggaacacttccattaagtcacatg

SEQ ID NO: 135231 - DNA, 951 bp, Artificial Sequence
  derived and/or modified sequence
atgtataacatgatggagactgaactgaagccccccggcccacagcagacttctggagggggaggtggtaattctacggccgcagccgccggggggaatcagaagaactcccccgaccgtgtgaagcgacccatgaacgccttcatggtctggtccaggggacagcgaaggaaaatggcgcaggagaaccctaagatgcacaactctgaaatctcaaaacggttgggcgcagaatggaaacttctatcagaaaccgagaagagaccctttatcgatgaggccaagaggctccgggcccttcatatgaaggaacacccggactacaagtatagacctagacggaagacaaagactctaatgaaaaaagataaatatacattgccagggggattgttggcccccgggggcaatagtatggcctcaggagtcggcgtcggcgcgggcttgggagcgggcgtgaaccaacgcatggacagctatgcacacatgaatggctggtcgaatggcagctactctatgatgcaggaccagctcgggtaccctcaacacccgggtctgaatgcacatggggctgcccagatgcaacccatgcataggtacgacgtttctgctctccagtacaattcaatgactagcagtcagacctacatgaatggttcacccacctactctatgtcttacagtcaacagggtacaccaggcatggcactgggaagcatggggtccgtcgtgaagtccgaggctagctcctccccaccggtcgtcacgagcagtagccattctagagccccatgccaggcaggagatctgcgagatatgatcagtatgtatctcccaggagccgaagtgcctgagcccgcagccccctcccgactccacatgtctcagcactaccagagcggtcccgtcccaggtaccgcaatcaatggcacccttccgctcagccacatg

SEQ ID NO: 135232 - DNA, 951 bp, Artificial Sequence
  derived and/or modified sequence
atgtacaacatgatggagactgagcttaagcctcccgggccccaacagactagtggcggcggaggagggaatagcacggcggccgccgccgggggcaatcagaaaaactctcctgaccgcgttaagcggcctatgaacgccttcatggtgtggagcagaggacagagacggaagatggcccaggaaaaccccaagatgcataatagcgagatatctaagaggctcggcgccgagtggaagctgctgtctgagacggaaaagagaccttttatagatgaggccaaacgcctccgcgctttgcacatgaaggagcatccggattacaagtatcgcccccggagaaaaacaaagaccctgatgaaaaaggacaagtatacactccctggcggcctgctggcccctgggggcaactcaatggcaagcggggtcggcgtgggggcaggtttgggcgcaggtgtcaaccaaaggatggatagttacgcccacatgaacggttggtccaatggttcctattccatgatgcaggaccagctgggatacccacagcatcctggtctgaatgctcatggggcagctcagatgcaacctatgcatcgatatgatgtctctgctctgcagtataacagcatgactagctcccagacctacatgaatggcagcccgacgtattcaatgtcttattcccaacaaggtactccaggaatggcactgggctcgatgggatccgtcgtgaagtcagaggcttcaagctcaccacccgtggtgacttccagcagccactcaagagctccgtgccaagctggggaccttcgggacatgatctcaatgtaccttcctggtgcagaggtgcccgaaccagctgccccctcccgcttacatatgtcgcagcactaccagtctgggccagttccaggaacggccatcaacggcacactcccccttagccacatg

SEQ ID NO: 135233 - DNA, 951 bp, Artificial Sequence
  derived and/or modified sequence
atgtacaatatgatggaaacagagctgaaaccgccaggaccacaacagactagcggcggcgggggtggaaattctaccgccgcagccgcaggtggcaatcagaagaactcacctgatagagtgaagcgcccaatgaatgcattcatggtttggtcgagagggcagcgcagaaagatggcccaggagaaccctaaaatgcacaactctgaaatcagcaagcgccttggcgccgagtggaaactgctcagcgaaactgagaagcgtccattcattgacgaagcaaaacgcctgcgagctctccacatgaaggagcaccccgattataagtaccgcccacgacgtaaaactaagaccttaatgaaaaaggacaagtacaccctgcctggcggactattagctccgggtggaaatagtatggcgtcgggcgtgggcgtgggcgctggactgggagcaggagtgaatcaacgcatggattcctatgcccatatgaacggttggtcaaacgggagctacagtatgatgcaggatcagctgggctatccgcagcatccaggcctgaacgcacacggcgccgcccaaatgcagcctatgcaccgatacgatgtttcagccctgcaatacaatagcatgacttcaagccagacctacatgaatgggagccctacttattccatgtcctacagccagcagggtacacctgggatggcactcggaagcatgggctctgtcgtgaaaagcgaggcttcctcttctcccccagtggtcacgtcttcatcccacagtcgagccccttgccaggctggggatctgagggatatgatttctatgtatctgcctggggccgaggtacccgagccagccgcgccctctaggctgcacatgtctcagcactatcaatcagggccagtgcccgggaccgccattaacggcaccttgcccctctctcatatg

SEQ ID NO: 135234 - DNA, 951 bp, Artificial Sequence
  derived and/or modified sequence
atgtataatatgatggagactgaactgaagccgcccggcccacaacagacgagcgggggaggggggggaaatagtacagctgctgctgccggaggtaatcagaaaaactcacccgacagggtcaaaagacctatgaacgccttcatggtctggtcccgcggccagcgtcgcaaaatggcccaggagaatccaaagatgcacaattcagaaatcagcaagcggctcggagccgagtggaagctgctgtctgaaactgaaaagcggccttttatcgacgaggcgaaacgtctcagggcgcttcacatgaaggaacatcctgattacaaataccggccacggcgtaagactaagacactgatgaagaaagacaaatatacactcccaggcgggttgctcgccccgggtggcaactccatggcctccggtgttggtgttggcgccggccttggcgccggcgttaaccagagaatggactcctatgcccacatgaatggctggtcgaatggatcatactccatgatgcaagaccagctgggctacccgcagcacccagggttgaatgcccatggtgccgcacaaatgcagcctatgcatagatacgatgtgagcgccctccagtataactcaatgacaagtagtcagacttacatgaatggtagccccacttacagtatgagctattcacagcaagggacccccggcatggcactaggtagcatgggctcagttgtgaaatcagaagcctcttctagtcctcccgtcgtgacttcatctagccactctagggcaccatgccaagcaggcgatctgcgggatatgatcagtatgtacttgcccggagctgaggtgcccgaacccgcagcaccctctaggctgcacatgtcccagcactatcaatccggcccagtccctgggaccgctataaacggcacactgcctctgtctcacatg

SEQ ID NO: 135235 - DNA, 951 bp, Artificial Sequence
  derived and/or modified sequence
atgtacaacatgatggaaactgagctcaagccgccgggaccacagcagacctcgggaggcggcggaggaaacagcactgccgccgctgccggcggaaaccaaaagaattcgcctgacagggtgaagcggcctatgaacgctttcatggtgtggagcagagggcagcggcgcaagatggcacaggaaaacccgaaaatgcacaactccgagatctcgaaacgcctcggagccgagtggaagctgttgagcgaaaccgaaaagcgcccatttatcgatgaggcgaagagactgcgcgccttgcacatgaaagaacacccggattacaagtaccggcctaggagaaagaccaagactctgatgaagaaagataagtacaccctgccgggaggattgctggcacctggaggtaactcaatggcatcaggagtgggtgtgggagcgggactcggcgcaggagtgaaccagcggatggattcctacgcgcacatgaatggttggtcgaacggatcatactcgatgatgcaggatcaactgggatacccgcagcatccgggactgaatgcgcatggcgccgcacaaatgcagccaatgcaccgctacgacgtgtccgccctgcaatacaacagcatgacgtcctcccagacctacatgaatggctcgccgacctactccatgtcgtactcacagcaaggcactccgggcatggctctcggcagtatgggaagcgtcgtgaaatcagaggctagctcgagccccccagtggttacctcctcatcccacagccgcgctccgtgtcaggccggcgaccttagagacatgatctcgatgtacctccctggggccgaggttcccgagccggcggccccgtcgcggctgcatatgagtcagcactaccaatccggcccagtgccgggaactgccattaacggcaccctgccactgtcccacatg

SEQ ID NO: 135236 - DNA, 951 bp, Artificial Sequence
  derived and/or modified sequence
atgtacaacatgatggagactgaattaaaacctcccgggccacagcagacttctggtggcggggggggaaattccacagcagctgcagcaggcggcaatcaaaaaaattctccagatagagtaaaacgtccaatgaacgcctttatggtctggtcaaggggccagcgacgaaagatggcgcaagagaaccccaagatgcataatagtgagatctcgaagcgactcggggctgagtggaagttattgtccgagaccgagaagaggccgtttattgacgaggccaaacgactcagagctctacacatgaaagaacatcctgactataaatatcgacctcgaaggaagactaaaactctcatgaaaaaagacaagtatacccttcccggcggattgcttgctcctggtggcaactctatggcaagcggtgttggagtgggcgccggcctcggggcaggtgtgaaccagagaatggattcttacgcccacatgaacggctggtccaacggctcctattcgatgatgcaggaccagctgggctacccgcagcacccaggtcttaatgcccatggcgccgcccagatgcagccgatgcacaggtatgatgtgtcagctctgcagtacaactctatgaccagctctcaaacctacatgaacggttcaccaacatactctatgagttattcacagcagggtacaccagggatggccttgggctcgatgggatcagttgtcaagtctgaagcttcctcgagccccccagtagtcaccagctcctcccactctcgagccccctgtcaagctggggacttgcgcgacatgatctcaatgtatctccccggcgcggaagtgcctgagcccgcagccccctcaaggttgcatatgtcacagcactatcagagcggccctgtgcctggtactgctatcaatggtacattaccactgtcccacatg

SEQ ID NO: 135237 - DNA, 951 bp, Artificial Sequence
  derived and/or modified sequence
atgtacaacatgatggagaccgagctaaagccccctggcccacagcagacctctggcggcggtggtggcaattccacagccgccgccgctggcggcaaccagaagaactcaccggatcgcgtcaagcgtcccatgaatgcattcatggtatggtcgagggggcaacgacgcaagatggctcaggagaatccgaagatgcacaactccgagatctccaaacggctgggtgccgagtggaagctgctctcagagactgagaagagaccgtttattgacgaggcaaagaggctgcgtgccctacacatgaaggagcaccccgactacaaatatcgaccgagacgaaaaacgaagaccctgatgaagaaggacaagtataccctaccgggaggcctgctagccccaggaggtaactccatggcctccggcgtcggcgtcggagccgggctgggcgcgggagtcaaccagcgtatggattcctacgcccacatgaacggctggtcgaacggatcctactccatgatgcaggaccagttgggatacccacagcaccctggtctgaatgcgcacggcgctgcacagatgcagcctatgcacagatacgatgtgagcgctttgcagtataattccatgacatcgagccagacatacatgaacggcagtcccacgtatagcatgtcttacagccagcagggcacgccgggaatggccctgggcagcatgggcagtgttgtgaagtcggaggcctccagctctccacccgtggtgaccagtagttcacactctagagctccttgtcaggccggagacctgcgggatatgattagcatgtatctgccaggtgctgaggtgccggagcccgcggccccgtcacgcttgcatatgagtcagcattatcaatctgggccggtgccaggaaccgccattaatggcactctgccgctgtcacatatg

SEQ ID NO: 135238 - DNA, 951 bp, Artificial Sequence
  derived and/or modified sequence
atgtataacatgatggaaacagagctgaaacctcccgggccccaacagacatcaggcggtggtgggggcaattctacggcggctgcagctgggggcaatcaaaaaaacagcccggacagggtgaaacggcccatgaatgcgttcatggtgtggtcacggggacaaagaaggaaaatggcgcaggagaatcctaaaatgcataactcagaaatctcaaaacgcttaggcgctgaatggaaactgctgtcagaaactgagaagcgtccattcatcgatgaggcaaagagacttagggcgttgcatatgaaggagcatccggactacaagtatcggccccggaggaagaccaaaaccctaatgaagaaagacaaatatacgctgcccggcggtctgctggccccaggtggaaacagtatggcctccggggtgggggtgggggccgggctgggtgctggggtcaatcagagaatggacagctatgctcatatgaatggctggagcaacggaagctacagtatgatgcaggaccagttgggatacccgcagcaccccggcctcaacgctcacggtgccgcgcagatgcagccaatgcataggtacgacgtatccgccctgcaatacaattcaatgactagttcccagacttacatgaatgggtcacctacttactcaatgagctattctcagcagggaacgcctgggatggcccttggatctatgggatctgtcgtaaagtctgaggccagctcaagtccccccgtcgtgacaagctcatctcattctcgagctccttgtcaggccggagatcttagagatatgatctcgatgtacttgcccggggcggaagtccctgagcccgcagccccctcccgcctgcacatgtctcagcactatcagtctggacccgtgcctggaactgccatcaacggtacattacccctctcacacatg

SEQ ID NO: 135239 - DNA, 951 bp, Artificial Sequence
  derived and/or modified sequence
atgtataacatgatggaaacggaattgaagccgccagggccacagcaaacctcgggaggaggcggaggaaattccaccgctgccgcggctggtggtaaccagaagaactcgccagacagggtgaagcgcccgatgaatgcttttatggtgtggagccggggccaacgtcgcaagatggcgcaagaaaacccaaagatgcataactcggagatctcgaaaagacttggcgcagagtggaagctgttgtcagaaaccgagaagcgtccgtttatcgatgaagccaaacgcctgcgcgcactgcacatgaaggaacatccggactacaaatacagaccgcggagaaagaccaagactttgatgaagaaagacaagtacactcttccaggtggactccttgcaccaggcgggaactccatggcgtccggcgtgggggtgggagccggtctgggagctggagtgaatcagcgaatggacagctacgcacatatgaatgggtggtccaacggctcatatagcatgatgcaagatcagctcggatacccgcagcaccctggactgaacgcacatggggcagcgcaaatgcagccgatgcaccgctacgatgtgtcagcgctccagtataactctatgacttcaagccaaacctacatgaatggctcgccaacttactctatgagctactcgcagcagggtaccccgggcatggcactgggatcgatgggatcggtcgttaaatcagaggcttcgtcgtcgcctccggtcgtcaccagctcctcgcactcccgcgccccatgccaggctggcgacttgagggatatgatctcaatgtaccttcccggcgccgaagtgcccgagccggccgctccctcccgacttcacatgtctcagcactaccaatccggacctgtcccggggactgccatcaatgggaccctgcctctctcccacatg

SEQ ID NO: 135240 - DNA, 951 bp, Artificial Sequence
  derived and/or modified sequence
atgtacaacatgatggagactgaacttaagcctcccggccctcagcagacctcgggaggaggaggtggtaactcaaccgcagccgcggcaggtgggaatcaaaagaactcgccagacagggtgaagcggccaatgaatgccttcatggtctggagccgaggtcagcggaggaagatggcacaagagaatcccaagatgcataattcagagatatcaaagagactgggcgcggagtggaaactgctgagcgaaaccgagaagcggccgtttatagacgaagccaagcgtctgcgggcactgcatatgaaggaacacccagactataagtacagacctcgccggaaaactaagaccctcatgaaaaaggacaaatacactctgcctggcggactgctggcaccggggggtaactccatggcatcaggagtcggagttggagcggggctgggagccggagtgaaccagagaatggattcgtacgcacacatgaacggttggtccaacggatcttactcgatgatgcaagatcaacttgggtacccccaacatcctggactgaacgcacatggcgcagcccaaatgcaaccaatgcatcgatacgatgtgagcgccctgcaatacaattccatgacgtcgtcacagacgtacatgaacggatcacccacttactcgatgtcctactcacagcagggaaccccgggtatggcacttggatctatggggtccgtggtcaaatccgaggcatcctcatctcctccagtcgtcacttccagctcccattcgagggcaccatgtcaagcgggagatcttcgggatatgatttcgatgtacttgccaggggcagaggtgcccgaaccggcagcacctagccgccttcacatgtcccaacactaccaatcggggcctgtgcctggtactgcgatcaacggaacccttcctctctcgcacatg

SEQ ID NO: 135241 - DNA, 951 bp, Artificial Sequence
  derived and/or modified sequence
atgtacaacatgatggaaaccgaacttaaaccgcctggcccacaacaaacttcgggtggtggcggcggaaactccaccgccgctgcggcggggggaaaccagaaaaactccccagaccgggtgaaaagaccaatgaatgcatttatggtatggagcagaggacagcgtcggaagatggcacaagaaaaccctaagatgcataattcagaaatttccaaacggcttggggctgaatggaaattgcttagcgaaaccgagaaaagaccctttatcgacgaagcaaagcggctcagagcactgcatatgaaggaacatcctgattacaagtatagacctcgtcgcaagaccaagactcttatgaagaaggataagtacacgctgccaggaggtctgttggctcccggtggtaactcaatggcatccggtgtcggagttggagcgggccttggggcaggtgtgaaccagagaatggattcgtacgcacacatgaacggttggagcaatggctcgtacagcatgatgcaagatcagctgggttatccacagcatcctggtttgaatgcacatggagcagcacagatgcaaccgatgcaccgctacgatgtgtccgccctccagtacaactcgatgacttcatcgcaaacttacatgaatggaagccccacttactccatgagctactcacagcaaggtacccctggaatggccctgggatcgatgggaagcgtggtcaagtccgaggcatcgtcgtctcctccggtcgtgacttcgagctcgcattcccgagccccctgtcaagcaggggaccttcgggacatgatatccatgtaccttccaggggcagaggtgccagagcccgcagcaccatcccgcctgcacatgagccaacactaccaatcagggccagtgcccggaaccgcaattaacgggaccctccctctgtcccacatg

SEQ ID NO: 135242 - DNA, 951 bp, Artificial Sequence
  derived and/or modified sequence
atgtataacatgatggaaactgagcttaagccaccgggtccacaacagacatccggcggtgggggcggcaactccactgcggcggcagcaggcggaaatcaaaagaatagtccggaccgggttaagcgtcctatgaatgctttcatggtttggtctcggggtcagaggcgtaagatggcacaagaaaacccgaagatgcacaactccgaaatatcaaagcgcctgggggccgagtggaagttgctgagtgaaaccgaaaagcgtcccttcattgacgaagctaagcgtctccgcgctctccatatgaaggagcatcctgattacaagtacaggccacgacgcaaaactaaaacgcttatgaagaaggacaagtacaccttacccggcggccttcttgctcctggtggaaactcgatggcgtccggcgtcggcgttggcgccgggcttggcgctggggtaaatcagaggatggattcatacgctcatatgaacggttggagcaatgggtcttatagtatgatgcaagaccaattggggtatccccagcacccaggcctaaacgctcatggcgctgcacagatgcagccgatgcatcgatacgacgtctccgctttgcagtataattcgatgacgtcatcccagacgtacatgaacggatcccctacctattccatgtcatattctcagcaggggacccctggcatggcactgggctctatggggagtgtagtcaagagtgaagcctcgtcttcccctccagtggtgacatcctcgagtcactctcgtgcaccctgccaggctggggacctacgcgatatgatctctatgtatctacctggcgccgaggtgcctgagcccgccgccccctctcgtctccatatgtcccagcactatcaatcgggtccagtgcctggcactgctataaacggcaccttgcctttatcacatatg

SEQ ID NO: 135243 - DNA, 951 bp, Artificial Sequence
  derived and/or modified sequence
atgtacaacatgatggaaacggagctgaagccacccggcccccagcagaccagtgggggcggcggtgggaacagtacagcggccgccgccggcgggaatcagaagaatagccccgatcgggtgaagcggcccatgaacgcgtttatggtatggagccgcggtcaacgcagaaagatggcacaggagaaccctaagatgcacaatagcgaaatctcaaaacgcttgggagccgagtggaagcttctgtcagagaccgagaaacggccttttatcgacgaggctaaacggctccgggcgctccacatgaaggagcacccggactacaagtatcggccccgccgtaagacaaaaacattgatgaagaaagacaaatacacactgcccggggggctgttggcccctggaggaaattccatggcttcaggcgtgggcgtcggggccgggctaggagctggcgtcaaccagcggatggattcatacgcacatatgaacggatggtcaaacgggtcatatagcatgatgcaggatcagctcgggtacccccagcaccccggcttaaacgcccacggcgcagcacagatgcagccgatgcatagatatgacgtgtccgctctccagtataatagtatgacctcgtcgcagacgtacatgaatgggtctcccacctactccatgagctactctcagcagggtacccctgggatggccctgggcagcatgggctcagtcgttaaatccgaggcttcctcgagtccccccgtcgtcaccagcagtagccacagccgcgccccatgccaagccggtgacctgcgagatatgataagcatgtacctccccggggcagaggtccccgaaccagccgctccatcaagactgcatatgtctcagcattaccagagcggccccgtgcccgggactgcgatcaatggaaccctgccattaagtcacatg

SEQ ID NO: 135244 - DNA, 951 bp, Artificial Sequence
  derived and/or modified sequence
atgtacaacatgatggagactgagctgaagccacctggaccgcagcaaacgagcggtggtggaggtggcaactccaccgcggcagcagcagggggcaaccaaaagaattcccctgatagggttaagagacctatgaatgcttttatggtctggtcgagggggcagcgcagaaaaatggcccaagaaaacccaaagatgcacaactcagagattagcaagaggcttggtgccgagtggaagctgctgagtgaaacagagaagagaccctttattgacgaggctaaacggctcagggcactgcacatgaaggagcatcctgactacaagtaccgtcctaggagaaaaacaaagaccctcatgaagaaagataagtacacactgccagggggtcttcttgccccaggaggaaacagcatggcgtctggagttggagtcggtgcggggctcggtgctggggttaaccagaggatggacagctacgcccatatgaatggctggagcaacgggagctatagcatgatgcaggatcagctgggctacccacaacaccccggactaaacgcccacggagctgcccaaatgcaaccgatgcataggtacgatgtgtctgccctgcaatacaactccatgacaagctcacagacttacatgaacgggagccccacatactctatgagttattcccagcagggaaccccgggcatggctctcggctcaatgggctccgtcgtaaagtccgaggcatcgagttctcctccagtggtcacctcatcctcacactccagggctccttgccaggcaggagatttgagggatatgatctctatgtaccttcccggcgccgaggtcccagaacctgccgctcctagtaggctgcatatgagccaacactaccaaagcggtccagtgcctggtactgctattaacggcacactgcccctgagccacatg

SEQ ID NO: 135245 - DNA, 951 bp, Artificial Sequence
  derived and/or modified sequence
atgtacaacatgatggaaacggaacttaaacctccgggtccccagcagactagcggcggaggcggcggtaacagtacggcagcggctgccggaggtaaccaaaagaactcgcctgatcgagtcaagcggcctatgaatgccttcatggtctggagcagaggacagagaagaaagatggcacaggaaaatcccaagatgcacaatagcgaaatatctaagcgcctgggtgccgaatggaagctcttgtcagaaactgagaagcgtccatttatcgacgaggcaaaacggctcagggctcttcacatgaaagaacaccccgactacaagtaccgcccgcgccgtaagactaagactttgatgaagaaagataagtacacccttcctggggggctgctggcccctggaggaaacagcatggcgtcaggtgtgggtgtgggagcggggcttggagcaggggtcaatcagagaatggactcgtacgcacatatgaatggatggtcgaacggatcatactcaatgatgcaggatcagcttggctaccctcaacaccccggactgaatgcccacggggcagcacagatgcaacctatgcacagatacgacgtctcggcgcttcaatacaactcaatgacctccagtcagacttacatgaatgggtccccgacctattccatgtcatactctcaacaaggcactccaggaatggccctgggatcgatgggatcggtggtgaagtctgaagcatcctctagcccgccagtggtgacctcctcgtcccattcgagagcgccctgccaggcaggcgatctgcgagatatgatttccatgtatctgcctggtgcagaggtcccggaaccagcagcgccttcacggcttcatatgtcacagcactaccagtcagggcctgttcccggcaccgcaatcaacggaacccttccactgtcgcacatg

SEQ ID NO: 135246 - DNA, 951 bp, Artificial Sequence
  derived and/or modified sequence
atgtataacatgatggaaactgagctcaagccgcccggaccgcagcagacgagcggaggtggagggggaaactctactgcagcagcagctgggggaaaccaaaagaacagcccggaccgcgtgaagcgccctatgaatgcgttcatggtgtggagccgtggccaaagacggaaaatggcccaggaaaatccgaaaatgcacaattcggagatctctaagaggctgggcgcagaatggaaacttctctcagagactgagaagcgaccatttatcgacgaagcgaagagacttcgcgccctccatatgaaggagcaccctgattacaaataccgccctcggcggaaaactaagaccctgatgaaaaaggacaagtacacgttgccagggggactgctggcccccgggggaaattcgatggcgtcaggagtgggtgtcggtgcgggacttggtgcaggtgtgaaccagagaatggacagctacgcacatatgaacgggtggagcaacggatcatattcgatgatgcaagaccagctcggatacccccagcacccaggcctgaatgcgcacggggctgcccagatgcagccgatgcaccgctacgatgtctcggccctgcaatacaactccatgacttcgtcccagacctacatgaacggcagccctacctactcaatgtcgtactcccagcaaggcactccagggatggcactggggtcgatgggatccgtggtcaagtccgaagcgtcgagctcgccaccggtggtcacctcgtccagccactcgcgcgctccatgccaagccggtgatttgcgggacatgatctccatgtacctgcctggagccgaagtgcccgaaccggcggccccatccagactgcacatgtcccagcattaccagtcgggcccggtgccgggtacggccataaatggcaccctcccgctgagccatatg

SEQ ID NO: 135247 - DNA, 951 bp, Artificial Sequence
  derived and/or modified sequence
atgtataacatgatggagacagaactgaagccccctggaccccaacagaccagcggcggcgggggagggaattccaccgccgctgcggcaggcgggaatcagaagaattccccagacagggtaaagcggcccatgaacgcctttatggtttggagccgagggcagcggcggaagatggcccaggagaatcctaaaatgcacaactctgaaatctctaaaagactcggagcagaatggaaactactgtccgaaactgaaaagcggccatttattgatgaagcaaagagactccgagcactgcacatgaaagagcaccccgattataaatatcgtcctagaaggaagacaaagaccttgatgaagaaggataaatatacgctccccggcggcctgctggctcccggcgggaactcgatggcctctggggtgggggtcggcgccgggctaggcgctggagtgaaccaacgtatggatagctatgcacacatgaatgggtggtcaaacggatcgtatagcatgatgcaggatcagttagggtacccccagcaccctggactgaacgcccacggagccgctcagatgcaaccaatgcaccgatatgacgtgtccgccctgcaatacaactctatgacttcttcccagacttacatgaacggctccccgacctattctatgagctattcccagcaaggcacacctggaatggccctcggaagtatggggtctgtcgtgaagagtgaagcgtcttcctcaccgcctgttgtgacttcttcctcacacagccgagctccctgccaggctggggatctccgcgacatgatctccatgtatctgcccggcgccgaagttccagaaccagccgccccgtctcgtcttcacatgagtcagcattaccagtctggtccagtgccagggactgcgatcaacggtacattaccactgtcacacatg

SEQ ID NO: 135248 - DNA, 951 bp, Artificial Sequence
  derived and/or modified sequence
atgtacaacatgatggagaccgaactgaaacctccaggtcctcagcagactagcggtggtggtggcggcaactccactgcagcggccgccggggggaatcaaaagaactctcctgatagagtgaagcgcccaatgaatgcgtttatggtgtggtcccgtggtcagcgccggaaaatggcacaagaaaaccctaagatgcataattccgaaatatcaaaacgcctgggagcggaatggaaactgctaagcgagacggagaaacgcccttttatcgatgaagctaagcgcctgcgtgctttacacatgaaagaacacccagattataagtatcgcccgcgtcgtaagacgaagaccttgatgaaaaaggataagtatacgctgccaggtggtctgctcgcgcctggtggcaattctatggctagcggggtgggcgtgggtgcgggcttgggtgcaggcgtgaatcagcgcatggattcctatgctcacatgaacggttggtcaaacggcagctattctatgatgcaggatcagctgggttacccgcagcatccgggcctgaatgctcacggcgcggctcaaatgcaacctatgcaccgttacgatgtctcggcactgcagtataatagcatgaccagctcccagacgtacatgaacgggagccctacctacagcatgagctacagccagcaggggactccgggtatggcgttgggaagcatgggctcagtcgtcaagagcgaagcgtcgagctccccaccggtagtgaccagtagctcccattctcgtgcgccgtgccaggcgggtgacctccgggatatgatcagtatgtacctgcctggcgcggaggtcccagagccggcagctccaagcagactgcatatgagtcaacattatcaaagcggcccggtgccaggcaccgctattaacggaactctgccactgtctcacatg

SEQ ID NO: 135249 - DNA, 951 bp, Artificial Sequence
  derived and/or modified sequence
atgtacaacatgatggagacagaattgaagccacctggcccacagcagacaagtggtggaggcggaggtaattctactgctgctgctgccggtggaaaccagaagaactccccagaccgcgtaaaaaggcccatgaatgcatttatggtgtggagtcgcggacagcgccgcaaaatggcacaggagaacccaaaaatgcacaacagtgagatttccaagagattgggagctgaatggaagctgctgtccgagaccgagaagaggcccttcattgacgaggcaaagcgcttgcgcgctctgcacatgaaggagcaccccgactacaaatacaggccacgccgcaaaaccaagaccttgatgaagaaggacaaatataccttgcctggtggtctgctcgccccaggtggtaactctatggccagtggcgttggagtcggcgccggactgggcgctggcgttaaccagcgtatggatagttacgctcatatgaatggctggagcaacggatcctactctatgatgcaggaccagcttggataccctcagcaccctggactcaatgcccatggcgctgcccagatgcagcctatgcaccgctacgacgtttcagcccttcagtacaatagtatgaccagctcccagacttatatgaatggctctcctacctattcaatgagttactcccagcagggtacaccaggaatggcactgggctcaatgggatctgtggtcaagtccgaagcctcttcttcccctcccgtcgtaacatcctcttctcacagccgtgcaccatgccaggcaggcgatcttcgcgatatgatctctatgtacttgcccggagccgaggtacccgaacccgctgcccccagcagactccatatgagccagcattaccagagtggccccgtccccggcaccgctattaatggtactctgcccctgagtcatatg

SEQ ID NO: 135250 - DNA, 951 bp, Artificial Sequence
  derived and/or modified sequence
atgtataatatgatggagacggagttgaagccacccggcccccagcaaacgtccggaggtggcggcgggaatagtacagcagccgctgccggcggtaatcagaaaaattctcctgacagagttaagagaccaatgaatgccttcatggtgtggtctcgaggccagcgccgcaagatggcccaggaaaaccccaaaatgcacaatagcgaaatcagtaagcgtttaggggccgaatggaagcttctgagcgaaaccgaaaagcgcccatttattgacgaggccaaacgcttgcgcgctctacacatgaaggagcatcccgactacaaatacaggccaaggcgcaagaccaaaactctgatgaagaaagacaagtataccttaccaggaggcttgctggcgccaggcgggaattccatggccagcggcgtgggagtgggagctggattgggcgcgggtgttaaccagcgaatggactcttacgcacatatgaacgggtggtctaatgggagttactctatgatgcaggatcaactggggtaccctcagcaccctggactgaacgctcacggagccgctcagatgcagcccatgcacaggtacgatgtcagtgctctgcagtacaattctatgacttctagccagacatacatgaacggctctcccacctattcaatgtcctactcccagcagggcactcccgggatggccctcggctccatgggctctgtggtgaaaagtgaggcctcctcaagccctccagtggtgacatctagttcacacagcagagcaccctgccaggccggcgacctgagggacatgatcagtatgtatctgccaggcgctgaagtgcctgagcctgccgccccgtcacgactccacatgagtcaacattaccagtccggccccgttcccgggactgctatcaatggcaccctgcctttaagccacatg

SEQ ID NO: 135251 - DNA, 951 bp, Artificial Sequence
  derived and/or modified sequence
atgtacaatatgatggaaaccgaactgaagccccctggaccccagcaaacttcggggggcggagggggtaacagcaccgcagcagcagcaggcggaaatcagaaaaactctccggatcgggtcaagcggccgatgaacgcatttatggtgtggtcgagaggacagcgcagaaaaatggcacaagaaaatcctaagatgcataactccgaaatctcaaagcgtttgggagctgaatggaagctgctgtccgagactgaaaaaagacctttcatagacgaggccaagcgtctgcgggccctgcatatgaaggaacacccagactacaaataccgaccaaggcgcaaaactaagacgctgatgaagaaggataagtatacccttcccggaggacttcttgcaccaggaggcaatagcatggcatccggtgtgggtgtgggtgccgggttgggcgccggggtcaaccaacgaatggactcgtatgcacatatgaacggatggtccaacggatcgtactcgatgatgcaagaccaactgggatacccgcaacatccaggactcaacgcccacggagcagcacagatgcagccaatgcataggtacgatgtttcggcacttcaatacaactcaatgacttcgagccaaacttacatgaacggaagccctacctactccatgtcgtactctcagcagggtacccctgggatggccctcggaagcatgggctccgtggtcaaatcggaggcaagctcgtctccccctgtggtcacctcctcctcccactcgagagctccttgtcaggctggagatcttagggacatgatttctatgtacctcccgggtgcagaagtgcctgaaccagccgcaccatcccgacttcatatgagccagcattaccaaagcggaccagtgcctggcacggcgataaacggaacccttcccctgtcccacatg

SEQ ID NO: 135252 - DNA, 951 bp, Artificial Sequence
  derived and/or modified sequence
atgtacaatatgatggagactgagcttaagcctcctggtccacaacaaaccagcggaggtggtggaggtaattcgactgcagcggcagcaggaggaaaccaaaagaactcaccggatcgcgtgaagcgtccgatgaacgccttcatggtgtggtccaggggacagcggagaaagatggcccaagaaaatcccaagatgcataactcggagatttcaaagcgccttggtgcagaatggaagctcctttcggaaaccgaaaagcgcccattcatcgatgaggcaaagcgattgagagctctgcatatgaaagaacatccagactataagtacagacctagacgcaagactaagactcttatgaaaaaggacaaatacacccttcctggaggacttctggcccccggaggaaactcgatggcctcaggagtgggagtcggagcaggacttggtgccggtgtgaaccagagaatggattcatacgcccatatgaacggatggtcgaacggtagctactcgatgatgcaagatcaactcggctacccacaacacccaggtctgaacgcccacggcgctgcacaaatgcagccgatgcatagatacgatgtgtccgctctgcagtacaactccatgacttccagccaaacttatatgaatggttcgccaacttacagcatgtcctactcccagcagggtactcccggaatggcacttgggtcgatgggtagcgtcgtgaaatctgaggcatcatcctcgcccccagtggtgacctcctcctcacattcgagagctccatgtcaagcaggcgatcttagggacatgatttcgatgtacctgccaggagcagaggtgcctgaaccggccgccccatcgcgtctgcacatgagccaacattaccagtccggacctgtgcctgggaccgcgataaacggtactctgcccctgtcacatatg

SEQ ID NO: 135253 - DNA, 951 bp, Artificial Sequence
  derived and/or modified sequence
atgtacaatatgatggaaaccgaacttaaacctcccggcccacaacagactagcgggggcggcggcggaaattcaactgcagcagcagccggtggaaaccaaaagaactccccagatcgtgtgaaaagacccatgaacgcttttatggtttggtcaaggggacagcgaagaaagatggcccaagagaacccgaagatgcataacagcgagatttccaagcgacttggtgcagaatggaagctgctgtccgaaactgaaaaaagaccgtttatagacgaagcaaaacgtctgcgcgcattgcatatgaaggagcacccggattacaaatacaggcctcggagaaagaccaaaactctgatgaaaaaggataagtacactctccctggaggactcctggctcctggcggaaactcgatggcatcgggggtgggcgtgggagcgggactcggtgccggagtgaaccaacgaatggattcctacgcccatatgaacggctggagcaatggaagctactccatgatgcaggaccaactgggttaccctcagcatcctggacttaatgcacatggagcagcacagatgcaacccatgcacaggtacgacgtgtccgccctgcaatacaacagcatgactagcagccaaacctacatgaacggttccccgacgtactccatgtcatactcgcagcagggaactccgggtatggccctgggatctatgggtagcgtggttaagtcggaagcgtcgtcctccccacctgtggtcacctcttcgtcacactcaagagcaccatgccaggcaggagatctcagggacatgatttcgatgtatctccctggagcagaggtgccagaaccagcagcaccctccaggcttcacatgtcgcaacactaccagtcggggccagtgcctggcactgcaataaacggaacgctgccactgagccatatg

SEQ ID NO: 135254 - DNA, 951 bp, Artificial Sequence
  derived and/or modified sequence
atgtataacatgatggaaaccgagctcaagcctccaggacctcagcagacaagcggaggcgggggaggaaacagtaccgctgccgctgcaggcggaaaccagaagaatagtccagatagagtcaagcggcctatgaacgcctttatggtatggtcacgcggccaaagacgtaaaatggcacaggaaaacccaaagatgcacaatagtgagatatccaaacggctcggggccgagtggaagctgctctcagagactgagaagaggcctttcatcgatgaagcaaagcggctgcgtgcactgcatatgaaggaacatccagactataaataccgccctagacgaaaaaccaaaacactgatgaagaaggacaaatatactctgccaggtggcctcctcgcacctggcgggaacagcatggcaagcggggtaggagttggcgccgggctgggtgcgggagtcaatcagagaatggacagctacgctcatatgaacggatggtctaatgggtcctatagcatgatgcaggatcagctcggatatcctcaacatcctgggctgaacgctcacggtgccgcacagatgcaacctatgcacagatatgatgtatcagccctgcaatacaactctatgacatcttctcaaacttatatgaatggaagcccaacttattcaatgtcctatagtcagcagggcactcctggcatggcactgggtagtatgggctcagttgtgaaaagcgaggcatcttcaagcccgccagtggtgactagctcatcccactcaagggcaccatgccaggccggggatttaagagatatgatctctatgtacctaccaggcgctgaggtgcccgagcctgcagccccttcccgattacacatgtctcagcattaccagtccgggccagtgcctggtacagccattaacggcacccttcccctcagccatatg

SEQ ID NO: 135255 - DNA, 951 bp, Artificial Sequence
  derived and/or modified sequence
atgtacaacatgatggaaacagagctgaagcctcctggaccacagcaaacctctggcggcgggggcggcaacagcacagcggccgctgccggcggaaaccaaaaaaattctcctgatcgggtaaaaaggccaatgaacgccttcatggtgtggtcacgaggacagagaagaaagatggctcaggaaaatcccaaaatgcacaacagcgaaatcagcaagcgtctgggcgctgaatggaagctgctgagcgagaccgagaagcgaccttttatcgacgaagcaaagaggcttcgggccttacacatgaaggaacaccccgattataagtacagaccaagacggaaaaccaaaacacttatgaagaaggataaatacacactgccaggcggcctgctcgcccccggcggcaacagcatggcttcaggggtgggagtgggtgccggcctgggggctggagtcaatcaaaggatggattcttacgctcacatgaatggatggagcaatggaagttatagtatgatgcaagaccaactcggatacccacagcatccaggcctgaatgcgcatggagccgcacagatgcagcctatgcataggtacgatgttagcgctctgcagtacaactccatgacatcctctcagacctatatgaacggaagcccaacttactcgatgagttacagtcagcaaggaactccaggcatggctctcggtagtatgggaagcgttgtgaagtcagaagctagttcaagtccacccgtcgtcacaagctcaagccatagccgcgcaccttgccaagcgggcgatctgcgcgacatgatcagtatgtaccttccaggggctgaagtgcctgagcccgctgccccttcccgattgcacatgtctcaacattaccaatcaggacccgtgccgggaaccgctatcaatggtactctcccactgagtcacatg

SEQ ID NO: 135256 - DNA, 951 bp, Artificial Sequence
  derived and/or modified sequence
atgtacaacatgatggaaactgaactgaagcctcctggaccccagcagacctcgggcggagggggtggaaactcgacggcggcagctgctggcggtaaccaaaagaactccccggaccgggtgaaacgaccaatgaatgcctttatggtgtggtcaagaggacagcgccggaagatggcgcaggagaaccccaagatgcacaactcggaaatctccaagcggttgggtgcagagtggaagctgctctccgaaaccgaaaaaaggcctttcatcgacgaggcgaaacgcctgcgggccctgcacatgaaggaacatccggattacaagtaccgcccacggcgtaagacgaaaaccttgatgaagaaggataagtacaccctgcctggaggactgctggctccgggaggcaactctatggcctccggcgtgggagtcggtgcaggcctcggcgccggagtcaatcaacggatggattcgtacgcccacatgaacggctggagcaatgggtcgtactccatgatgcaggaccagctcggatatccacagcacccaggcctgaacgcacatggcgcggcacagatgcagcctatgcatcggtatgacgtgagcgctcttcaatacaattcaatgacctcttcgcaaacctacatgaatggatcgccaacctactcgatgagctactcgcagcaagggactccgggaatggcactgggttccatgggctccgtggtcaagtccgaagcctcgagctcccctccagtggtgacctcgtcatcacatagcagagcaccatgccaagcgggtgatcttcgcgacatgattagcatgtacctgcccggagcagaggtgccagagccagctgccccatcgaggctgcatatgtcccaacattaccagtccggcccagtcccgggaaccgccatcaacggtactctgcccctgtcccatatg

SEQ ID NO: 135257 - DNA, 951 bp, Artificial Sequence
  derived and/or modified sequence
atgtataacatgatggagaccgagctcaagccaccaggaccgcagcaaaccagcgggggtgggggaggcaacagcactgccgccgcagccggcgggaatcagaagaatagtcctgatagggtgaagcgcccaatgaatgccttcatggtctggtcccgcgggcagcgacgaaaaatggcgcaggaaaatcctaagatgcacaatagcgaaataagcaagagattaggggccgagtggaagctcctttccgagactgagaagagaccattcattgatgaggccaagagactgcgggccctccacatgaaagagcatccggactataaatatagaccccgtcgcaagactaaaaccctaatgaagaaagacaaatatactctccccgggggtctgctggccccgggcggtaattcaatggccagcggggtgggtgtcggcgctgggttgggagccggtgtgaaccaaaggatggacagctatgcccatatgaacggatggagtaacggctcttactcaatgatgcaagatcagttgggatacccccagcacccagggcttaatgcgcacggggcggcccagatgcagccgatgcatagatatgatgtttcagccttgcaatacaactccatgactagcagtcagacttacatgaacggatcaccaacctatagcatgtcttattcacagcagggcacccccggaatggcattggggagcatggggtcggtggttaagtcggaggcatctagttctcccccagttgttacatccagctcccatagccgtgccccttgtcaggccggcgatctgcgagatatgattagcatgtacctgcctggcgccgaagtcccggaaccagctgctcccagccgtctccacatgagccagcactatcaaagtggcccagtgccggggactgccattaatgggaccctgccattgagccatatg

SEQ ID NO: 135258 - DNA, 951 bp, Artificial Sequence
  derived and/or modified sequence
atgtacaacatgatggagaccgagcttaaaccccctgggccccaacagacttccggtggtggcggcggaaattcgacagctgcagccgccggaggtaaccagaagaacagcccagaccgcgtaaagagacctatgaatgccttcatggtgtggagtcgaggacagagacgcaagatggcccaggaaaaccccaagatgcataacagcgagatttcaaagcgacttggcgcggaatggaagttgctgtcggagacagagaagcgcccatttattgacgaggcaaaaagactgcgggccctgcacatgaaagagcacccggactacaagtacagacccaggagaaaaacaaaaactctgatgaagaaggacaaatacacactacctggcgggctcctcgcccccggggggaatagtatggcctctggtgtgggtgtcggagccgggctcggcgcgggagtgaatcaaaggatggattcttacgcacacatgaatgggtggtcaaacggctcatactcgatgatgcaggaccagctcggttatccgcaacaccccgggctgaacgctcacggcgccgcgcagatgcagccaatgcatcggtacgacgtttccgctctgcaatacaacagcatgacctcaagtcagacatacatgaatggtagtcctacctactcaatgagttatagccagcagggcacgcccggaatggctctcggatccatgggctccgtggtgaagtccgaagccagctctagtccccctgttgtgacaagcagttcgcattcccgggccccttgtcaggctggagacctgagagacatgatcagtatgtacctgcccggcgctgaagttccggaacctgctgccccctcgcggcttcatatgtctcagcactaccagtcagggcctgttcccggcactgctatcaatggtactcttcccttgagtcacatg

SEQ ID NO: 135259 - DNA, 951 bp, Artificial Sequence
  derived and/or modified sequence
atgtacaacatgatggaaactgagctgaaaccaccagggccccaacaaactagcgggggtggcggtgggaatagcactgcagcagccgcaggtggcaaccaaaagaattcgccagatagggtgaagaggccaatgaacgcatttatggtgtggtcgcggggacaacggcgcaagatggcacaggaaaacccgaagatgcataacagcgaaatcagcaagaggcttggtgcggaatggaagctcctttccgaaaccgagaagcgaccattcattgacgaagctaagcgcctgcgagcactccatatgaaggagcatcctgattacaagtatcgcccccgtagaaagaccaagaccctgatgaaaaaagacaagtacaccttgcccggtggcctccttgccccaggtgggaattcgatggcatccggcgtcggcgttggcgcgggtcttggagcgggagttaaccaaagaatggactcctacgcacatatgaatggatggtctaatggaagctactctatgatgcaggatcaattgggatacccacagcaccctggcctcaatgcacatggagcagcacaaatgcaacctatgcatcgctatgacgtgtcggccctccagtacaacagcatgacttcctctcagacctacatgaatggaagccccacgtacagtatgagctacagccagcagggaacccctggtatggcactgggatccatgggatccgtggtgaaatcggaggcatcttcgtcccctccagtggtgaccagctcctcgcactcacgtgcaccctgccaagccggagatttgagagacatgatctcgatgtatctcccaggcgcagaagttcctgaacctgcagcgccgtccagacttcacatgtcgcaacactaccaatccgggcccgtccctggtaccgctattaacggtacccttcccctctcgcatatg

SEQ ID NO: 135260 - DNA, 951 bp, Artificial Sequence
  derived and/or modified sequence
atgtataacatgatggaaactgaactgaaacctcccgggcctcagcagacttctggagggggaggggggaactccacggccgctgctgctggagggaatcagaaaaactcccccgatagggtgaaacggcctatgaacgccttcatggtgtggtccaggggacagagaagaaaaatggcccaggaaaaccccaaaatgcataactcagaaatctccaaaagactgggagccgaatggaaactgctctcagaaacagaaaaaaggccattcatagatgaagctaaacgactcagagctctacatatgaaagagcatcctgattataagtaccgccctaggaggaagactaaaacattgatgaaaaaagataaatacactctgcccgggggacttctcgctcccggaggaaactctatggcctcaggagttggggtgggggccggactcggagccggggtcaaccagaggatggattcatatgctcatatgaatgggtggagtaacgggtcttactccatgatgcaggaccagctcgggtatcctcagcatccaggacttaacgcacacggagctgctcagatgcagccaatgcataggtatgatgtgtcagctctacagtacaattctatgacaagttctcagacatatatgaatggaagtcctacatattctatgtcatattcccagcaggggactcccgggatggctctcgggtcaatgggatcagtcgttaagtctgaagccagtagttctccacctgtcgtcacatcttcttcccactcaagagcaccttgccaggcaggagacctgagggatatgatctccatgtatttgcctggagccgaagttcccgaacccgctgccccttccaggctgcatatgtctcagcattatcagtctgggccagtgcccgggacagcgattaacgggactctcccactgtctcacatg

SEQ ID NO: 135261 - DNA, 951 bp, Artificial Sequence
  derived and/or modified sequence
atgtacaatatgatggaaactgaacttaagcctcctggcccgcaacagacaagtggaggaggcggcgggaactctaccgccgcagcggcagggggcaaccagaaaaactctccagatcgcgtgaaaaggccaatgaatgcgtttatggtctggtcgaggggccagcgacgaaaaatggcccaagagaatcctaaaatgcacaactcagaaatttctaagcggttaggagccgaatggaagctgttgagcgaaaccgagaaaagaccatttatcgacgaagccaagcgccttcgtgcgttgcatatgaaggagcatccggattacaaataccggcctcgcaggaaaaccaaaactctcatgaagaaagacaagtataccttgccagggggattgttggcgccgggaggaaatagtatggcttccggggttggcgtgggtgctggccttggtgccggtgtgaatcagcggatggacagctacgcccacatgaacggatggtcgaatgggtcctactctatgatgcaggaccagcttggctacccacagcacccaggcctgaacgcccacggcgccgctcaaatgcagcctatgcacaggtacgatgtgtcggctctgcagtacaactccatgacctcgtctcagacctacatgaatgggtcccccacctactccatgagctatagccagcaggggactccagggatggccttaggatctatgggttccgtggtgaagagtgaggcttcatcaagcccaccagtggtcacctcctcatctcattctcgggctccctgccaggcaggcgacctaagggacatgatcagtatgtatctacctggagctgaggttcctgaaccagcagccccaagccgcctgcacatgagtcagcactatcaaagcggcccagtgcccggcaccgccattaatgggaccttgccgctgtctcacatg

SEQ ID NO: 135262 - DNA, 951 bp, Artificial Sequence
  derived and/or modified sequence
atgtacaatatgatggagacggagctgaaacctccaggtccgcaacaaacctctggtggtggagggggtaattcaacagctgccgccgcaggcgggaatcaaaaaaactccccggatagggtgaaacgtccaatgaatgcattcatggtatggtcgagaggacaacgtcggaaaatggctcaagaaaacccgaaaatgcacaattcggagatctcaaaacgactgggagctgagtggaaacttcttagcgaaactgagaagcgaccattcatcgatgaggcaaaacgacttcgcgcattgcatatgaaagaacacccggattataagtatcgtccgcgtcgaaaaactaagactcttatgaagaaagataaatacactcttccgggaggattgcttgccccaggaggtaattcgatggcttctggtgtgggagttggggcaggattaggagcaggagtcaatcaacgaatggatagttacgctcatatgaatggatggtctaatggaagttatagtatgatgcaagatcagctaggatatcctcagcatccaggattgaatgcccatggagctgcgcagatgcaacccatgcacaggtatgatgtttcagctctacaatacaactctatgacgagttctcaaacttacatgaacggatcaccaacttactctatgagctattcacaacagggaacacctggaatggccctgggaagtatgggatcagtggttaaatctgaagctagttcatctcctcccgtagtaacttcatcgtctcactctcgcgcgccttgtcaagcaggagatttgcgggacatgatctcaatgtatctgccgggtgctgaagtccctgaacccgctgctccaagtcgactccacatgtctcagcattatcagtctggaccagtgcctggcacagctataaatggcacattgcctctgtcccacatg

SEQ ID NO: 135263 - DNA, 951 bp, Artificial Sequence
  derived and/or modified sequence
atgtacaatatgatggagacggagcttaagccacctggaccacagcaaacctccgggggtggtggtggtaatagcaccgcagcagcggccggtggtaatcaaaagaactcacccgatcgagtgaagaggcctatgaacgcatttatggtgtggtcaagaggacaaagacgcaaaatggctcaggagaatcctaagatgcacaactcagagatttccaaacgacttggtgctgaatggaagctgctttccgagactgaaaagcgccccttcattgatgaagcgaagaggctgagagcactccacatgaaggagcatccagactacaagtaccgacccagacgcaagaccaaaactctcatgaagaaagataagtacaccctgccaggtggacttttggcccctggcggcaacagtatggcatcgggtgtgggagtgggggcaggtcttggagctggagtgaatcagcgcatggattcatatgcacatatgaacggttggtcgaacggatcctactcgatgatgcaagatcaactggggtacccacaacacccaggactgaatgcacacggggcagcgcaaatgcagccaatgcaccgctacgacgtgtccgccctgcaatacaactctatgacctcatcccagacgtatatgaacggctcgccgacttactcaatgtcctactcacaacaaggtactccaggaatggcactcggatcgatggggtcagtcgttaaaagcgaggcatcctcgtcacctccagtcgtcacgtcgtcatcgcactcgagggcgccctgtcaggcgggcgatctgcgagacatgattagcatgtaccttcctggcgcagaggtgccggaacccgccgcaccatcgcggcttcacatgtcacaacattatcagtccggacctgttcctggtactgcaatcaatggaactttgcctctgtcgcatatg

SEQ ID NO: 135264 - DNA, 951 bp, Artificial Sequence
  derived and/or modified sequence
atgtacaacatgatggaaaccgagctgaaacctcccgggccccagcaaacttctggtggcggcggcggcaacagcacagctgcggccgcaggtggcaatcaaaagaactcacccgacagagtcaagagacccatgaacgctttcatggtgtggagccggggtcagaggcggaaaatggctcaggagaacccaaaaatgcataacagcgagatttctaagagattgggagcagagtggaagttactctcagagaccgaaaagcgcccatttatcgacgaggctaagcgtctccgggccctccatatgaaggaacaccctgactataagtataggcctcgacgcaagacgaaaaccctcatgaagaaagataagtacactctgccaggaggtctactagctcccggtgggaactcaatggcaagcggggtgggcgtgggggcagggcttggggcgggagttaaccagagaatggattcgtatgctcacatgaacggctggtctaacggaagctactcaatgatgcaggatcagctggggtacccacagcaccctggattaaacgcccacggggccgcccagatgcaacccatgcacagatacgacgtttctgcactgcagtataacagtatgacatcctcccagacttatatgaatggctcgcccacatattcgatgtcttactcccagcagggcacaccgggtatggccctaggttctatggggagcgtagtaaagtcagaggcatcatcctcacccccagtcgtgacaagttcttctcacagccgtgctccatgtcaggcaggcgacctcagagacatgatttcaatgtatttacctggcgccgaggttccagagcccgccgctccatcccggcttcacatgagccaacattaccagagcggaccggtgcctgggaccgctatcaatggcactctgcctctgtcacatatg

SEQ ID NO: 135265 - DNA, 951 bp, Artificial Sequence
  derived and/or modified sequence
atgtataacatgatggagacggaattgaaacccccgggaccgcaacaaacgtcgggcggagggggcgggaattccacggccgcggctgcgggaggaaaccagaagaatagcccagaccgcgtgaagaggccaatgaacgccttcatggtctggtcgcgcgggcaacggcgcaagatggcccaagaaaatccgaagatgcacaactctgagatcagcaagcggctgggagcagaatggaagctcctctcggaaactgagaagcgaccctttatcgacgaggcgaagagactgcgcgcgctgcacatgaaggaacatcccgactacaaataccggccccgccgcaagactaagactctgatgaagaaagacaagtatactctcccgggtggactgcttgctccggggggcaattcgatggccagcggcgtaggagtcggagccggtctgggagccggagtcaatcagcgcatggactcatacgcgcatatgaacggatggagcaacggttcctactccatgatgcaagaccagttgggataccctcagcacccagggctgaatgctcatggggccgcccaaatgcagccgatgcacagatacgacgtttcagcactgcagtacaactcgatgacttcgagccagacttacatgaacggatcgccgacctactctatgtcgtactcacagcagggtacccctggcatggcccttggtagcatgggatcagtggtgaaatcggaggcctccagctcgccgccggtggtgacctcctcctcccactcccgtgctccctgccaagccggtgatctccgcgacatgatatcaatgtaccttccgggagcagaagtgccagagccggccgcgccatccaggctgcatatgagccagcattaccaatccggcccagtgccgggcactgcgatcaacgggaccctcccgctgtcgcacatg

SEQ ID NO: 135266 - DNA, 951 bp, Artificial Sequence
  derived and/or modified sequence
atgtataacatgatggagaccgaactcaaaccaccggggccacaacaaacttccggcgggggcgggggtaactctactgctgctgccgccggaggcaaccagaaaaattcgccagaccgcgtgaagcggccaatgaatgcattcatggtgtggtccaggggtcaaaggaggaagatggctcaggagaatcccaagatgcacaattccgagatatcaaaacgtcttggtgctgagtggaaactcctgtcagaaacagaaaagaggcccttcattgatgaggctaaacgtctgcgtgcattgcatatgaaggaacatcccgactataagtatcggccaaggcggaaaaccaaaactttgatgaagaaggataagtacacgttaccaggtggactgttagctcccgggggaaactcgatggcatctggggttggagtaggcgctggactaggtgctggggtcaatcagagaatggactcttacgcccacatgaacggttggagtaacggatcttattctatgatgcaagatcagttgggttacccacaacatccaggtttaaatgcgcatggggcggcccagatgcaacctatgcatcgatacgatgtttcagctttgcaatacaattcaatgacatcatcgcaaacctacatgaacggatctcctacctattcaatgtcgtattcacagcagggtacacctggaatggctttgggatccatgggttctgtcgttaagtccgaagcttcttcgtcccctcccgtcgtgacatcttccagccattcccgggcaccctgtcaagctggtgacctcagggacatgatctctatgtatcttcctggcgctgaagttcctgagcctgctgccccttccagacttcatatgagtcaacactaccagtctggtcctgtcccagggactgccataaatgggactctcccactttcgcatatg

SEQ ID NO: 135267 - DNA, 951 bp, Artificial Sequence
  derived and/or modified sequence
atgtacaacatgatggagactgagctgaagccccctggtccccagcaaacttcgggcggcggcggcgggaacagtacggctgcagctgccgggggaaaccaaaagaacagtcctgatcgtgtgaaacgacccatgaatgcctttatggtgtggtcccggggacagcggcgcaagatggcccaggagaatcctaaaatgcacaactctgaaatttccaagaggctgggagccgagtggaaacttctgtcagaaacagagaagagaccgtttatcgacgaggctaagagattacgagctctgcacatgaaagaacaccctgattataagtaccgtcctagaagaaagaccaagactctgatgaaaaaggacaaatacactctgcctggtggtctgctggcaccaggcgggaactccatggcctcgggtgtaggtgtgggcgcagggctgggcgcgggcgttaaccaaagaatggacagctacgcccacatgaacggctggagcaatggtagctacagtatgatgcaggatcagctagggtatccccagcaccctgggctgaacgctcacggtgcggcccagatgcagcctatgcacaggtacgacgtgtccgcactccagtataattcaatgacttcctctcaaacctacatgaatggcagccccacatatagtatgagctatagtcagcagggtaccccgggaatggccctgggcagcatggggtcagtagtcaagtcagaggcttccagctctcctcctgtagtaacctccagcagccacagtcgggccccctgccaggctggcgaccttcgtgatatgatttctatgtatctgcccggggcagaggtgcccgaaccagccgccccgagcaggttgcacatgagccaacactaccagtccggccccgtgcctggaaccgccataaatggtacattgcccctgagtcacatg

SEQ ID NO: 135268 - DNA, 951 bp, Artificial Sequence
  derived and/or modified sequence
atgtacaacatgatggaaaccgaactgaagcccccaggaccgcagcagaccagcgggggcgggggcgggaacagcactgctgccgcagcaggaggcaaccagaagaattcccctgaccgagttaaacgacctatgaacgcattcatggtctggagcagaggccagagaagaaagatggctcaagaaaatcccaagatgcacaacagcgaaatttctaagagactgggagcagaatggaaacttctctctgaaacagagaaacgaccattcatcgacgaggctaagcgcctgcgggccctgcatatgaaagaacatcctgattacaagtacaggcctcgccggaaaaccaaaacattgatgaaaaaggacaaatatacattgccaggaggtctgcttgcgcccggtggcaacagcatggcttccggcgtaggagtgggggccggactcggggcaggagtcaatcaacggatggactcttatgcccacatgaatggttggtccaacggctcctactccatgatgcaggatcagttgggctatcctcagcaccctggtctcaatgctcatggcgccgcacagatgcaacccatgcaccgctacgatgtgtccgcacttcaatacaactccatgacgtcctcacagacttacatgaatggaagccctacttactctatgtcctacagccaacagggaacaccaggtatggcgctggggtctatggggtccgtcgtgaagtcagaggccagttcttccccccctgttgttacctcctcctcccacagccgcgctccttgccaagcaggcgatctgcgcgacatgatctcaatgtatctgccaggagctgaggtgccggagccagccgccccatccaggttgcacatgagccagcattatcagagtggccctgtaccaggcacagcaatcaacgggacactgcctttgtcacatatg

SEQ ID NO: 135269 - DNA, 951 bp, Artificial Sequence
  derived and/or modified sequence
atgtacaatatgatggagactgagctgaaacctccgggaccacagcagacctcaggcggcggcggaggaaactccaccgcagcggctgccggtggaaaccagaagaactcgcccgaccgcgtgaaacgcccaatgaacgcattcatggtgtggtcgcgcgggcagcggcgcaagatggcacaagaaaatccaaagatgcataactcggaaatctcgaaaaggttgggcgctgagtggaaactgctgtcggaaacggaaaaaagaccgtttatcgacgaggctaagcggctgagagcgctgcatatgaaggagcatccagactacaagtaccggccaagacggaaaaccaagactctgatgaagaaggacaagtacaccctgccgggcggactgctggcccctggcggcaactccatggccagcggagtgggggtgggggcgggactgggcgctggcgtgaaccaacgcatggattcctatgcacatatgaatggatggtccaatggatcatactcgatgatgcaagaccagctcggctaccctcagcatccaggactcaacgcacacggagcagcccagatgcaacctatgcaccgctacgacgtgtcagcgttgcaatacaacagcatgacttcctcacagacctacatgaatggatccccgacctacagcatgtcgtactcccagcagggcactcctggaatggctttgggatcaatgggatcagtggtcaagtcggaggcatccagctccccacctgtggttaccagctcgtcccattcgcgggcgccgtgccaggcaggtgaccttcgcgatatgatctcaatgtacctgcctggcgctgaagtgccagaaccggccgccccctcccgcctgcatatgagccagcactaccagtcaggacctgtccccgggactgctatcaatggaacgctgccgttgtcgcacatg

SEQ ID NO: 135270 - DNA, 951 bp, Artificial Sequence
  derived and/or modified sequence
atgtacaacatgatggaaaccgaactcaagccaccgggaccgcagcagaccagcggaggcggcgggggaaactccacggctgctgccgccggaggaaaccagaaaaactcgccggaccgggtcaagcggccaatgaacgcatttatggtgtggtcgcgggggcaaagaaggaagatggcccaggaaaatcccaagatgcacaattcagaaatcagcaaacgcctgggcgccgagtggaagctgctgtccgaaactgagaagcgcccgttcattgatgaagcgaagcgcttgcgcgccttgcacatgaaagagcatccggattacaaataccggccgagacgcaaaaccaagactctgatgaagaaggacaagtacaccctccctgggggactgctggcaccaggtggaaacagtatggcaagcggagtgggtgtgggagcgggccttggtgccggggtgaaccagagaatggactcttacgcccacatgaatggatggagcaatggatcgtactcaatgatgcaggaccaactcggctaccctcaacacccaggcctgaatgctcatggagctgcgcagatgcaaccgatgcatagatacgatgtctccgccctgcagtacaattcgatgacctcgagccaaacctatatgaacggatcaccgacttatagcatgtcctactcgcaacagggaactccgggtatggcgctcggatcaatgggctccgttgtgaagtccgaggcctcctcgtcgcctcccgtggtgacctcctcaagccattcgcgagcaccatgccaggcgggcgacctccgggatatgatcagcatgtacctgcccggagctgaggtcccagaaccggcagccccttccaggcttcacatgtcccagcactaccaatcagggcctgtcccaggcacggcgatcaacggaactctcccgctgtcgcacatg

SEQ ID NO: 135271 - DNA, 951 bp, Artificial Sequence
  derived and/or modified sequence
atgtacaatatgatggagactgagctcaagccgcccggaccacaacagacctctgggggagggggcggaaacagcaccgctgccgctgcaggggggaaccagaaaaatagtcccgatagagtaaagcgtccgatgaacgcctttatggtgtggtccagagggcagagacggaagatggctcaagagaatcctaaaatgcacaacagcgagatcagcaagcggctgggcgcagagtggaagctcctgtctgagacagagaagaggccattcatcgacgaagccaaaagattgcgcgccttacatatgaaggagcatccagactataaataccgcccacgccgcaaaaccaagaccctgatgaagaaagataagtataccctccctgggggactgctggcacccggagggaactccatggctagtggcgttggtgtgggagcaggactgggagccggagtcaaccagagaatggattcatacgcacatatgaacggttggagcaatggcagttattctatgatgcaggaccagctcggatatccacagcatccagggctgaacgcccatggagctgcacagatgcaaccgatgcatcgatacgatgtaagtgcgttgcagtacaacagtatgacatcatcccagacatatatgaatggctctcccacttacagtatgagctactcccaacaggggacacccggaatggcactcggctcgatggggtccgtcgtgaaatcagaagcatcatccagtcccccggtagtaacctcatcaagccattcacgagccccctgccaagccggagacctacgtgacatgatttcgatgtatctgcccggtgctgaggtccctgagccagctgccccctcccggctgcacatgagccagcactaccagagtggccctgttccaggtaccgcgattaatggtactctgcccttgtcccacatg

SEQ ID NO: 135272 - DNA, 951 bp, Artificial Sequence
  derived and/or modified sequence
atgtacaacatgatggaaaccgagctgaagccccccggcccgcagcagacttcgggtggcggcggtggcaattctaccgccgccgccgccggcggcaaccagaaaaattcgcccgaccgcgtaaagcgccccatgaacgcgttcatggtttggtcacggggtcagcgtcgcaagatggcgcaggagaaccccaagatgcacaactccgagatctctaagagactgggtgccgagtggaagctgctgagtgaaaccgaaaagcgccccttcatcgatgaggcaaaacgtctccgcgcgttgcatatgaaggagcaccctgattacaagtaccggccccgccggaagaccaagacgctcatgaaaaaggacaagtacaccctgcccggcggtctgcttgcccccggtggaaactccatggcttccggtgtcggcgtcggcgctggcctgggtgcgggcgtcaaccagcgtatggactcctacgctcatatgaacgggtggtctaatggcagttattccatgatgcaggaccaactgggctatccccagcaccccggtcttaacgcccacggggcggctcaaatgcagcccatgcatcgctatgacgtcagtgccctgcagtacaactccatgacttcgtcgcaaacatacatgaacggttcgcctacctactccatgtcctacagccaacagggtacccccggtatggccctgggaagcatgggctccgtcgtcaagagtgaagcttcaagttcaccgccagtggttaccagctcgtcccactcgcgggctccatgtcaggctggggatctgcgagacatgatctccatgtatctacctggcgccgaagttcctgaaccggctgcgccgagccgcctccatatgtcgcaacattaccaatccggacccgtcccaggaactgcgattaatggtaccttgccgctctcccacatg

SEQ ID NO: 135273 - DNA, 951 bp, Artificial Sequence
  derived and/or modified sequence
atgtacaatatgatggagacagaactcaaaccgccagggccccaacagacttcaggcggtgggggcgggaactcaaccgctgcagctgcaggcggtaaccaaaagaattcccctgaccgggtgaagcgccctatgaatgcattcatggtgtggagccgcggtcagaggcggaaaatggctcaggagaaccctaagatgcacaattcagagatctcaaagcgtcttggggctgagtggaagctgctgagtgagacagaaaagcggccttttatcgatgaggcaaaaaggttaagggctctgcacatgaaggaacacccggactataagtaccggccccggcggaagaccaaaaccctcatgaagaaggataagtacacattgccagggggcctgcttgctccaggaggcaattctatggcatccggagtaggggtcggggctgggctgggggcgggagttaaccagcgtatggacagctacgctcatatgaacggttggtcaaatggaagttactcaatgatgcaggatcagctcggataccctcagcaccctggactcaatgcccatggagcagctcaaatgcagccaatgcacaggtacgacgtttccgcactgcaatataattctatgactagcagtcagacatacatgaacggtagcccaacgtatagcatgtcttattcccagcagggcactccgggcatggctctcggttccatgggaagcgttgtgaaaagcgaagcctcaagcagcccacccgttgtcacctcttcgtctcactcaagggccccctgtcaggccggagatctcagggacatgatctcaatgtacctgcccggggctgaagtccctgaacccgctgccccatccagattgcacatgagtcaacactaccagtctggccctgtgccgggcaccgctattaacggcaccctgcctctgtcacacatg

SEQ ID NO: 135274 - DNA, 951 bp, Artificial Sequence
  derived and/or modified sequence
atgtacaatatgatggaaaccgaacttaagccacccgggccacagcaaaccagcggtggaggtgggggaaactccaccgctgcagccgcaggcggtaaccagaagaatagccccgatagagtgaaaagacccatgaacgccttcatggtgtggtcgcgcggacaaagacgcaaaatggcccaagaaaatcctaaaatgcataattccgaaatatcgaaacgacttggagcagagtggaagctcctgtcagagactgaaaagcggccgtttattgacgaagcaaagagattgcgcgctctgcatatgaaggagcatcctgactacaagtacagaccacgccggaaaacgaaaaccctgatgaagaaggataagtacacccttccaggcggcctgctcgcaccgggaggtaactcgatggcatcgggcgtgggcgtgggcgccggactcggggcaggtgtgaaccagaggatggattcgtatgcacacatgaacggatggtccaatggaagctactccatgatgcaagatcaactgggctaccctcaacatcctggtcttaacgcacatggcgcggcgcagatgcagccaatgcaccggtacgacgtctcggccttgcaatacaactcgatgacctcgtcccagacttacatgaatggttcgcccacgtactcaatgtcatactcacagcagggcactcctggtatggcacttggttcaatgggatcggtcgtgaaaagcgaagcatcctcatcacctcccgtggtcacctcttcgagccattcgagggcaccttgtcaagcaggagatctgcgggacatgatctcgatgtacctgccaggggcagaagtgcccgaacctgctgccccatcgcggctgcatatgtcgcaacactatcaatcgggcccagtccctggaactgccataaatggaacgctccctctttcgcatatg

SEQ ID NO: 135275 - DNA, 951 bp, Artificial Sequence
  derived and/or modified sequence
atgtacaatatgatggaaaccgaactgaagcctcccggcccccaacagacttccggtgggggaggcggaaactcaactgctgccgcagccggtgggaaccaaaagaactcccctgatagagtgaagaggccaatgaacgcattcatggtctggtcacggggacagagaaggaagatggcacaagagaacccaaagatgcacaattcggaaatctccaagcgcctgggtgccgaatggaaactcctttcagagactgaaaagaggcccttcattgatgaagcaaagcgactgagggcactgcatatgaaggagcatccagactacaagtatagacctaggcgtaagactaaaacgcttatgaaaaaggacaagtacaccctgcctggtggactcctggcacctggcggaaattcaatggcaagcggggtgggggttggcgcaggtctgggcgcaggggtgaaccaacgaatggattcctacgctcacatgaatggatggtccaacggaagctacagcatgatgcaggatcagctgggttatcctcaacatccaggtcttaacgcacatggagcggcccaaatgcaaccaatgcaccgttacgatgtgtcagcgctccaatacaactcaatgactagcagccaaacgtacatgaatgggtcccctacttacagcatgtcgtactcccagcagggtacgccagggatggcactcggatctatgggatctgtcgtgaaatcggaggccagcagctcgcctccagttgtgactagctcctcccattcgagagctccttgtcaagccggtgatctcagagatatgatttcaatgtaccttccaggagcagaagttccggaacctgcagcgccaagcaggcttcacatgagccagcattaccagagcgggccagtcccaggaaccgccatcaacggaaccctccccttgtcgcacatg

SEQ ID NO: 135276 - DNA, 954 bp, Artificial Sequence
  derived and/or modified sequence
atgtacaacatgatggagaccgagctgaagccccccggcccccagcagaccagcggcggcggcggcggcaacagcaccgccgccgccgccggcggcaaccagaagaacagccccgacagagtgaagagacccatgaacgccttcatggtgtggagcagaggccagagaagaaagatggcccaggagaaccccaagatgcacaacagcgagatcagcaagagactgggcgccgagtggaagctgctgagcgagaccgagaagagacccttcatcgacgaggccaagagactgagagccctgcacatgaaggagcaccccgactacaagtacagacccagaagaaagaccaagaccctgatgaagaaggacaagtacaccctgcccggcggcctgctggcccccggcggcaacagcatggccagcggcgtgggcgtgggcgccggcctgggcgccggcgtgaaccagagaatggacagctacgcccacatgaacggctggagcaacggcagctacagcatgatgcaggaccagctgggctacccccagcaccccggcctgaacgcccacggcgccgcccagatgcagcccatgcacagatacgacgtgagcgccctgcagtacaacagcatgaccagcagccagacctacatgaacggcagccccacctacagcatgagctacagccagcagggcacccccggcatggccctgggcagcatgggcagcgtggtgaagagcgaggccagcagcagcccccccgtggtgaccagcagcagccacagcagagccccctgccaggccggcgacctgagagacatgatcagcatgtacctgcccggcgccgaggtgcccgagcccgccgcccccagcagactgcacatgagccagcactaccagagcggccccgtgcccggcaccgccatcaacggcaccctgcccctgagccacatgtag

SEQ ID NO: 135277 - DNA, 954 bp, Artificial Sequence
  derived and/or modified sequence
atgtataatatgatggaaacagagctgaagccacccggacctcagcaaacttccgggggcgggggcggcaattccaccgccgccgctgctggtgggaaccaaaagaattcaccagatcgggttaagcggccaatgaatgcattcatggtgtggtcaagaggacagagaaggaaaatggcgcaagaaaacccaaaaatgcataattctgagatctccaagaggctgggagctgagtggaaactactgagtgaaaccgagaagcgtcctttcattgacgaagccaaaaggctgagagccctgcatatgaaggagcatccggactacaaatatcggcctcgtcggaagaccaagactctgatgaaaaaagataagtatacactgccaggaggtcttctagctccaggaggtaatagcatggcatctggggttggcgtaggagctgggctgggagcgggagtgaatcagcggatggactcatatgcacacatgaacggatggtctaatggcagctactccatgatgcaggaccaactcggttatccacaacatcctggactcaatgcccacggggcagcccagatgcagcccatgcataggtacgacgtgtcagctttacagtataactcaatgacctcctctcagacatatatgaacggatcacccacatattccatgtcctacagccagcagggaacgcctggaatggcactgggatctatgggctctgtggtgaagtcagaagcctcctcatccccaccagtggtcaccagttcaagtcatagcagagcgccctgtcaggcgggggatctccgggatatgatcagcatgtacttgccaggcgctgaggtgccagaaccagctgcaccgtctcgactgcacatgagccagcattaccaaagtggtcccgtgcccggcacggccatcaatggtactttgccactgtcacatatgtag

SEQ ID NO: 135278 - DNA, 954 bp, Artificial Sequence
  derived and/or modified sequence
atgtacaacatgatggaaacagagcttaagccaccagggccccagcagacctccggagggggaggagggaatagtaccgccgccgcagcaggcgggaaccaaaagaactctcccgatagggtgaagagaccaatgaatgcatttatggtatggagtagggggcagaggcgaaagatggcccaagaaaatcccaagatgcataattcagagatcagtaagaggctgggagcagaatggaagctgctgagcgagaccgagaagagacctttcattgacgaagctaagagactgagggcgcttcatatgaaagagcacccggattataagtaccggccaaggcggaaaaccaagactttgatgaaaaaggacaagtataccctccctgggggactgctagcgcctggaggaaatagcatggccagtggggttggagtcggggctggcttgggggcaggagtgaatcagcgcatggactcctacgcccacatgaacggatggtcaaatggctcatacagcatgatgcaggatcagctcggatatcctcagcatcccgggctaaatgcccatggcgctgctcagatgcagccgatgcaccggtatgatgtttccgctctacagtataacagtatgaccagctctcagacctacatgaacggaagtcctacgtacagtatgtcttactcccagcagggtacgcccgggatggccctgggctcaatgggaagcgtggtgaaaagcgaggcatcctctagcccaccggtggtaacatctagctcacacagtagagccccgtgtcaggccggggacctgagggatatgatttctatgtatctgccgggagcagaagtgcctgaaccagcagccccatcgcggctccacatgtcccagcactatcaatcagggcccgtgcctgggaccgccattaatggcaccctgccactgtcccatatgtag

SEQ ID NO: 135279 - DNA, 954 bp, Artificial Sequence
  derived and/or modified sequence
atgtacaacatgatggagacagagctgaagcccccaggcccccagcagaccagcggcggcggcggcggcaacagcacagctgctgctgctgggggcaaccagaagaacagcccagacagagtgaagaggcccatgaatgccttcatggtgtggagccggggccagaggaggaagatggcccaggagaaccccaagatgcacaacagcgagatcagcaagaggctgggcgctgagtggaagctgctgtctgaaacagagaagaggcccttcattgatgaggccaagaggctgcgggccctgcacatgaaggagcacccagactacaagtaccggcccaggaggaagaccaagaccctgatgaagaaggacaagtacaccctgcccggcggcctgctggcccctgggggcaacagcatggccagcggcgtgggcgtgggcgccggcctgggcgccggcgtgaaccagaggatggacagctatgcccacatgaatggctggagcaatggcagctacagcatgatgcaggaccagctgggctacccccagcaccctggcctgaatgcccatggagctgcccagatgcagcccatgcacagatatgatgtgtctgccctgcagtacaacagcatgaccagcagccagacctacatgaatggcagccccacctacagcatgagctacagccagcagggcaccccaggcatggccctgggctccatgggctctgtggtgaagtctgaggccagcagcagcccccctgtggtgaccagcagcagccacagccgggccccctgccaggccggggacctgcgggacatgatctccatgtacctgcctggagctgaggtgcctgagcctgctgcccccagccggctgcacatgagccagcactaccagagcggccctgtgcccggcacagccatcaatggcaccctgcccctgagccacatgtag

SEQ ID NO: 135280 - DNA, 954 bp, Artificial Sequence
  derived and/or modified sequence
atgtacaacatgatggagaccgagctgaagccccccggcccccagcaaacgtctggcggtggaggcggcaactccacggccgcagccgctggtgggaaccagaagaattcccccgacagagtgaagagaccgatgaatgccttcatggtttggagccggggacagaggcggaaaatggcccaggagaatcctaaaatgcacaattcagagatttctaagcgtcttggcgcagagtggaagctgctctccgagacggagaaacgtccattcattgacgaagccaagcgcctgcgcgcacttcatatgaaagaacaccccgactacaaatacaggccgagaagaaagactaagacattaatgaaaaaggacaaatatacactgccgggtgggctacttgccccgggggggaactcaatggcctcaggagttggtgttggggcaggcttgggggcgggagtaaaccagcggatggacagttacgcccacatgaacggttggagcaatggatcatattcaatgatgcaggatcagctgggatatccacagcaccctggcctgaatgcacacggagctgctcagatgcagccgatgcatcggtacgacgtctcggcactgcagtataacagtatgacttcttcacagacctacatgaacggatcacccacttactccatgagttactcccaacaaggtacccctgggatggctctgggttccatgggatccgttgtcaagagcgaggcaagctcctcacctcctgtggtcacttcttcatcacattcacgcgctccatgccaagccggggatctgcgggatatgatttctatgtatctgccgggggcggaagtgcccgaacccgctgcaccatcacgcctccacatgagtcagcattatcaatctggacctgtgcctggcacagctataaacggaacattgcctctatcgcatatgtag

SEQ ID NO: 135281 - DNA, 954 bp, Artificial Sequence
  derived and/or modified sequence
atgtacaacatgatggagaccgagctgaagccccccggcccccagcaaacttccggaggcgggggcggcaactcaacagccgctgctgccggcggcaatcagaaaaattcgcccgacagagttaaaagaccaatgaacgcgttcatggtgtggagcagaggtcagagacgcaaaatggcacaggaaaatccaaaaatgcataacagcgagattagtaaaagactcggcgctgagtggaagctgctgtctgaaactgagaagaggcccttcatagatgaggccaaaagactcagagcccttcatatgaaagagcaccccgattataagtaccggccaagacgaaagacaaaaactctaatgaaaaaagataagtataccctgcctggggggttgctggccccaggcggcaatagcatggcctctggcgtgggcgtcggcgccggcttgggggccggcgttaaccagcgaatggattcatatgctcacatgaacggttggtctaacggaagttactcaatgatgcaggatcagcttgggtatcctcagcaccccggcctgaatgcgcatggggctgctcagatgcagccaatgcatcgctacgacgtgtcggctctacagtataactcaatgacatcttcgcaaacatacatgaatggcagccccacctactccatgagttactcacagcagggtaccccgggtatggccctgggctccatggggtccgtggtgaagtcagaagccagctccagccctccagtcgtgacaagctcaagccactcccgcgccccctgccaggccggagacctcagagatatgatttccatgtatctgcctggtgccgaggttccagaacccgccgcaccttccaggctccacatgtctcaacattatcaaagtggacctgtgccaggcacagctatcaatggcacgttgccactctcccacatgtag

SEQ ID NO: 135282 - DNA, 954 bp, Artificial Sequence
  derived and/or modified sequence
atgtacaacatgatggagaccgagctcaagcctccaggaccccagcaaacctccgggggaggcggaggtaattcgacagccgcagcagctgggggaaaccaaaagaacagcccggaccgcgtaaaaagacccatgaacgcgtttatggtctggtcacggggacaacgacggaaaatggcacaggaaaaccccaagatgcacaatagcgagatctctaagcggttgggagccgaatggaagctcctgtccgagaccgagaagcgtccttttatcgatgaggccaaacggcttcgggctctgcacatgaaagaacatccagactataaataccgacctagaaggaagacaaagacactgatgaaaaaagacaagtatactctgccaggcggtctgcttgccccaggcggtaacagcatggctagtggggtgggagttggagctggactgggcgcaggagtcaaccagcgaatggattcctatgcacacatgaatgggtggtcaaacggatcttatagcatgatgcaagatcagttgggatatccccagcatccagggttgaatgcccatggcgcagcccagatgcaacccatgcaccggtacgacgtgagcgcacttcagtataactcaatgacaagctcccagacctacatgaacggctcacctacatattctatgtcctactctcagcagggtacacctggaatggctctaggcagtatgggaagcgtggtgaagtctgaggcgtcttctagtcccccagtggtaactagcagttcacacagccgggctccgtgccaagccggagaccttagggacatgatctcaatgtacctgcccggtgctgaggtaccggagcctgctgctccaagcagactgcacatgagccagcactatcagtcaggacctgttccaggcacagccatcaatgggacactgcccctctcacatatgtag

SEQ ID NO: 135283 - DNA, 954 bp, Artificial Sequence
  derived and/or modified sequence
atgtacaatatgatggagaccgagcttaaaccccctgggccacaacagacgtctggtgggggagggggaaactcaaccgcagcagccgcaggcggaaatcagaagaattctcccgatcgcgtgaaaaggccgatgaacgcctttatggtatggtcacggggtcagcgcagaaagatggcccaagaaaacccaaagatgcataattcagagattagtaagcgcctcggtgcagaatggaagcttctgtccgaaacagagaagcgccctttcattgacgaggctaagagacttagggcacttcatatgaaagaacatcccgattataaataccgcccacgtagaaagacaaagaccctaatgaaaaaagacaaatatacactgcctggcggactgctggcacccggaggaaattccatggccagcggggtaggggtgggcgctggacttggcgcaggagttaatcagagaatggacagctatgctcacatgaacggatggtccaatggctcttacagtatgatgcaggaccagctgggctatcctcagcatcccggtctgaatgcacacggagcagcccagatgcagcccatgcatcgatatgacgttagtgccctgcaatacaattcgatgactagtagtcagacatatatgaatgggagccccacgtactctatgtcatactctcaacagggtacaccaggtatggcactcgggtccatgggatcagtggtaaagtcggaggcatcctcttctcctccggttgtgacatcctcttcccacagccgcgctccatgccaggccggtgacttgcgggatatgatatccatgtacctgcctggcgcagaggtgcccgagccagctgctccatctcggctgcacatgtctcagcattatcaatccgggcctgtccccggaactgcaatcaatggcaccctgcccctgtcccatatgtag

SEQ ID NO: 135284 - DNA, 2500 bp, Artificial Sequence
  derived and/or modified sequence
ctattaacttgttcaaaaaagtatcaggagttgtcaaggcagagaagagagtgtttgcaaaagggggaaagtagtttgctgcctctttaagactaggactgagagaaagaagaggagagagaaagaaagggagagaagtttgagccccaggcttaagcctttccaaaaaataataataacaatcatcggcggcggcaggatcggccagaggaggagggaagcgctttttttgatcctgattccagtttgcctctctctttttttcccccaaattattcttcgcctgattttcctcgcggagccctgcgctcccgacacccccgcccgcctcccctcctcctctccccccgcccgcgggccccccaaagtcccggccgggccgagggtcggcggccgccggcgggccgggcccgcgcacagcgcccgcatgtacaacatgatggagacggagctgaagccgccgggcccgcagcaaacttcggggggcggcggcggcaactccaccgcggcggcggccggcggcaaccagaaaaacagcccggaccgcgtcaagcggcccatgaatgccttcatggtgtggtcccgcgggcagcggcgcaagatggcccaggagaaccccaagatgcacaactcggagatcagcaagcgcctgggcgccgagtggaaacttttgtcggagacggagaagcggccgttcatcgacgaggctaagcggctgcgagcgctgcacatgaaggagcacccggattataaataccggccccggcggaaaaccaagacgctcatgaagaaggataagtacacgctgcccggcgggctgctggcccccggcggcaatagcatggcgagcggggtcggggtgggcgccggcctgggcgcgggcgtgaaccagcgcatggacagttacgcgcacatgaacggctggagcaacggcagctacagcatgatgcaggaccagctgggctacccgcagcacccgggcctcaatgcgcacggcgcagcgcagatgcagcccatgcaccgctacgacgtgagcgccctgcagtacaactccatgaccagctcgcagacctacatgaacggctcgcccacctacagcatgtcctactcgcagcagggcacccctggcatggctcttggctccatgggttcggtggtcaagtccgaggccagctccagcccccctgtggttacctcttcctcccactccagggcgccctgccaggccggggacctccgggacatgatcagcatgtatctccccggcgccgaggtgccggaacccgccgcccccagcagacttcacatgtcccagcactaccagagcggcccggtgcccggcacggccattaacggcacactgcccctctcacacatgtgagggccggacagcgaactggaggggggagaaattttcaaagaaaaacgagggaaatgggaggggtgcaaaagaggagagtaagaaacagcatggagaaaacccggtacgctcaaaaagaaaaaggaaaaaaaaaaatcccatcacccacagcaaatgacagctgcaaaagagaacaccaatcccatccacactcacgcaaaaaccgcgatgccgacaagaaaacttttatgagagagatcctggacttctttttgggggactatttttgtacagagaaaacctggggagggtggggagggcgggggaatggaccttgtatagatctggaggaaagaaagctacgaaaaactttttaaaagttctagtggtacggtaggagctttgcaggaagtttgcaaaagtctttaccaataatatttagagctagtctccaagcgacgaaaaaaatgttttaatatttgcaagcaacttttgtacagtatttatcgagataaacatggcaatcaaaatgtccattgtttataagctgagaatttgccaatatttttcaaggagaggcttcttgctgaattttgattctgcagctgaaatttaggacagttgcaaacgtgaaaagaagaaaattattcaaatttggacattttaattgtttaaaaattgtacaaaaggaaaaaattagaataagtactggcgaaccatctctgtggtcttgtttaaaaagggcaaaagttttagactgtactaaattttataacttactgttaaaagcaaaaatggccatgcaggttgacaccgttggtaatttataatagcttttgttcgatcccaactttccattttgttcagataaaaaaaaccatgaaattactgtgtttgaaatattttcttatggtttgtaatatttctgtaaatttattgtgatattttaaggttttcccccctttattttccgtagttgtattttaaaagattcggctctgtattatttgaatcagtctgccgagaatccatgtatatatttgaactaatatcatccttataacaggtacattttcaacttaagtttttactccattatgcacagtttgagataaataaatttttgaaatatggacactg

SEQ ID NO: 135285 - DNA, 1318 bp, Artificial Sequence
  derived and/or modified sequence
atggttgtctattaacttgttcaaaaaagtatcaggagttgtcaaggcagagaagagagtgtttgcaaaagggggaaagtagtttgctgcctctttaagactaggactgagagaaagaagaggagagagaaagaaagggagagaagtttgagccccaggcttaagcctttccaaaaaataataataacaatcatcggcggcggcaggatcggccagaggaggagggaagcgctttttttgatcctgattccagtttgcctctctctttttttcccccaaattattcttcgcctgattttcctcgcggagccctgcgctcccgacacccccccgccggcgggccgggcccgcgcacagcgcccgcatgtacaacatgatggagacggagctgaagccgccgggcccgcagcaaacttcggggggcggcggcggcaactccaccgcggcggcggccggcggcaaccagaaaaacagcccggaccgcgtcaagcggcccatgaatgccttcatggtgtggtcccgcgggcagcggcgcaagatggcccaggagaaccccaagatgcacaactcggagatcagcaagcgcctgggcgccgagtggaaacttttgtcggagacggagaagcggccgttcatcgacgaggctaagcggctgcgagcgctgcacatgaaggagcacccggattataaataccggccccggcggaaaaccaagacgctcatgaagaaggataagtacacgctgcccggcgggctgctggcccccggcggcaatagcatggcgagcggggtcggggtgggcgccggcctgggcgcgggcgtgaaccagcgcatggacagttacgcgcacatgaacggctggagcaacggcagctacagcatgatgcaggaccagctgggctacccgcagcacccgggcctcaatgcgcacggcgcagcgcagatgcagcccatgcaccgctacgacgtgagcgccctgcagtacaactccatgaccagctcgcagacctacatgaacggctcgcccacctacagcatgtcctactcgcagcagggcacccctggcatggctcttggctccatgggttcggtggtcaagtccgaggccagctccagcccccctgtggttacctcttcctcccactccagggcgccctgccaggccggggacctccgggacatgatcagcatgtatctccccggcgccgaggtgccggaacccgccgcccccagcagacttcacatgtcccagcactaccagagcggcccggtgcccggcacggccattaacggcacactgcccctctcacacatgtga

SEQ ID NO: 135286 - DNA, 951 bp, Artificial Sequence
  derived and/or modified sequence
atgtacaatatgatggaaaccgaactgaagccacccggtccgcaacagacgtcaggcggtggcggaggtaattccactgcagcagcagcaggagggaatcagaaaaactctcctgacagagtgaagcgccctatgaacgcattcatggtctggtcaagaggacagagacggaagatggcacaagaaaatccgaaaatgcacaactcagagatcagcaagagacttggcgctgaatggaaacttctgtccgagacggaaaagcggccttttatagacgaagcaaagaggcttcgcgcactccatatgaaggaacatcccgattacaagtaccgtccaagacgaaaaaccaagactcttatgaagaaggataagtacactcttcctggtggactgctggcgccagggggaaattcgatggcctcgggagtcggggtcggagctggactgggagcgggagtgaaccaacgcatggattcgtacgcccatatgaacggttggagcaatggcagctattccatgatgcaagatcaactgggatacccccaacatcccggtcttaacgcccacggcgcagcacaaatgcagcctatgcaccggtacgatgtttcggcgctgcaatacaactcgatgacctcctcacagacttacatgaacggttccccaacctattcgatgtcatactcgcagcaagggacccctggcatggcactcggtagcatgggatcagtggtgaaatccgaagcaagcagcagccctccagtggtcacttccagctcccattcgcgtgcgccttgtcaagctggcgacctcagggacatgatttcgatgtacctgccaggagccgaggtgccggagcccgcagccccatcgcgattgcacatgtcacagcattaccagtccggaccagtgcctggtaccgccattaacgggaccctccctttgtcccatatg

SEQ ID NO: 135287 - RNA, 951 nt, Artificial Sequence
  derived and/or modified sequence
auguacaauaugauggaaaccgaacugaagccacccgguccgcaacagacgucaggcgguggcggagguaauuccacugcagcagcagcaggagggaaucagaaaaacucuccugacagagugaagcgcccuaugaacgcauucauggucuggucaagaggacagagacggaagauggcacaagaaaauccgaaaaugcacaacucagagaucagcaagagacuuggcgcugaauggaaacuucuguccgagacggaaaagcggccuuuuauagacgaagcaaagaggcuucgcgcacuccauaugaaggaacaucccgauuacaaguaccguccaagacgaaaaaccaagacucuuaugaagaaggauaaguacacucuuccugguggacugcuggcgccagggggaaauucgauggccucgggagucggggucggagcuggacugggagcgggagugaaccaacgcauggauucguacgcccauaugaacgguuggagcaauggcagcuauuccaugaugcaagaucaacugggauacccccaacaucccggucuuaacgcccacggcgcagcacaaaugcagccuaugcaccgguacgauguuucggcgcugcaauacaacucgaugaccuccucacagacuuacaugaacgguuccccaaccuauucgaugucauacucgcagcaagggaccccuggcauggcacucgguagcaugggaucaguggugaaauccgaagcaagcagcagcccuccaguggucacuuccagcucccauucgcgugcgccuugucaagcuggcgaccucagggacaugauuucgauguaccugccaggagccgaggugccggagcccgcagccccaucgcgauugcacaugucacagcauuaccaguccggaccagugccugguaccgccauuaacgggacccucccuuugucccauaug

SEQ ID NO: 135288 - protein, 474 aa, Artificial Sequence
  derived and/or modified sequence
MVQQTNNAENTEALLAGESSDSGAGLELGIASSPTPGSTASTGGKADDPSWCKTPSGHIKRPMNAFMVWSQIERRKIMEQSPDMHNAEISKRLGKRWKLLKDSDKIPFIREAERLRLKHMADYPDYKYRPRKKVKSGNANSSSSAAASSKPGEKGDKVGGSGGGGHGGGGGGGSSNAGGGGGGASGGGANSKPAQKKSCGSKVAGGAGGGVSKPHAKLILAGGGGGGKAAAAAAASFAAEQAGAAALLPLGAAADHHSLYKARTPSASASASSAASASAALAAPGKHLAEKKVKRVYLFGGLGTSSSPVGGVGAGADPSDPLGLYEEEGAGCSPDAPSLSGRSSAASSPAAGRSPADHRGYASLRAASPAPSSAPSHASSSASSHSSSSSSSGSSSSDDEFEDDLLDLNPSSNFESMSLGSFSSSSALDRDLDFNFEPGSGSHFEFPDYCTPEVSEMISGDWLESSISNLVFTY

SEQ ID NO: 135289 - DNA, 4912 bp, Artificial Sequence
  derived and/or modified sequence
attggggtctgctctaagctgcagcaagagaaactgtgtgtgaggggaagaggcctgtttcgctgtcgggtctctagttcttgcacgctctttaagagtctgcactggaggaactcctgccattaccagctcccttcttgcagaagggagggggaaacatacatttattcatgccagtctgttgcatgcaggctttttggcttcctaccttgcaacaaaataattgcaccaactccttagtgccgattccgcccacagagagtcctggagccacagtcttttttgctttgcattgtaggagagggactaagtgctagagactatgtcgctttcctgagctaccgagagcgctcgtgaactggaatcaactgcttcagggaaaaagaaaaaaaaaaaaaaaagacttgcctgggaggccgcgagaaacttgcattggaagcttcagcaaccagcattcgagaaactcctctctactttagcacggtctccagactcagccgagagacagcaaactgcagcgcggtgagagagcgagagagagggagagagagactctccagcctgggaactataactcctctgcgagaggcggagaactccttccccaaatcttttggggacttttctctctttacccacctccgcccctgcgaggagttgaggggccagttcggccgccgcgcgcgtcttcccgttcggcgtgtgcttggcccggggaaccgggagggcccggcgatcgcgcggcggccgccgcgagggtgtgagcgcgcgtgggcgcccgccgagccgaggccatggtgcagcaaaccaacaatgccgagaacacggaagcgctgctggccggcgagagctcggactcgggcgccggcctcgagctgggaatcgcctcctcccccacgcccggctccaccgcctccacgggcggcaaggccgacgacccgagctggtgcaagaccccgagtgggcacatcaagcgacccatgaacgccttcatggtgtggtcgcagatcgagcggcgcaagatcatggagcagtcgcccgacatgcacaacgccgagatctccaagcggctgggcaaacgctggaagctgctcaaagacagcgacaagatccctttcattcgagaggcggagcggctgcgcctcaagcacatggctgactaccccgactacaagtaccggcccaggaagaaggtgaagtccggcaacgccaactccagctcctcggccgccgcctcctccaagccgggggagaagggagacaaggtcggtggcagtggcgggggcggccatgggggcggcggcggcggcgggagcagcaacgcggggggaggaggcggcggtgcgagtggcggcggcgccaactccaaaccggcgcagaaaaagagctgcggctccaaagtggcgggcggcgcgggcggtggggttagcaaaccgcacgccaagctcatcctggcaggcggcggcggcggcgggaaagcagcggctgccgccgccgcctccttcgccgccgaacaggcgggggccgccgccctgctgcccctgggcgccgccgccgaccaccactcgctgtacaaggcgcggactcccagcgcctcggcctccgcctcctcggcagcctcggcctccgcagcgctcgcggccccgggcaagcacctggcggagaagaaggtgaagcgcgtctacctgttcggcggcctgggcacgtcgtcgtcgcccgtgggcggcgtgggcgcgggagccgaccccagcgaccccctgggcctgtacgaggaggagggcgcgggctgctcgcccgacgcgcccagcctgagcggccgcagcagcgccgcctcgtcccccgccgccggccgctcgcccgccgaccaccgcggctacgccagcctgcgcgccgcctcgcccgccccgtccagcgcgccctcgcacgcgtcctcctcggcctcgtcccactcctcctcttcctcctcctcgggctcctcgtcctccgacgacgagttcgaagacgacctgctcgacctgaaccccagctcaaactttgagagcatgtccctgggcagcttcagttcgtcgtcggcgctcgaccgggacctggattttaacttcgagcccggctccggctcgcacttcgagttcccggactactgcacgcccgaggtgagcgagatgatctcgggagactggctcgagtccagcatctccaacctggttttcacctactgaagggcgcgcaggcagggagaagggccggggggggtaggagaggagaaaaaaaaagtgaaaaaaagaaacgaaaaggacagacgaagagtttaaagagaaaagggaaaaaagaaagaaaaagtaagcagggctggcttcgcccgcgttctcgtcgtcggatcaaggagcgcggcggcgttttggacccgcgctcccatcccccaccttcccgggccggggacccactctgcccagccggagggacgcggaggaggaagagggtagacaggggcgacctgtgattgttgttattgatgttgttgttgatggcaaaaaaaaaaaagcgacttcgagtttgctcccctttgcttgaagagaccccctcccccttccaacgagcttccggacttgtctgcacccccagcaagaaggcgagttagttttctagagacttgaaggagtctcccccttcctgcatcaccaccttggttttgttttattttgcttcttggtcaagaaaggaggggagaacccagcgcacccctccccccctttttttaaacgcgtgatgaagacagaaggctccggggtgacgaatttggccgatggcagatgttttgggggaacgccgggactgagagactccacgcaggcgaattcccgtttggggcttttttttcctccctcttttccccttgccccctctgcagccggaggaggagatgttgaggggaggaggccagccagtgtgaccggcgctaggaaatgacccgagaaccccgttggaagcgcagcagcgggagctaggggcgggggcggaggaggacacgaactggaagggggttcacggtcaaactgaaatggatttgcacgttggggagctggcggcggcggctgctgggcctccgccttcttttctacgtgaaatcagtgaggtgagacttcccagaccccggaggcgtggaggagaggagactgtttgatgtggtacaggggcagtcagtggagggcgagtggtttcggaaaaaaaaaaagaaaaaaagaaaaaaaaagaaaaaaaaaagatttttttcttctcttaatcggaatcgtgatggtgttggattatttcaatggtggggttaatatagcatgttatcctgtctatcttttaaagatttctgtataagactgttgagcagtttttaaaatagtgtaggataatataaaaagcagatagatggcgctatgtttgattcctacaacgaaattatcaccagctttttttcattcttaactctttaaaggattcaaacgcaactcaaatctgtgctggactttaaaaaaacaattcaggaccaaattttttctcagtgtgtgtgtttattccttataggtgtaaatgagaagacgtgtttttttccttcaccgatgctccatcctcgtatttctttttccttgtaaatgtaatcagatgccattttatatgtggacgtatttatactggccaaacatattttttcttttgtccctttttttctttcctttctttttacttcctttatttctttattccttccttttcctttttttcttttttttttctttttttttttttttttttggtagttgttgttacccacgccattttacgtctccttcactgaagggctagagttttaacttttaattttttatatttaaatgtagacttttgacacttttaaaaaacaaaaaaagacaagagagatgaaaacgtttgattattttctcagtgtatttttgtaaaaaatatataaagggggtgttaatcggtgtaaatcgctgtttggatttcctgattttataacagggcggctggttaatatctcacacagtttaaaaaatcagcccctaatttctccatgtttacacttcaatctgcaggcttcttaaagtgacagtatcccttaacctgccaccagtgtccaccctccggcccccgtcttgtaaaaaggggaggagaattagccaaacactgtaagcttttaagaaaaacaaagttttaaacgaaatactgctctgtccagaggctttaaaactggtgcaattacagcaaaaagggattctgtagctttaacttgtaaaccacatcttttttgcactttttttataagcaaaaacgtgccgtttaaaccactggatctatctaaatgccgatttgagttcgcgacactatgtactgcgtttttcattcttgtatttgactatttaatcctttctacttgtcgctaaatataattgttttagtcttatggcatgatgatagcatatgtgttcaggtttatagctgttgtgtttaaaaattgaaaaaagtggaaaacatctttgtacatttaagtctgtattataataagcaaaaagattgtgtgtatgtatgtttaatataacatgacaggcactaggacgtctgcctttttaaggcagttccgttaagggtttttgtttttaaacttttttttgccatccatcctgtgcaatatgccgtgtagaatatttgtcttaaaattcaaggccacaaaaacaatgtttgggggaaaaaaaagaaaaaatcatgccagctaatcatgtcaagttcactgcctgtcagattgttgatatataccttctgtaaataactttttttgagaaggaaataaaatcagctggaactgaaccctaaaaaaaaaaaaaaaaaaaaaaaaaaaaaaaaaaaa

SEQ ID NO: 135290 - DNA, 1425 bp, Artificial Sequence
  derived and/or modified sequence
atggtgcagcagaccaacaacgccgagaacaccgaggccctgctggccggcgagagcagcgacagcggcgccggcctggagctgggcatcgccagcagccccacccccggcagcaccgccagcaccggcggcaaggccgacgaccccagctggtgcaagacccccagcggccacatcaagagacccatgaacgccttcatggtgtggagccagatcgagagaagaaagatcatggagcagagccccgacatgcacaacgccgagatcagcaagagactgggcaagagatggaagctgctgaaggacagcgacaagatccccttcatcagagaggccgagagactgagactgaagcacatggccgactaccccgactacaagtacagacccagaaagaaggtgaagagcggcaacgccaacagcagcagcagcgccgccgccagcagcaagcccggcgagaagggcgacaaggtgggcggcagcggcggcggcggccacggcggcggcggcggcggcggcagcagcaacgccggcggcggcggcggcggcgccagcggcggcggcgccaacagcaagcccgcccagaagaagagctgcggcagcaaggtggccggcggcgccggcggcggcgtgagcaagccccacgccaagctgatcctggccggcggcggcggcggcggcaaggccgccgccgccgccgccgccagcttcgccgccgagcaggccggcgccgccgccctgctgcccctgggcgccgccgccgaccaccacagcctgtacaaggccagaacccccagcgccagcgccagcgccagcagcgccgccagcgccagcgccgccctggccgcccccggcaagcacctggccgagaagaaggtgaagagagtgtacctgttcggcggcctgggcaccagcagcagccccgtgggcggcgtgggcgccggcgccgaccccagcgaccccctgggcctgtacgaggaggagggcgccggctgcagccccgacgcccccagcctgagcggcagaagcagcgccgccagcagccccgccgccggcagaagccccgccgaccacagaggctacgccagcctgagagccgccagccccgcccccagcagcgcccccagccacgccagcagcagcgccagcagccacagcagcagcagcagcagcagcggcagcagcagcagcgacgacgagttcgaggacgacctgctggacctgaaccccagcagcaacttcgagagcatgagcctgggcagcttcagcagcagcagcgccctggacagagacctggacttcaacttcgagcccggcagcggcagccacttcgagttccccgactactgcacccccgaggtgagcgagatgatcagcggcgactggctggagagcagcatcagcaacctggtgttcacctactag

SEQ ID NO: 135291 - DNA, 1425 bp, Artificial Sequence
  derived and/or modified sequence
atggtgcagcagacaaataatgccgagaataccgaggccctcctggccggagagagctctgacagcggggctgggctcgagcttggcatagcctccagtcccacgccgggcagtaccgcctcgacggggggtaaggcggacgatcctagctggtgcaaaaccccatctggacatataaaaaggcctatgaatgctttcatggtttggtcacaaattgagagacgcaaaattatggagcagagccctgacatgcacaatgccgagatttccaagagactgggtaaacgctggaagctcctaaaagacagtgataaaattccattcatcagagaagcggagagactgcgactcaaacacatggcggattaccccgactacaaatacagaccacgcaagaaagtaaagagcggcaacgctaactcttctagttctgccgcagctagcagtaagcctggagagaaaggagacaaggtcggaggctccggtggtgggggacacggcggaggaggaggcggaggcagctcaaacgccggggggggaggaggtggcgccagtggcgggggggctaacagcaaacctgcacagaagaagtcatgtggctctaaagtggctggcggggccgggggtggtgtgtccaagccccatgccaagctgatcctcgctggaggcgggggcggcggaaaagccgccgcagccgcggcagcgtcttttgccgccgagcaagcaggagccgcagcccttctcccattaggtgccgcagcggaccatcattcactttataaggcaaggacaccttcggccagcgctagcgcttcctctgctgctagcgcctctgccgccctagctgcccccggaaagcacctggcagaaaaaaaggtaaagcgcgtgtatctatttggcggcctgggcacctccagtagcccagttggtggggtgggggccggggcagacccttccgacccattgggcctgtacgaggaggaaggcgccggatgttctcccgacgccccctccttatctggtaggtcatccgctgccagctctcctgctgcgggcagatcacccgccgaccaccgaggatacgcaagcctgcgcgctgcctctcccgcccctagttcagctccatcacacgccagtagctctgcatcctcccattctagctcaagctcctcgtctggtagtagctcaagcgatgacgaatttgaagacgatttactggacctcaacccctcttcaaactttgagtcaatgagccttgggtccttcagttcttctagcgccctggacagggatctcgattttaactttgaacccgggtcggggtcccacttcgagttcccagactattgtaccccggaagtcagcgaaatgatctcaggagattggctggagagctctatcagcaatcttgtgttcacttattag

SEQ ID NO: 135292 - DNA, 1425 bp, Artificial Sequence
  derived and/or modified sequence
atggttcagcagacgaataacgcagagaataccgaggcgttattagcaggcgaaagctccgatagcggagctggcctggagctcgggatcgcgagctcccctacgcccgggtcgactgcgagcacgggcggcaaagcggacgatcctagttggtgtaaaactccttcaggccacatcaagaggccaatgaacgcgttcatggtgtggtctcagatagaacgccgtaagatcatggagcaatctccagatatgcacaacgccgagatctctaagagattgggcaaaaggtggaaactgctcaaggatagcgacaagatccccttcatccgtgaggccgagaggcttaggctgaagcatatggctgactaccccgactacaagtataggcctcgcaaaaaagtgaaatctggaaacgctaacagctcctctagtgccgctgcttcaagtaaaccgggggaaaagggagacaaagtgggcggatcgggaggcggcggtcacgggggtggcgggggcggtggatcctcaaatgccggcggggggggcggtggagcgtccgggggtggggcaaactcaaagcctgcgcagaagaaatcttgcgggtctaaagtggccgggggagccggaggaggggtgtccaaaccacacgccaagctaattttggccggaggcggtgggggcggcaaagccgccgccgccgccgcagcttcctttgccgcggagcaggctggagcagcggctcttctgcctctgggcgccgccgcagaccaccattctctgtacaaggcgcgaaccccgtctgcatctgccagcgcttcttcagccgcctcggcgtccgccgctctggcagcccccggtaaacatttggccgaaaagaaggtcaagcgtgtctatctgttcgggggcctgggtacctcgtcctcacctgtggggggcgtgggcgctggcgcagacccaagcgatcccctcggtctctatgaggaggaaggagctggctgctcccccgatgctcctagtctgtctggccgctccagtgcagcatcttcaccagccgctggtagatcccctgcggatcatagaggatacgcttctttgcgggcggcaagccctgcaccgtcttcagccccctctcacgcctcttcctctgcatcctcgcattcatctagttcttcttccagtgggtcctctagcagtgacgacgaatttgaggacgacttgttggaccttaacccttcatcaaatttcgagagcatgtccctagggagtttttcctcatccagcgcactggatcgagacctcgactttaactttgaaccaggctcgggcagtcactttgaattcccggactactgcacacccgaggttagcgaaatgatttctggtgactggttggagtccagtatctctaatttggttttcacttattag

SEQ ID NO: 135293 - DNA, 1425 bp, Artificial Sequence
  derived and/or modified sequence
atggtgcagcagaccaacaatgcagaaaatacagaggccctgctggccggggagagcagtgacagcggggccggcctggagctgggcatcgccagcagccccaccccaggcagcacagccagcactggaggcaaggcagatgaccccagctggtgcaagacccccagcggccacatcaagaggcccatgaatgccttcatggtgtggagccagatcgagaggaggaagatcatggagcagagcccagacatgcacaatgctgagatcagcaagaggctgggcaagcgctggaagctgctgaaggacagcgacaagatccccttcatccgggaggccgagcggctgcggctgaagcacatggctgactacccagactacaagtaccggcccaggaagaaggtgaagtctggaaatgccaacagcagcagcagcgctgctgccagcagcaagccaggagagaagggggacaaggtgggcggcagcggcggcggcggccacggcggcggcggcggcggcggcagcagcaatgccggcggcggcggcggcggggccagcggcggcggggccaacagcaagccagcccagaagaagagctgtggcagcaaggtggccggcggggccggcggcggcgtgtccaagccccacgccaagctgatcctggccggcggcggcggcggcggcaaggctgctgctgctgctgctgccagctttgctgctgagcaggccggggctgctgccctgctgcccctgggcgctgctgctgaccaccacagcctgtacaaggcccggacccccagcgccagcgccagcgccagcagcgctgccagcgccagcgctgccctggccgcccctgggaagcacctggccgagaagaaggtgaagagggtgtacctgtttggaggcctgggcaccagcagcagccctgtgggcggcgtgggcgctggagctgaccccagcgaccccctgggcctgtatgaggaggagggcgccggctgcagcccagatgcccccagcctgagcggccgcagcagcgctgccagcagccctgctgctggccgcagccctgctgaccaccggggctacgccagcctgcgggccgccagccctgcccccagcagcgcccccagccacgccagcagcagcgccagcagccacagcagcagcagcagcagcagcggcagcagcagcagtgatgatgaatttgaagatgacctgctggacctgaaccccagcagcaactttgagagcatgagcctgggcagcttcagcagcagcagcgccctggaccgggacctggacttcaactttgagcccggcagcggcagccactttgagttcccagactactgcaccccagaggtgtctgagatgatcagcggggactggctggagagcagcatcagcaacctggtgttcacctactag

SEQ ID NO: 135294 - DNA, 1425 bp, Artificial Sequence
  derived and/or modified sequence
atggtgcagcagaccaacaacgccgagaacaccgaggccctgctggccggagaatctagtgactcgggagctgggttggagctcgggatcgcgagttcccccaccccgggatccactgccagcaccgggggaaaagcagacgatccaagctggtgtaagaccccctccggccatatcaagcggcccatgaatgcattcatggtgtggagccagattgaaagacgcaaaatcatggaacagtctcctgatatgcataatgctgagataagtaagcgactggggaagcgctggaaactactgaaagactccgacaagatccctttcatccgcgaagccgaacggctgcgtctgaaacacatggccgattatcctgattataaatatagacccaggaagaaagtgaagtctggaaacgctaactcctcctcctctgctgcagccagtagtaaacctggggaaaagggggataaggttgggggttctggcggtggaggacatggtggtggcggagggggaggatcatcaaacgctggcggcggaggcggaggagcatctggagggggcgccaactctaaacctgcccaaaagaagagttgcggctctaaggtggcgggtggcgccggcggaggagtgagcaaaccacacgccaagctaattttggctggtggaggtggagggggtaaggcggccgcggcagccgctgccagcttcgccgccgagcaagcaggcgccgctgcgctcctacctctgggggccgccgccgaccaccattctctttataaggctcgtacaccttccgcctcagcctccgcctcttccgctgcaagcgcctcagcagctttagccgcccctggcaagcacctggccgagaaaaaggtgaagagggtttacctgttcggagggctgggaacatcctcttccccagtcggaggcgtgggagccggtgctgaccctagtgacccactgggcctctacgaagaggagggcgctggctgctcaccagacgccccgtctctgtcaggaaggtcatccgctgccagctcacctgctgccgggcgttctcccgccgaccatcgtggctatgctagtctgagagccgcaagtccggcgccctcatctgcaccctcccacgcatcgtcctccgcctcatcgcatagcagttctagctcgtcatctggaagttcttcatcagacgacgaattcgaggacgacctgttagatctgaacccttcaagcaacttcgaatctatgtccctcggaagcttttcttcatcttccgccctagatcgggacctcgattttaatttcgagccaggaagcgggtcgcactttgagttcccagactattgcacacccgaggttagcgaaatgatcagcggtgactggttggagagctcgatatcaaacctggttttcacatattag

SEQ ID NO: 135295 - DNA, 1425 bp, Artificial Sequence
  derived and/or modified sequence
atggtgcagcagaccaacaacgccgagaacaccgaggccctgctggccggagaatcctccgactccggtgcagggctggagctagggattgcatctagcccgaccccaggctctaccgcttcaactggaggcaaagcggacgacccaagctggtgtaagacaccttccgggcatataaaaaggcctatgaatgccttcatggtgtggtcacaaatagaacgtaggaagatcatggaacagtcaccagacatgcacaacgccgagatttcgaaaagattgggaaagcgctggaagctcctgaaggactcagacaagataccttttattagggaagccgagcggctgaggctgaaacatatggctgactatcccgactataagtaccgtcctagaaaaaaggtgaagagcgggaacgcgaatagctcctcgtcagccgcagcctcaagtaagcctggggagaagggagataaggtcgggggaagtggcggaggaggtcacgggggggggggcggtggcgggagctccaacgctggaggaggcggggggggggcctcagggggaggcgcgaactcaaaaccggcccagaaaaagtcatgcggctccaaagtggccggcggagctggcggcggagtcagcaagccccacgccaagctaatcctggctgggggcgggggcggcggaaaggcggccgccgcggccgcagccagctttgccgctgaacaagcaggcgccgccgcgctgctccctctcggcgctgcggcagaccaccactccctttataaagcgcggaccccatcagctagcgcatcggcctcttcggccgcttcggcgtcagcggcgttggcagcacctggcaaacatctggcagagaagaaggtgaaacgagtgtatctgtttggcgggttgggaaccagctcctctccagttggcggcgtcggggccggcgccgacccctccgaccctctgggactgtacgaggaggagggcgctggctgctcccctgatgccccatcactctccgggagatcgtctgctgcgagctccccggccgcaggtcgaagccccgcagaccaccggggatatgcctcactgcgggctgcatctccggccccaagctctgccccatctcacgcttctagctccgcctctagtcactcatctagttctagcagttctggtagtagttctagtgacgatgaattcgaagacgatctgcttgatctgaacccttcttctaacttcgagagtatgagccttggttccttcagttcatcctcggccctggatagagacctggatttcaattttgagccagggtccggttcacacttcgagttcccggattactgcacacctgaggtgtccgagatgatttccggagactggctagagtcttctatctcaaaccttgtctttacctattag

SEQ ID NO: 135296 - DNA, 1425 bp, Artificial Sequence
  derived and/or modified sequence
atggtccaacagaccaacaacgcagaaaatacggaagctctgctggcaggagaaagctcggacagtggcgctgggctagaactggggatcgccagcagccccacccctggcagtaccgcctctacaggagggaaagccgatgatcccagctggtgtaagacaccaagtggtcatattaaacggcctatgaacgccttcatggtgtggtcgcagatagagagacgaaagataatggagcagagccccgacatgcacaatgcagagattagcaagcgattggggaagcgttggaagttgctcaaggacagcgacaaaatcccctttattcgggaagccgaacgcttgcggctgaaacacatggctgattaccctgattacaagtataggcctcgcaaaaaggtcaaatccggcaatgccaacagtagtagcagtgcagcggcaagctcaaaacctggagagaagggcgataaagtgggcggttccgggggagggggtcacgggggaggtggaggtggcggaagttctaacgccggaggtggaggaggcggagcaagcggtgggggtgccaatagcaagccagcccagaaaaagtcctgtggctccaaagtggccggtggcgctggcggtggcgtgtcgaagccccatgccaaattgatcctcgctggcggaggcggaggaggcaaggctgctgcagcagctgcggcatctttcgctgctgagcaggcaggcgctgctgcactcctccccttaggggcagccgctgaccaccacagcctgtacaaagcccgtacccctagtgcatctgcgagtgccagtagcgctgcctcagcatccgccgctctggctgccccaggcaaacacctggcagagaagaaggtgaagagggtgtatctgttcggaggactgggaacttcatctagtccggtgggaggagtgggagctggggctgacccttcggatcccctgggcttatacgaggaagaaggagctggctgcagccctgacgcgccttcgctcagtgggaggtcatctgctgcaagcagcccagctgctggtcggagcccggctgaccatcgaggatacgccagtctccgagcagcttccccagcccctagttctgccccatctcatgcaagttcgtcagcatcatctcactcaagctcttcgagcagctcaggctctagcagcagcgacgatgagtttgaagacgacctcctcgacctgaatccttcatccaactttgaatcaatgtcattgggatctttcagctcatcgagcgccctggatcgagacctagactttaatttcgagcctggcagtggttcccatttcgagtttcctgattactgtacaccggaggtctctgagatgatctccggggactggcttgaatcgtctatctcgaacctcgtcttcacttattag

SEQ ID NO: 135297 - DNA, 1425 bp, Artificial Sequence
  derived and/or modified sequence
atggtgcagcaaaccaataacgccgaaaacaccgaggcactgctggccggagagtccagcgattctggcgcagggcttgaactgggaatagccagtagtcccaccccaggaagtactgccagcacggggggaaaagcagacgatccctcttggtgtaaaactccaagcggacacataaagaggccaatgaatgcatttatggtatggagccaaatcgagaggcgtaagattatggagcagtctccggatatgcacaacgctgagattagcaaaaggctgggcaagcgatggaagctgctcaaagattctgacaagatccctttcattagggaggcagagcgtctccgacttaaacacatggctgattacccagattacaaatatcgtccaaggaagaaggtaaagtctgggaacgctaattccagttctagcgccgcagcatcaagcaaacccggtgaaaagggagataaggtgggcggttcaggcggaggcggacatggaggtggcggtggcggtggttccagtaacgctggcggtgggggaggaggtgcgtctggaggcggagccaattctaaaccagcccagaagaagtcatgcggcagcaaagtcgcaggtggcgctggcggaggtgtatctaagccccacgccaagcttatattggcaggaggcggtggaggcggtaaggccgcagccgcagctgctgcaagctttgctgcggaacaggccggagctgccgctctgctgcccctcggcgcagcagcagaccaccattccctctacaaggctcgcacaccaagcgcttccgcctccgcaagtagtgctgcaagcgcgagcgccgctttggctgctcccggtaagcatctggctgagaaaaaagtcaaacgagtctacctgttcgggggactcggtactagcagcagtcccgtcggcggagtaggcgctggtgctgatccatccgacccactgggcctttatgaagaagaaggggctgggtgttcgcccgacgcaccgtccctttcgggtaggtcttcggccgctagctctcccgctgctggtaggtccccggctgatcatcgcggatacgccagtctgcgggctgcctctccggcaccgtcatccgcgccatcccacgcctcaagctccgccagctcccatagctcctcaagcagcagctctggctcttcgtcatccgacgacgagttcgaagatgatctgttggatcttaatccctccagtaactttgaaagcatgtcactcgggagcttcagcagtagcagtgcgttggaccgggacctcgactttaattttgaacccggaagcggctctcattttgagttccccgactattgcactccggaagtctccgagatgattagtggcgactggctagagtcaagtattagtaacttggtttttacctactag

SEQ ID NO: 135298 - DNA, 4876 bp, Artificial Sequence
  derived and/or modified sequence
attggggtctgctctaagctgcagcaagagaaactgtgtgtgaggggaagaggcctgtttcgctgtcgggtctctagttcttgcacgctctttaagagtctgcactggaggaactcctgccattaccagctcccttcttgcagaagggagggggaaacatacatttattcatgccagtctgttgcatgcaggctttttggcttcctaccttgcaacaaaataattgcaccaactccttagtgccgattccgcccacagagagtcctggagccacagtcttttttgctttgcattgtaggagagggactaagtgctagagactatgtcgctttcctgagctaccgagagcgctcgtgaactggaatcaactgcttcagggaaaaagaaaaaaaaaaaaaaaagacttgcctgggaggccgcgagaaacttgcattggaagcttcagcaaccagcattcgagaaactcctctctactttagcacggtctccagactcagccgagagacagcaaactgcagcgcggtgagagagcgagagagagggagagagagactctccagcctgggaactataactcctctgcgagaggcggagaactccttccccaaatcttttggggacttttctctctttacccacctccgcccctgcgaggagttgaggggccagttcggccgccgcgcgcgtcttcccgttcggcgtgtgcttggcccggggaaccgggagggcccggcgatcgcgcggcggccgccgcgagggtgtgagcgcgcgtgggcgcccgccgagccgaggccatggtgcagcaaaccaacaatgccgagaacacggaagcgctgctggccggcgagagctcggactcgggcgccggcctcgagctgggaatcgcctcctcccccacgcccggctccaccgcctccacgggcggcaaggccgacgacccgagctggtgcaagaccccgagtgggcacatcaagcgacccatgaacgccttcatggtgtggtcgcagatcgagcggcgcaagatcatggagcagtcgcccgacatgcacaacgccgagatctccaagcggctgggcaaacgctggaagctgctcaaagacagcgacaagatccctttcattcgagaggcggagcggctgcgcctcaagcacatggctgactaccccgactacaagtaccggcccaggaagaaggtgaagtccggcaacgccaactccagctcctcggccgccgcctcctccaagccgggggagaagggagacaaggtcggtggcagtggcgggggcggccatgggggcggcggcggcggcgggagcagcaacgcggggggaggaggcggcggtgcgagtggcggcggcgccaactccaaaccggcgcagaaaaagagctgcggctccaaagtggcgggcggcgcgggcggtggggttagcaaaccgcacgccaagctcatcctggcaggcggcggcggcggcgggaaagcagcggctgccgccgccgcctccttcgccgccgaacaggcgggggccgccgccctgctgcccctgggcgccgccgccgaccaccactcgctgtacaaggcgcggactcccagcgcctcggcctccgcctcctcggcagcctcggcctccgcagcgctcgcggccccgggcaagcacctggcggagaagaaggtgaagcgcgtctacctgttcggcggcctgggcacgtcgtcgtcgcccgtgggcggcgtgggcgcgggagccgaccccagcgaccccctgggcctgtacgaggaggagggcgcgggctgctcgcccgacgcgcccagcctgagcggccgcagcagcgccgcctcgtcccccgccgccggccgctcgcccgccgaccaccgcggctacgccagcctgcgcgccgcctcgcccgccccgtccagcgcgccctcgcacgcgtcctcctcggcctcgtcccactcctcctcttcctcctcctcgggctcctcgtcctccgacgacgagttcgaagacgacctgctcgacctgaaccccagctcaaactttgagagcatgtccctgggcagcttcagttcgtcgtcggcgctcgaccgggacctggattttaacttcgagcccggctccggctcgcacttcgagttcccggactactgcacgcccgaggtgagcgagatgatctcgggagactggctcgagtccagcatctccaacctggttttcacctactgaagggcgcgcaggcagggagaagggccggggggggtaggagaggagaaaaaaaaagtgaaaaaaagaaacgaaaaggacagacgaagagtttaaagagaaaagggaaaaaagaaagaaaaagtaagcagggctggcttcgcccgcgttctcgtcgtcggatcaaggagcgcggcggcgttttggacccgcgctcccatcccccaccttcccgggccggggacccactctgcccagccggagggacgcggaggaggaagagggtagacaggggcgacctgtgattgttgttattgatgttgttgttgatggcaaaaaaaaaaaagcgacttcgagtttgctcccctttgcttgaagagaccccctcccccttccaacgagcttccggacttgtctgcacccccagcaagaaggcgagttagttttctagagacttgaaggagtctcccccttcctgcatcaccaccttggttttgttttattttgcttcttggtcaagaaaggaggggagaacccagcgcacccctccccccctttttttaaacgcgtgatgaagacagaaggctccggggtgacgaatttggccgatggcagatgttttgggggaacgccgggactgagagactccacgcaggcgaattcccgtttggggcttttttttcctccctcttttccccttgccccctctgcagccggaggaggagatgttgaggggaggaggccagccagtgtgaccggcgctaggaaatgacccgagaaccccgttggaagcgcagcagcgggagctaggggcgggggcggaggaggacacgaactggaagggggttcacggtcaaactgaaatggatttgcacgttggggagctggcggcggcggctgctgggcctccgccttcttttctacgtgaaatcagtgaggtgagacttcccagaccccggaggcgtggaggagaggagactgtttgatgtggtacaggggcagtcagtggagggcgagtggtttcggaaaaaaaaaaagaaaaaaagaaaaaaaaagaaaaaaaaaagatttttttcttctcttaatcggaatcgtgatggtgttggattatttcaatggtggggttaatatagcatgttatcctgtctatcttttaaagatttctgtataagactgttgagcagtttttaaaatagtgtaggataatataaaaagcagatagatggcgctatgtttgattcctacaacgaaattatcaccagctttttttcattcttaactctttaaaggattcaaacgcaactcaaatctgtgctggactttaaaaaaacaattcaggaccaaattttttctcagtgtgtgtgtttattccttataggtgtaaatgagaagacgtgtttttttccttcaccgatgctccatcctcgtatttctttttccttgtaaatgtaatcagatgccattttatatgtggacgtatttatactggccaaacatattttttcttttgtccctttttttctttcctttctttttacttcctttatttctttattccttccttttcctttttttcttttttttttctttttttttttttttttttggtagttgttgttacccacgccattttacgtctccttcactgaagggctagagttttaacttttaattttttatatttaaatgtagacttttgacacttttaaaaaacaaaaaaagacaagagagatgaaaacgtttgattattttctcagtgtatttttgtaaaaaatatataaagggggtgttaatcggtgtaaatcgctgtttggatttcctgattttataacagggcggctggttaatatctcacacagtttaaaaaatcagcccctaatttctccatgtttacacttcaatctgcaggcttcttaaagtgacagtatcccttaacctgccaccagtgtccaccctccggcccccgtcttgtaaaaaggggaggagaattagccaaacactgtaagcttttaagaaaaacaaagttttaaacgaaatactgctctgtccagaggctttaaaactggtgcaattacagcaaaaagggattctgtagctttaacttgtaaaccacatcttttttgcactttttttataagcaaaaacgtgccgtttaaaccactggatctatctaaatgccgatttgagttcgcgacactatgtactgcgtttttcattcttgtatttgactatttaatcctttctacttgtcgctaaatataattgttttagtcttatggcatgatgatagcatatgtgttcaggtttatagctgttgtgtttaaaaattgaaaaaagtggaaaacatctttgtacatttaagtctgtattataataagcaaaaagattgtgtgtatgtatgtttaatataacatgacaggcactaggacgtctgcctttttaaggcagttccgttaagggtttttgtttttaaacttttttttgccatccatcctgtgcaatatgccgtgtagaatatttgtcttaaaattcaaggccacaaaaacaatgtttgggggaaaaaaaagaaaaaatcatgccagctaatcatgtcaagttcactgcctgtcagattgttgatatataccttctgtaaataactttttttgagaaggaaataaaatcagctggaactgaaccct

SEQ ID NO: 135299 - DNA, 2082 bp, Artificial Sequence
  derived and/or modified sequence
ctgcactggaggaactcctgccattaccagctcccttcttgcagaagggagggggaaacatacatttattcatgccagtctgttgcatgcaggctttttggcttcctaccttgcaacaaaataattgcaccaactccttagtgccgattccgcccacagagagtcctggagccacagtcttttttgctttgcattgtaggagagggactaagtgctagagactatgtcgctttcctgagctaccgagagcgctcgtgaactggaatcaactgcttcagggaaaaagaaaaaaaaaaaaaaaagacttgcctgggaggccgcgagaaacttgcattggaagcttcagcaaccagcattcgagaaactcctctctactttagcacggtctccagactcagccgagagacagcaaactgcagcgcggtgagagagcgagagagagggagagagagactctccagcctgggaactataactcctctgcgagaggcggagaactccttccccaaatcttttggggacttttctctctttacccacctccgcccctgcgaggagttgaggcggccgccgcgagggtgtgagcgcgcgtgggcgcccgccgagccgaggccatggtgcagcaaaccaacaatgccgagaacacggaagcgctgctggccggcgagagctcggactcgggcgccggcctcgagctgggaatcgcctcctcccccacgcccggctccaccgcctccacgggcggcaaggccgacgacccgagctggtgcaagaccccgagtgggcacatcaagcgacccatgaacgccttcatggtgtggtcgcagatcgagcggcgcaagatcatggagcagtcgcccgacatgcacaacgccgagatctccaagcggctgggcaaacgctggaagctgctcaaagacagcgacaagatccctttcattcgagaggcggagcggctgcgcctcaagcacatggctgactaccccgactacaagtaccggcccaggaagaaggtgaagtccggcaacgccaactccagctcctcggccgccgcctcctccaagccgggggagaagggagacaaggtcggtggcagtggcgggggcggccatgggggcggcggcggcggcgggagcagcaacgcggggggaggaggcggcggtgcgagtggcggcggcgccaactccaaaccggcgcagaaaaagagctgcggctccaaagtggcgggcggcgcgggcggtggggttagcaaaccgcacgccaagctcatcctggcaggcggcggcggcggcgggaaagcagcggctgccgccgccgcctccttcgccgccgaacaggcgggggccgccgccctgctgcccctgggcgccgccgccgaccaccactcgctgtacaaggcgcggactcccagcgcctcggcctccgcctcctcggcagcctcggcctccgcagcgctcgcggccccgggcaagcacctggcggagaagaaggtgaagcgcgtctacctgttcggcggcctgggcacgtcgtcgtcgcccgtgggcggcgtgggcgcgggagccgaccccagcgaccccctgggcctgtacgaggaggagggcgcgggctgctcgcccgacgcgcccagcctgagcggccgcagcagcgccgcctcgtcccccgccgccggccgctcgcccgccgaccaccgcggctacgccagcctgcgcgccgcctcgcccgccccgtccagcgcgccctcgcacgcgtcctcctcggcctcgtcccactcctcctcttcctcctcctcgggctcctcgtcctccgacgacgagttcgaagacgacctgctcgacctgaaccccagctcaaactttgagagcatgtccctgggcagcttcagttcgtcgtcggcgctcgaccgggacctggattttaacttcgagcccggctccggctcgcacttcgagttcccggactactgcacgcccgaggtgagcgagatgatctcgggagactggctcgagtccagcatctccaacctggttttcacctactgaagggcgcgcaggcagggagaagggccggggggggtaggagagg

SEQ ID NO: 135300 - protein, 441 aa, Artificial Sequence
  derived and/or modified sequence
MVQQAESLEAESNLPREALDTEEGEFMACSPVALDESDPDWCKTASGHIKRPMNAFMVWSKIERRKIMEQSPDMHNAEISKRLGKRWKMLKDSEKIPFIREAERLRLKHMADYPDYKYRPRKKPKMDPSAKPSASQSPEKSAAGGGGGSAGGGAGGAKTSKGSSKKCGKLKAPAAAGAKAGAGKAAQSGDYGGAGDDYVLGSLRVSGSGGGGAGKTVKCVFLDEDDDDDDDDDELQLQIKQEPDEEDEEPPHQQLLQPPGQQPSQLLRRYNVAKVPASPTLSSSAESPEGASLYDEVRAGATSGAGGGSRLYYSFKNITKQHPPPLAQPALSPASSRSVSTSSSSSSGSSSGSSGEDADDLMFDLSLNFSQSAHSASEQQLGGGAAAGNLSLSLVDKDLDSFSEGSLGSHFEFPDYCTPELSEMIAGDWLEANFSDLVFTY

SEQ ID NO: 135301 - DNA, 8737 bp, Artificial Sequence
  derived and/or modified sequence
acctccgcacgagacccagcggcccgggttggagcgtccagccctgcagcggatcatggtgcagcaggcggagagcttggaagcggagagcaacctgccccgggaggcgctggacacggaggagggcgaattcatggcttgcagcccggtggccctggacgagagcgacccagactggtgcaagacggcgtcgggccacatcaagcggccgatgaacgcgttcatggtatggtccaagatcgaacgcaggaagatcatggagcagtctccggacatgcacaacgccgagatctccaagaggctgggcaagcgctggaaaatgctgaaggacagcgagaagatcccgttcatccgggaggcggagcggctgcggctcaagcacatggccgactaccccgactacaagtaccggccccggaaaaagcccaaaatggacccctcggccaagcccagcgccagccagagcccagagaagagcgcggccggcggcggcggcgggagcgcgggcggaggcgcgggcggtgccaagacctccaagggctccagcaagaaatgcggcaagctcaaggcccccgcggccgcgggcgccaaggcgggcgcgggcaaggcggcccagtccggggactacgggggcgcgggcgacgactacgtgctgggcagcctgcgcgtgagcggctcgggcggcggcggcgcgggcaagacggtcaagtgcgtgtttctggatgaggacgacgacgacgacgacgacgacgacgagctgcagctgcagatcaaacaggagccggacgaggaggacgaggaaccaccgcaccagcagctcctgcagccgccggggcagcagccgtcgcagctgctgagacgctacaacgtcgccaaagtgcccgccagccctacgctgagcagctcggcggagtcccccgagggagcgagcctctacgacgaggtgcgggccggcgcgacctcgggcgccgggggcggcagccgcctctactacagcttcaagaacatcaccaagcagcacccgccgccgctcgcgcagcccgcgctgtcgcccgcgtcctcgcgctcggtgtccacctcctcgtccagcagcagcggcagcagcagcggcagcagcggcgaggacgccgacgacctgatgttcgacctgagcttgaatttctctcaaagcgcgcacagcgccagcgagcagcagctggggggcggcgcggcggccgggaacctgtccctgtcgctggtggataaggatttggattcgttcagcgagggcagcctgggctcccacttcgagttccccgactactgcacgccggagctgagcgagatgatcgcgggggactggctggaggcgaacttctccgacctggtgttcacatattgaaaggcgcccgctgctcgctctttctctcggagggtgcagagctgggttccttgggaggaagttgtagtggtgatgatgatgatgataatgatgatgatgatggtggtgttgatggtggcggtggtagggtggaggggagagaagaagatgctgatgatattgataagatgtcgtgacgcaaagaaattggaaaacatgatgaaaattttggtggagttaaagtgaaatgagtagtttttaaacatttttcctgtcctttttttgtcccccctcccttcctttatcgtgtctcaaggtagttgcatacctagtctggagttgtgattattttcccaaaaaatgtgtttttgtaattactatttctttttcctgaaattcgtgattgcaacaaaggcagagggggcggggcgggggaggggaggtaggacccgctccggaaggcgctgtttgaagcttgtcggtctttgaagtctggaagacgtctgcagaggacccttttggcagcacaactgttactctagggagttggtggagatatttttttttcttaagagaacttaaagaactggtgatttttttttaacaaaaaaagggaccattgcaacttttgttaatttaattttttttttttttttttttttttttttttttggagggagaaaactgatgtcttctatgcatccgattcttaacaaaactgcagggagcttgaaaaaatgcagactgtacaaacgcttacaaaaaaaaaaactgtgaactgacttaagatcagagtttacttttcagatcaaattgtttatggttttacaaatgtgatttctacttgccaactttttttttgtaacttgttcccttatacctccttgattgaataccagacagcctagacctcagtacaaaaggtattgaaacatttttgatacataacagacctcagtcttttttaaaaattaatatattttcaggcgtatttttgtacagtgaaaagggaacattcttgctgtgttttttcagtaagactttcaggcacttcttcccttttgatttcttttttttcctctgttttttagcatgcaagtatgttggtacgttatgtcctggtttaaaaaggattaaaattttaaaataatccttgcatctaaaggccttgtggtttaaaaaaaaaaagcaaacttttttttgtacagctatagtagagatttgttcaatatttgtaggtaaagatttattgaaaatggtgatatagacctcagagctgttatcttagtttaaagattgtatatgtactgtactatagtaggactttatgtatctcatacgctgtgatgtggatggggccccagatggaaggtttgaaactggattctcgatttttagcaaaaaagaaaaaaaaaaggcacatagtttaaaaagtttctcattttgtgcaatataatctaaataaagtacagaccatctgcatattttgtagcaaatggtggcaaagcagactcaatgcactgtcgacatcattgcctgtttttttttttttttttttgtgctggaagtctgtatcttgacaattttaataaatcagctggaactgatagaaactcgcatcgccaatagtctctatggaagtcaaactggaggtcctgttgtcgcagagcattcggtggtgaggctgttgtgtgcgcggatgaggggaggtggcaggagagaattctacatttagggggttaggctgaaaagtgttcaattagcaggctgatttctttttcctcttccgctagttgtgaaagacaggggaagggtgttctttctctctgccctccctttccatctccagctccccatttcctttctcacctcctcctccactccctgcctcttctccccacccatcctggcgggcgggctgcgcggaggctcgggagctggccggggaggggcggatggaggggcctgggttgccagctcccttggtcggggtcctgctcgctggggcttgtgtgttctctgcggcgggccgcgtccccgctgagcctcgcggtgacagccgcctttggcagcgagcgctcggggcacttctatccccgcctctcaaagggtggggacagccgtttccagatttgaattttttctgttctttatttttaacgctgcatcttcgcgtgtgctcagaggtggttgttggcggagaacgccgccgcagtgtttgacctctagcggtgaagggggaaggggaagaggaaaggagagaagtggtcggtgtctgtttccttctgtcccccggggccgtggagctgtcggagggaaggaggacggtgcggggccgcagggggcgcggggcgcggcgggacccaggctacgagcgggagggaggcgggagtcgggggaagacgcggcaggccggccgagggcaccccgaggaacatggcatggcctctgtgcgatccgagtcgcggtctccggggtgcctgggagggccgaaccactggtgagggcgtggggagcagggggtggcagagggcacccgggcggtagtccgggacgcgcaaggcagagccctgacgctccgggtccccgtgcctggctcttcttgcctcgccaccgcgtgctcctgggcgcgccccgccgcgggcccttgaggcgcgcggagacaccagcgctggcttcccgggcccgcgggccggggagggaagcctcggggctgcggggtgagaggaagaaagcaaacccggggagcaggcggctgccgcacccgcgcaccccgggccctcaccacgccctccccgcgcgccggctcaggggctgccccggaatcagctccccggggccgccgcaacgaaggtggatccgcatcttgattgttctccgggagcctcctgggggctccggcggcggcgcgggcgcgacccatcccgctggcgctccccgctcgctgaaccccgtttgcctgtccacaccccctcgctccccaccatttttcctgaccggcctgtgtccccgagccctcgcggcaggcccgagcaggcgatcgcggccgggcacgcgcgccccgggctcccgccccccttccgagcatccgccgcctcttttctgctgggtctgggaggagggaggctgggaggccgctcggggcccagcgtgccagccccggagttcagcctcccgagctgcggcgcccgcagcggaggaggttttcagtggctgattgaaactcactgcaaaatcaccacgactctttcacctactgagatgattgaccgaggtttggccttccatttttactgagatttggcgagaccgaatggaagcgtccgcacagtaactgcagctgctaggccagaggggccccggcgcccttcccgcctcccctcccgcttgcttttgccttactcgatcttaccaccacccctcccccggccccccgactgagaactcgggcctctcacccgccccccagcctcccgctctgggcgagcctcctccccagcccccacccctgggatgcgaagccagcaagcttttgctgcagatggacaggtttcttttctgtggctttttcctttcgataaaccatcagatttcagtagtacatttgggaaaagaaggggctgatggcgttaaccaggttctcaatatagaactggatttctggagttgtttaccttaccccacaccccctcaacatgtagactaatgcagccattggtggtacatttattttagccacggataattgaaccagcggtttacaattgacacgtgctccgtgctggtgattttatgtggcagccctctgctgcagttccgaaacttgttggcaacgtaaacccattgataggctgatctatgtattttgaaagcctgaaaacttggcatgtcttttctgttttaatcatagatgaatcttggacattttctgtggtgaggtggaaactttaagtaaattagtaaagtaataatttggcttcagaatgggaagagatagtcaagattttttttttttaaagccatgtggcctaacttgatacaaaaataaaagtaattgtttggcaatctaaatttaaaacctgttagaactcaggacaggcgcttcaatgcgctttttaacaatatttaaggctgttttgatgagtgcgttgtgagaatcatcttaatgaattctttattgagtgtctaaaacatagtataatacacatggtattcttgccactggatagtcttcaataaaagtttaattgatttttttttgttggtctcttaagtaagtcttatttttaactaagcattgacagaatatcttaaaatggtaacctgggggtggcgggtgggtgctgtgtgcacggcagcctagccagtggggatcctgctgtttattataagtagttcacagactctgatggcattttggtaagctttccatctttaagaaattgaaccagcattctcttattaattctttaaactgtggaagtaatttccagttcttacactctgatacgcatcccttttatttaaaaaaaaaaaaaatgctaataaaaggcagtgtacttaaactgtgctttgcaaatattgtgtatgttatgaatgactacagacactgggcaaattatttgtagaatgattatcctttagctagagaaagaaatcattacaactcttttgggcagagatgtttctttttaatgttaatcaaggggaagtgatttaaatatgcataaatgtagcagtcagggtgatttagttgcttttttcatgaaagaaaaagactcaaaagacaagacttatttttctcttctgggacttgaaatcataatcatctgatattagtacagtacaagaaatttacatttgttttttacttcagaatttaagtgacttttgcccaaggaatttgagaaataaggcaaataagttgctctattttaaagtagtcattcaatataaatatattatatcaatcttaacttttttattctctgatatgattaataatatgtatattcttacttttcttctaatgggcatatgtatccttgtggacactttgagagaggttttcttggactctcccatttatagaatctttatactcttttactgtgtggttccctgcttttaacagatttctgaggcaaatatatttgtgcttttttcttatgtaggaagaccagcgaaaatagtttactgagttgtcaattttatcagtagataagaaactttctttattacagtttcagggaagattttttcaggatatttctcagttattctaagggccaaattttgtaaaatttccattaggaatgtcagtttcaaataccctttgtatagcctaagcctgtgaggataacaagaatgagccttacctatcctaacacagggatttacaagttcccaaagtaaccgtctccatgtaactcttgacatacttttctgagatttggcttatttttattattggttatttctcactgttcattctatttgatttattctacaacatccccttttatttaatgatctggaaaattctgctctttgataacaactcaggatttttttgttcagttttggtttttgccccttcctgtggagcctacattttcaaccacaataaagatgaaacaaaatttatgaaactgagctctcttccattttacttactgctggcttttttttttttttttttccttgattcctaccataccttcgtttttttcattgtacttttttaacactacctatatccattagctgcctaattagttttatctgttccatgtggatgcagtgagtttataagagaatttcacaaacaagtagttttttagtgaacttaaaataaacagaattttaaaggagacctatttttatactcaataaaagcacaaaagtgcagaaagtataaaacggcttacaaagggagacacaagctcataatgttccatgtataaaagtaataactttattgggtagagatattcttacaagatctagcacctctgccagtgcacagataggactgttttaaatgatttgggaacttttggttgcctgcagttgtgaacagagaacttctctacagagaaacaaaccactaaaagcaatatgaccgagttgagatgtggtttccaatgagcaattggtgaatttaagcaacctggatgtgcatatgtggaggctcccgtctcactgtttgatcaaacttcttttatgtagtcacgtagacttgattttttctgctgtgaaaatgaaaaaataaagcaatatgacaaaaagtttaaaaatgcataaaaaataggatttcctctaggctcctcgaagagatttttttaatatgatgcttgtcttactttcttagacacgttacatttccccttccaaaaaaaaaaaaaaggacaactggaagtaatttatcatataaagaattttgatcaaatagatattgacaaagggccctctgtcacatttttcttcatccagcttttgttcaaaaacagtatgcctcctcccttgaatcacatagggagaaacgttatactccattctcattaatttcccattttgtctacttttactcttgtacatatgttgtgggtttaagagtcttttgcatttgttctgtgacacctttttttgaattgactgttttaaaacggaggcctattttttccggtttgggactcctagtggttatggcatcccataatgcttcgtgacggccaccaggacagaaccacctgatgttttagagcagttttcagcatgacactgttaacaagtgtgtattttccaaggccacatgaaacttactttcttagccactccaggtttgggagcagaaaagctgaaaaacccttttgtgtagaagtctgagtggtttgtgggggggaccttttttagagtttgcatgccagcgcacggcctattgctgtgaaacagagagaaggtaaagctacctgaggcagtgcgctggaggatgaagtgtttgatagcactaggggggaaagaaaatgcatggcaaagtttcgtcttctcgtagactatctagcatgcagagtgtagtgtgttgaaacggtgtatgacattgctgtatcaaagttgtaaaattaagcattatttattgaaaactatgtatttttttgtaaaaacctgatcacatagagaatatcagtggcttgtgcttgtgcttcgatctaaccagcttcttgacccacccccccttggtatgcagtgttaatgctcagggttgaaaatagtacactccaatgtctcttttgcaagagtttttcacagaggattacatttgttcaaaagactctaataaaattgtgtgatcaatcttcaaaaaaaaaaaaaaaaaaa

SEQ ID NO: 135302 - DNA, 1326 bp, Artificial Sequence
  derived and/or modified sequence
atggtgcagcaggccgagagcctggaggccgagagcaacctgcccagagaggccctggacaccgaggagggcgagttcatggcctgcagccccgtggccctggacgagagcgaccccgactggtgcaagaccgccagcggccacatcaagagacccatgaacgccttcatggtgtggagcaagatcgagagaagaaagatcatggagcagagccccgacatgcacaacgccgagatcagcaagagactgggcaagagatggaagatgctgaaggacagcgagaagatccccttcatcagagaggccgagagactgagactgaagcacatggccgactaccccgactacaagtacagacccagaaagaagcccaagatggaccccagcgccaagcccagcgccagccagagccccgagaagagcgccgccggcggcggcggcggcagcgccggcggcggcgccggcggcgccaagaccagcaagggcagcagcaagaagtgcggcaagctgaaggcccccgccgccgccggcgccaaggccggcgccggcaaggccgcccagagcggcgactacggcggcgccggcgacgactacgtgctgggcagcctgagagtgagcggcagcggcggcggcggcgccggcaagaccgtgaagtgcgtgttcctggacgaggacgacgacgacgacgacgacgacgacgagctgcagctgcagatcaagcaggagcccgacgaggaggacgaggagcccccccaccagcagctgctgcagccccccggccagcagcccagccagctgctgagaagatacaacgtggccaaggtgcccgccagccccaccctgagcagcagcgccgagagccccgagggcgccagcctgtacgacgaggtgagagccggcgccaccagcggcgccggcggcggcagcagactgtactacagcttcaagaacatcaccaagcagcaccccccccccctggcccagcccgccctgagccccgccagcagcagaagcgtgagcaccagcagcagcagcagcagcggcagcagcagcggcagcagcggcgaggacgccgacgacctgatgttcgacctgagcctgaacttcagccagagcgcccacagcgccagcgagcagcagctgggcggcggcgccgccgccggcaacctgagcctgagcctggtggacaaggacctggacagcttcagcgagggcagcctgggcagccacttcgagttccccgactactgcacccccgagctgagcgagatgatcgccggcgactggctggaggccaacttcagcgacctggtgttcacctactag

SEQ ID NO: 135303 - DNA, 1326 bp, Artificial Sequence
  derived and/or modified sequence
atggtccaacaggccgagtccctggaggctgaaagcaatttaccccgggaagccctcgacaccgaagagggagaattcatggcttgcagtccagtagccctggatgaatccgaccctgattggtgcaagaccgcttctggtcatatcaagcgtcccatgaacgccttcatggtatggtccaaaattgaacgtcggaagatcatggaacagagtcctgacatgcacaacgccgaaatttccaagcgattggggaagaggtggaaaatgctgaaggacagcgaaaagatcccttttatcagggaggccgagaggcttcgtttgaaacacatggctgattaccccgactacaaatatcggcctaggaagaagcctaagatggaccctagtgctaagccctccgctagccagtcgccggagaagtcagctgctggtgggggaggaggctccgcaggcggtggagccggcggagctaagacctccaagggaagttcaaaaaaatgtgggaagcttaaagctcctgcggccgctggagccaaagcaggagccgggaaggcagcgcagtctggcgactacgggggtgcaggcgacgactacgtccttggctccttacgggtaagcgggtcgggtggcggcggcgccggtaagacagtgaagtgcgtattccttgacgaggatgatgatgacgacgacgacgacgatgaactccaattacagatcaaacaggaaccagacgaagaggatgaggagcccccacatcagcaactgctgcaaccaccaggtcagcagccatcacagttgcttcggagatacaacgtcgcaaaggtgcccgctagtcctacactgtcaagctcagccgagtctcctgagggggcctcactttatgatgaagtgcgcgccggcgctacctctggcgcaggcgggggctcgcgtctatactactcatttaaaaacataacaaaacagcatccgccaccccttgcccaacctgctctcagccctgcttcttctaggagcgtgagtactagctcctcatcgagttcaggtagttcatctgggagcagcggcgaggatgccgatgatctcatgttcgatctgtctttaaacttctcccagtccgcccactccgcgtccgaacaacaacttggagggggcgctgcagctgggaacctgagcctcagcttagtggacaaggacctggacagtttttctgagggaagccttggctcacactttgagtttcctgactactgtacacctgagttaagcgaaatgattgcaggagactggctcgaggccaatttctccgacctcgtattcacctactag

SEQ ID NO: 135304 - DNA, 1326 bp, Artificial Sequence
  derived and/or modified sequence
atggtgcagcaggccgagagcctggaggccgagagcaacctgccccgggaggccctggacacagaggagggggagttcatggcctgcagccctgtggccctggatgaaagtgaccctgactggtgcaagacagccagcggccacatcaagaggcccatgaatgccttcatggtgtggagcaagattgaaagaaggaagatcatggagcagagcccagacatgcacaatgctgagatcagcaagaggctgggcaagcgctggaagatgctgaaggacagcgagaagatccccttcatccgggaggccgagcggctgcggctgaagcacatggctgactacccagactacaagtaccggcccaggaagaagcccaagatggaccccagcgccaagcccagcgccagccagagccctgagaagtctgctgctgggggcggcggcggcagcgctgggggcggggccggcggggccaagaccagcaagggcagcagcaagaagtgtgggaagctgaaggccccagctgctgctggggccaaggccggggccggcaaggccgcccagagcggggactatggaggagctggagatgattatgtgctgggcagcctgcgggtgtctggcagcggcggcggcggggccggcaagacagtgaagtgtgtgttcctggatgaagatgatgatgatgatgatgatgatgatgagctgcagctgcagatcaagcaggagccagatgaggaggatgaggagcccccccaccagcagctgctgcagcccccaggccagcagcccagccagctgctgcggcgctacaacgtggccaaggtgcctgccagccccaccctgagcagcagcgctgagagccctgagggcgccagcctgtatgatgaggtgcgggccggggccaccagcggggccggcggcggcagccggctgtactacagcttcaagaacatcaccaagcagcaccccccacccctggcccagcctgccctgagccctgccagcagccgctctgtgtccaccagcagcagcagcagcagcggcagcagcagcggcagcagcggggaggatgctgatgacctgatgtttgacctgagcctgaacttcagccagagcgcccacagcgccagcgagcagcagctgggcggcggcgctgctgctggcaacctgagcctgagcctggtggacaaggacctggacagcttcagcgagggcagcctgggcagccactttgagttcccagactactgcaccccagagctgtctgagatgattgctggggactggctggaggccaacttcagtgacctggtgttcacctactag

SEQ ID NO: 135305 - DNA, 1326 bp, Artificial Sequence
  derived and/or modified sequence
atggtgcagcaggccgagagcctggaggccgagagcaacctgcccagagaagcattagataccgaggaaggcgagttcatggcttgtagcccagtggccctggacgagtccgatcccgactggtgtaagacagcaagcggccatatcaagcggcccatgaatgcatttatggtgtggagcaaaattgaacgaagaaagatcatggagcaaagtccagacatgcacaacgctgagatcagtaaaagactcgggaagcgctggaagatgcttaaagactccgagaagatccccttcatacgggaagccgagagactgagactgaaacacatggcggattaccccgattataagtaccgcccccgcaagaaacccaagatggatcctagtgctaagccatccgcatcccagtcccctgagaagtctgcggcaggtgggggcggcggatcggccggcggcggagccggcggggccaagacgtctaaagggtcttccaagaaatgcggcaaacttaaagcacccgcagcggctggcgcgaaggcgggagccggcaaggcagctcagagtggtgattacggcggggctggtgatgactatgtccttggctcactgcgggtcagcgggtctggcggggggggtgccggcaaaactgtcaaatgtgtgtttctggacgaggacgatgacgacgacgacgacgacgatgaactccagctgcagattaagcaggagcctgacgaggaggatgaggagcccccccaccagcagcttctccagccacccggacagcagccgtctcagctgctgaggcggtacaatgtcgctaaagtgcccgcttccccaacactgagcagctcagccgaaagccctgagggggcttctttatacgatgaggtccgagccggggcaacatccggcgctgggggtgggtcccgactttactactcttttaaaaacataactaaacagcatccaccacccctagctcagcctgccttgtcccctgcctcttccaggtccgtcagcacaagcagtagctcatccagcggcagcagctccgggtcttcgggtgaagatgctgacgatttaatgttcgacctctcgctgaacttttctcagtctgctcattctgcgagcgaacagcagctcggcggcggagccgccgctggaaacctgtccctcagtctggtcgacaaggacttggatagtttctcagaaggcagtcttggctctcattttgagttccctgactattgcacgccagaattaagcgaaatgatagcaggcgactggctcgaagcaaacttcagcgatcttgtgttcacatattag

SEQ ID NO: 135306 - DNA, 1326 bp, Artificial Sequence
  derived and/or modified sequence
atggtgcaacaagcagagtcactggaggccgaatctaatctgcccagagaagccttagacactgaagagggtgaatttatggcctgctcacccgtcgctctcgacgagtctgatccagattggtgtaagacagcctccggacatataaagaggcccatgaacgcttttatggtgtggtccaagatcgaacggagaaaaataatggagcaaagtcccgacatgcacaatgctgagatttctaaaaggctggggaaacggtggaaaatgcttaaggattcagaaaagatacccttcatacgcgaggccgagagactgagactcaagcacatggcagactatccagactataagtacagacctaggaaaaagcctaaaatggacccatctgccaagccatctgcctcccagtctccagagaagtctgcagcagggggagggggtggctccgccggaggcggagccggaggcgctaagaccagtaaaggtagctcaaaaaaatgcggaaaactcaaggctccggcagcagcaggagccaaggcgggagctggaaaagccgcacagtctggtgattatggaggggctggagacgactacgtgttgggctctcttcgcgtgtccggctctgggggaggcggtgctggtaagacggttaagtgtgtctttttggatgaggacgacgacgacgatgacgatgacgatgagctgcagcttcagattaagcaggagccggacgaggaagatgaagaacccccacaccaacagctcctccaaccccctgggcagcagccatctcagctcctcaggcgctataacgtggctaaggtgcccgcaagccctacgctcagctccagcgctgaatcgcctgagggcgcttccttgtatgacgaagtacgagccggagccacatccggagcgggtggaggtagccgcttgtactattcgtttaaaaacatcactaaacagcatccaccaccactggcacaaccagcactgagcccagcatcctctaggtcagttagcacatcttcgagcagcagctctggttcaagcagcgggagcagcggtgaggacgcagacgatctcatgttcgatctctcgctcaatttctcacaaagtgcccacagcgccagtgagcagcagttaggcggaggggctgcagctggtaacctcagtctgagcctcgtggataaagatctggactctttcagtgagggctcgctcggaagccacttcgaatttcctgactattgcacgcctgagctgtccgaaatgattgcaggtgactggctggaggccaatttcagcgacttggtctttacctattag

SEQ ID NO: 135307 - DNA, 8718 bp, Artificial Sequence
  derived and/or modified sequence
acctccgcacgagacccagcggcccgggttggagcgtccagccctgcagcggatcatggtgcagcaggcggagagcttggaagcggagagcaacctgccccgggaggcgctggacacggaggagggcgaattcatggcttgcagcccggtggccctggacgagagcgacccagactggtgcaagacggcgtcgggccacatcaagcggccgatgaacgcgttcatggtatggtccaagatcgaacgcaggaagatcatggagcagtctccggacatgcacaacgccgagatctccaagaggctgggcaagcgctggaaaatgctgaaggacagcgagaagatcccgttcatccgggaggcggagcggctgcggctcaagcacatggccgactaccccgactacaagtaccggccccggaaaaagcccaaaatggacccctcggccaagcccagcgccagccagagcccagagaagagcgcggccggcggcggcggcgggagcgcgggcggaggcgcgggcggtgccaagacctccaagggctccagcaagaaatgcggcaagctcaaggcccccgcggccgcgggcgccaaggcgggcgcgggcaaggcggcccagtccggggactacgggggcgcgggcgacgactacgtgctgggcagcctgcgcgtgagcggctcgggcggcggcggcgcgggcaagacggtcaagtgcgtgtttctggatgaggacgacgacgacgacgacgacgacgacgagctgcagctgcagatcaaacaggagccggacgaggaggacgaggaaccaccgcaccagcagctcctgcagccgccggggcagcagccgtcgcagctgctgagacgctacaacgtcgccaaagtgcccgccagccctacgctgagcagctcggcggagtcccccgagggagcgagcctctacgacgaggtgcgggccggcgcgacctcgggcgccgggggcggcagccgcctctactacagcttcaagaacatcaccaagcagcacccgccgccgctcgcgcagcccgcgctgtcgcccgcgtcctcgcgctcggtgtccacctcctcgtccagcagcagcggcagcagcagcggcagcagcggcgaggacgccgacgacctgatgttcgacctgagcttgaatttctctcaaagcgcgcacagcgccagcgagcagcagctggggggcggcgcggcggccgggaacctgtccctgtcgctggtggataaggatttggattcgttcagcgagggcagcctgggctcccacttcgagttccccgactactgcacgccggagctgagcgagatgatcgcgggggactggctggaggcgaacttctccgacctggtgttcacatattgaaaggcgcccgctgctcgctctttctctcggagggtgcagagctgggttccttgggaggaagttgtagtggtgatgatgatgatgataatgatgatgatgatggtggtgttgatggtggcggtggtagggtggaggggagagaagaagatgctgatgatattgataagatgtcgtgacgcaaagaaattggaaaacatgatgaaaattttggtggagttaaagtgaaatgagtagtttttaaacatttttcctgtcctttttttgtcccccctcccttcctttatcgtgtctcaaggtagttgcatacctagtctggagttgtgattattttcccaaaaaatgtgtttttgtaattactatttctttttcctgaaattcgtgattgcaacaaaggcagagggggcggggcgggggaggggaggtaggacccgctccggaaggcgctgtttgaagcttgtcggtctttgaagtctggaagacgtctgcagaggacccttttggcagcacaactgttactctagggagttggtggagatatttttttttcttaagagaacttaaagaactggtgatttttttttaacaaaaaaagggaccattgcaacttttgttaatttaattttttttttttttttttttttttttttttttggagggagaaaactgatgtcttctatgcatccgattcttaacaaaactgcagggagcttgaaaaaatgcagactgtacaaacgcttacaaaaaaaaaaactgtgaactgacttaagatcagagtttacttttcagatcaaattgtttatggttttacaaatgtgatttctacttgccaactttttttttgtaacttgttcccttatacctccttgattgaataccagacagcctagacctcagtacaaaaggtattgaaacatttttgatacataacagacctcagtcttttttaaaaattaatatattttcaggcgtatttttgtacagtgaaaagggaacattcttgctgtgttttttcagtaagactttcaggcacttcttcccttttgatttcttttttttcctctgttttttagcatgcaagtatgttggtacgttatgtcctggtttaaaaaggattaaaattttaaaataatccttgcatctaaaggccttgtggtttaaaaaaaaaaagcaaacttttttttgtacagctatagtagagatttgttcaatatttgtaggtaaagatttattgaaaatggtgatatagacctcagagctgttatcttagtttaaagattgtatatgtactgtactatagtaggactttatgtatctcatacgctgtgatgtggatggggccccagatggaaggtttgaaactggattctcgatttttagcaaaaaagaaaaaaaaaaggcacatagtttaaaaagtttctcattttgtgcaatataatctaaataaagtacagaccatctgcatattttgtagcaaatggtggcaaagcagactcaatgcactgtcgacatcattgcctgtttttttttttttttttttgtgctggaagtctgtatcttgacaattttaataaatcagctggaactgatagaaactcgcatcgccaatagtctctatggaagtcaaactggaggtcctgttgtcgcagagcattcggtggtgaggctgttgtgtgcgcggatgaggggaggtggcaggagagaattctacatttagggggttaggctgaaaagtgttcaattagcaggctgatttctttttcctcttccgctagttgtgaaagacaggggaagggtgttctttctctctgccctccctttccatctccagctccccatttcctttctcacctcctcctccactccctgcctcttctccccacccatcctggcgggcgggctgcgcggaggctcgggagctggccggggaggggcggatggaggggcctgggttgccagctcccttggtcggggtcctgctcgctggggcttgtgtgttctctgcggcgggccgcgtccccgctgagcctcgcggtgacagccgcctttggcagcgagcgctcggggcacttctatccccgcctctcaaagggtggggacagccgtttccagatttgaattttttctgttctttatttttaacgctgcatcttcgcgtgtgctcagaggtggttgttggcggagaacgccgccgcagtgtttgacctctagcggtgaagggggaaggggaagaggaaaggagagaagtggtcggtgtctgtttccttctgtcccccggggccgtggagctgtcggagggaaggaggacggtgcggggccgcagggggcgcggggcgcggcgggacccaggctacgagcgggagggaggcgggagtcgggggaagacgcggcaggccggccgagggcaccccgaggaacatggcatggcctctgtgcgatccgagtcgcggtctccggggtgcctgggagggccgaaccactggtgagggcgtggggagcagggggtggcagagggcacccgggcggtagtccgggacgcgcaaggcagagccctgacgctccgggtccccgtgcctggctcttcttgcctcgccaccgcgtgctcctgggcgcgccccgccgcgggcccttgaggcgcgcggagacaccagcgctggcttcccgggcccgcgggccggggagggaagcctcggggctgcggggtgagaggaagaaagcaaacccggggagcaggcggctgccgcacccgcgcaccccgggccctcaccacgccctccccgcgcgccggctcaggggctgccccggaatcagctccccggggccgccgcaacgaaggtggatccgcatcttgattgttctccgggagcctcctgggggctccggcggcggcgcgggcgcgacccatcccgctggcgctccccgctcgctgaaccccgtttgcctgtccacaccccctcgctccccaccatttttcctgaccggcctgtgtccccgagccctcgcggcaggcccgagcaggcgatcgcggccgggcacgcgcgccccgggctcccgccccccttccgagcatccgccgcctcttttctgctgggtctgggaggagggaggctgggaggccgctcggggcccagcgtgccagccccggagttcagcctcccgagctgcggcgcccgcagcggaggaggttttcagtggctgattgaaactcactgcaaaatcaccacgactctttcacctactgagatgattgaccgaggtttggccttccatttttactgagatttggcgagaccgaatggaagcgtccgcacagtaactgcagctgctaggccagaggggccccggcgcccttcccgcctcccctcccgcttgcttttgccttactcgatcttaccaccacccctcccccggccccccgactgagaactcgggcctctcacccgccccccagcctcccgctctgggcgagcctcctccccagcccccacccctgggatgcgaagccagcaagcttttgctgcagatggacaggtttcttttctgtggctttttcctttcgataaaccatcagatttcagtagtacatttgggaaaagaaggggctgatggcgttaaccaggttctcaatatagaactggatttctggagttgtttaccttaccccacaccccctcaacatgtagactaatgcagccattggtggtacatttattttagccacggataattgaaccagcggtttacaattgacacgtgctccgtgctggtgattttatgtggcagccctctgctgcagttccgaaacttgttggcaacgtaaacccattgataggctgatctatgtattttgaaagcctgaaaacttggcatgtcttttctgttttaatcatagatgaatcttggacattttctgtggtgaggtggaaactttaagtaaattagtaaagtaataatttggcttcagaatgggaagagatagtcaagattttttttttttaaagccatgtggcctaacttgatacaaaaataaaagtaattgtttggcaatctaaatttaaaacctgttagaactcaggacaggcgcttcaatgcgctttttaacaatatttaaggctgttttgatgagtgcgttgtgagaatcatcttaatgaattctttattgagtgtctaaaacatagtataatacacatggtattcttgccactggatagtcttcaataaaagtttaattgatttttttttgttggtctcttaagtaagtcttatttttaactaagcattgacagaatatcttaaaatggtaacctgggggtggcgggtgggtgctgtgtgcacggcagcctagccagtggggatcctgctgtttattataagtagttcacagactctgatggcattttggtaagctttccatctttaagaaattgaaccagcattctcttattaattctttaaactgtggaagtaatttccagttcttacactctgatacgcatcccttttatttaaaaaaaaaaaaaatgctaataaaaggcagtgtacttaaactgtgctttgcaaatattgtgtatgttatgaatgactacagacactgggcaaattatttgtagaatgattatcctttagctagagaaagaaatcattacaactcttttgggcagagatgtttctttttaatgttaatcaaggggaagtgatttaaatatgcataaatgtagcagtcagggtgatttagttgcttttttcatgaaagaaaaagactcaaaagacaagacttatttttctcttctgggacttgaaatcataatcatctgatattagtacagtacaagaaatttacatttgttttttacttcagaatttaagtgacttttgcccaaggaatttgagaaataaggcaaataagttgctctattttaaagtagtcattcaatataaatatattatatcaatcttaacttttttattctctgatatgattaataatatgtatattcttacttttcttctaatgggcatatgtatccttgtggacactttgagagaggttttcttggactctcccatttatagaatctttatactcttttactgtgtggttccctgcttttaacagatttctgaggcaaatatatttgtgcttttttcttatgtaggaagaccagcgaaaatagtttactgagttgtcaattttatcagtagataagaaactttctttattacagtttcagggaagattttttcaggatatttctcagttattctaagggccaaattttgtaaaatttccattaggaatgtcagtttcaaataccctttgtatagcctaagcctgtgaggataacaagaatgagccttacctatcctaacacagggatttacaagttcccaaagtaaccgtctccatgtaactcttgacatacttttctgagatttggcttatttttattattggttatttctcactgttcattctatttgatttattctacaacatccccttttatttaatgatctggaaaattctgctctttgataacaactcaggatttttttgttcagttttggtttttgccccttcctgtggagcctacattttcaaccacaataaagatgaaacaaaatttatgaaactgagctctcttccattttacttactgctggcttttttttttttttttttccttgattcctaccataccttcgtttttttcattgtacttttttaacactacctatatccattagctgcctaattagttttatctgttccatgtggatgcagtgagtttataagagaatttcacaaacaagtagttttttagtgaacttaaaataaacagaattttaaaggagacctatttttatactcaataaaagcacaaaagtgcagaaagtataaaacggcttacaaagggagacacaagctcataatgttccatgtataaaagtaataactttattgggtagagatattcttacaagatctagcacctctgccagtgcacagataggactgttttaaatgatttgggaacttttggttgcctgcagttgtgaacagagaacttctctacagagaaacaaaccactaaaagcaatatgaccgagttgagatgtggtttccaatgagcaattggtgaatttaagcaacctggatgtgcatatgtggaggctcccgtctcactgtttgatcaaacttcttttatgtagtcacgtagacttgattttttctgctgtgaaaatgaaaaaataaagcaatatgacaaaaagtttaaaaatgcataaaaaataggatttcctctaggctcctcgaagagatttttttaatatgatgcttgtcttactttcttagacacgttacatttccccttccaaaaaaaaaaaaaaggacaactggaagtaatttatcatataaagaattttgatcaaatagatattgacaaagggccctctgtcacatttttcttcatccagcttttgttcaaaaacagtatgcctcctcccttgaatcacatagggagaaacgttatactccattctcattaatttcccattttgtctacttttactcttgtacatatgttgtgggtttaagagtcttttgcatttgttctgtgacacctttttttgaattgactgttttaaaacggaggcctattttttccggtttgggactcctagtggttatggcatcccataatgcttcgtgacggccaccaggacagaaccacctgatgttttagagcagttttcagcatgacactgttaacaagtgtgtattttccaaggccacatgaaacttactttcttagccactccaggtttgggagcagaaaagctgaaaaacccttttgtgtagaagtctgagtggtttgtgggggggaccttttttagagtttgcatgccagcgcacggcctattgctgtgaaacagagagaaggtaaagctacctgaggcagtgcgctggaggatgaagtgtttgatagcactaggggggaaagaaaatgcatggcaaagtttcgtcttctcgtagactatctagcatgcagagtgtagtgtgttgaaacggtgtatgacattgctgtatcaaagttgtaaaattaagcattatttattgaaaactatgtatttttttgtaaaaacctgatcacatagagaatatcagtggcttgtgcttgtgcttcgatctaaccagcttcttgacccacccccccttggtatgcagtgttaatgctcagggttgaaaatagtacactccaatgtctcttttgcaagagtttttcacagaggattacatttgttcaaaagactctaataaaattgtgtgatcaatcttc

SEQ ID NO: 135308 - protein, 613 aa, Artificial Sequence
  derived and/or modified sequence
MSDPQTSMAATAAVSPSDYLQPAASTTQDSQPSPLALLAATCSKIGPPAVEAAVTPPAPPQPTPRKLVPIKPAPLPLSPGKNSFGILSSKGNILQIQGSQLSASYPGGQLVFAIQNPTMINKGTRSNANIQYQAVPQIQASNSQTIQVQPNLTNQIQIIPGTNQAIITPSPSSHKPVPIKPAPIQKSSTTTTPVQSGANVVKLTGGGGNVTLTLPVNNLVNASDTGAPTQLLTESPPTPLSKTNKKARKKSLPASQPPVAVAEQVETVLIETTADNIIQAGNNLLIVQSPGGGQPAVVQQVQVVPPKAEQQQVVQIPQQALRVVQAASATLPTVPQKPSQNFQIQAAEPTPTQVYIRTPSGEVQTVLVQDSPPATAAATSNTTCSSPASRAPHLSGTSKKHSAAILRKERPLPKIAPAGSIISLNAAQLAAAAQAMQTININGVQVQGVPVTITNTGGQQQLTVQNVSGNNLTISGLSPTQIQLQMEQALAGETQPGEKRRRMACTCPNCKDGEKRSGEQGKKKHVCHIPDCGKTFRKTSLLRAHVRLHTGERPFVCNWFFCGKRFTRSDELQRHARTHTGDKRFECAQCQKRFMRSDHLTKHYKTHLVTKNL

SEQ ID NO: 135309 - DNA, 3132 bp, Artificial Sequence
  derived and/or modified sequence
aatgttccaagcgcttattggtgaaggctgccgtcgctcgggcggtggcgggctccgggattggcggttgcttggcgggcggtgtcaggctctcggtggcggcggaggcggcggaggccagggaggaagatgtcgtaatgagcgatccacagaccagcatggctgccactgctgctgtgagtcccagtgactacctgcagcctgccgcctccaccacccaggactcccagccatctcccttagccctgcttgctgcaacatgtagcaaaattggccctccagcagttgaagctgctgtgacacctcctgctcccccacagcccacaccgcggaaacttgtccctatcaaacctgcccctctccctctcagccccggcaagaatagctttggaatcttgtcctccaaaggaaatatacttcagattcaggggtcacaactgagcgcctcctatcctggagggcagctggtgttcgctatccagaatcccaccatgatcaacaaagggacccgatcaaatgccaatatccagtaccaggcggtccctcagattcaggcaagcaattcccaaaccatccaagtacagcccaatctcaccaaccagatccagatcatccctggcaccaaccaagccatcatcaccccctcaccgtccagtcacaagcctgtccccatcaagccagcccccatccagaagtcgagtacgaccaccacccccgtgcagagcggggccaatgtggtgaagctgacaggtgggggcggcaatgtgacgctcactctgcccgtcaacaaccttgtgaacgccagtgacaccggggcccctactcagctcctcactgaaagccccccaaccccgctgtctaagactaacaagaaagcaaggaagaagagccttcctgcctcccagccccctgtggctgtggctgagcaggtggagacggtgctgatcgagaccaccgcggacaacatcatccaggcaggaaataacctgctcattgttcagagccctggtgggggccagccagctgtggtccagcaggtccaggtggtgccccccaaggccgagcagcagcaggtggtacagatcccccagcaggctctgcgggtggtgcaggcggcatctgccaccctccccactgtaccccagaagccctcccagaactttcagatccaggcagctgagccgacacctactcaggtctacatccgcacgccttccggtgaggtgcagacagtccttgtccaggacagccccccagcaacagctgcagccacctctaacaccacctgtagcagccctgcatcccgtgctccccatctgagtgggaccagcaaaaagcactcagctgcaattctccgaaaagagcgtcccctgccaaagattgccccagccgggagcatcatcagcctgaatgcagcccagttggcggcagctgcccaggcaatgcagaccatcaacatcaatggtgtccaggtccagggcgtgcctgtcaccatcaccaacacaggcgggcagcagcagctgacagtgcagaatgtttctgggaacaacctgaccatcagtgggctgagccccacccagatccagctgcaaatggaacaagccctggccggagagacccagcccggggagaagcggcgccgcatggcctgcacgtgtcccaactgcaaggatggggagaagaggtctggagagcagggcaagaagaagcacgtgtgccacatccccgactgtggcaagacgttccgtaagacgtccttgctgcgtgcccatgtgcgcctgcacactggcgagcggccctttgtctgcaactggttcttctgtgggaagaggttcacacggagtgacgagctccaacggcatgctcgcacccacacaggggacaaacgcttcgagtgcgcccagtgtcagaagcgcttcatgaggagtgaccacctcaccaagcattacaagacccacctggtcacgaagaacttgtaaggccaactgcggcgggaggccctgaagatgcagtcccccacctgtgtcctccctgggcccctggtggaaaggagccctgtggctgccttgggcctgccctcagccccactcctgttctgcaactgtccccacaggaaggggctctgttccctgtattgtcctccttctgaagccccttggctctgccttggcccttcccctcaccacgagctcccggcctgcccagactgtggacactggccgtgcccaatgagacgttctaaaccaggacgcgtgggaacccttatttccaaaggaaaaacatgcatttcactccgtcgaggagcaaagtgagcccctaccccccaccccgatccccgctcccaacactgccggagtcgcgtcatgccatgccccctctcctgcacctccctggccctgccggccactgtggacgccctggggcttggcacccacctctggagaaactcggggccacctccactccatgtgcccagccccgccacaacctctcctccagcacattccagctctatttaaaaagtaaagacacccaccgactcctgatccccctctttttctatggagaacgttgccttatactctacttcagatgatgaacactgtgtactgtgtgtgctttaaagaagttttatttaattgctcccttcttcctttccttgttattcacctccctgatgcctgctttcagttgagggttgggggcaatgatgagcatatgaattttttctcactctagcaattcccttttctaaatgacacagcatttaaactcaaatctggattcagataacagcacctgcacatcctgcacctcctccctctcccttcacctcacccctgcccggcccaagctctacttgtgtacagtgtatattgtataatagacaattgtgtctactacatgtttaaaaacacattgcttgttatttttgaggcttttaaattaaacaaaaatccaactttatttttagttgtaactgcttgaggtatgttttatgaattaagtgacagatttgttatcctttattaacgtactttgttggtcagcactgggctgacaaaaattttttcttgctaataaatttagttgcctgaggcaaaatcttcaaaaaaaaaaaaaaaaaaaaaa

SEQ ID NO: 135310 - DNA, 1842 bp, Artificial Sequence
  derived and/or modified sequence
atgagcgacccgcagacctccatggcagccactgcggctgtatccccaagtgactacttgcagcccgccgcttccactacacaggatagccagccaagccccttggcgctcctggctgcaacgtgctccaagattggccctccagccgtggaagccgctgtgacgcctcctgccccaccccagccgacccctcggaagcttgtcccaatcaaacctgcccccttgccactgtcacctggcaagaattcatttgggatccttagcagtaagggcaacatactccagatccagggctcccagctgagcgcctcataccccggggggcagctggtctttgcaattcagaatcccaccatgatcaacaaaggtacccggagcaacgccaacatccagtaccaagccgtcccacagatacaagcatcaaactcacagacaatccaagttcaacccaatttgaccaatcagattcaaatcatccccggtacaaaccaagccattatcacacccagcccctcgagccacaaaccggtgccgattaaacccgccccaatacagaaatcatcgacaacgaccaccccagttcagtccggggccaatgtggtgaagctcactggcggcggcggaaatgtgaccttgacactgcccgtgaacaatcttgtaaacgcatccgacacaggcgctcccactcagctgctcaccgaaagccctcccacccccctgtccaagaccaacaagaaggcaagaaagaagagtcttcccgctagccagccaccagtcgctgtagctgagcaggtggagaccgtgctgatcgaaacgacggccgataacattatacaggcaggaaacaacctgctgatcgttcagagtcctggcggcggccagcccgccgttgtgcaacaggttcaagtggtccctccgaaagcggagcagcaacaggttgtgcagataccccagcaggcgctgcgggtggtgcaggccgcaagtgcgactctacctactgttccgcagaaaccctcacaaaatttccaaatccaggccgctgagccgacccccactcaggtatacatacggacaccctctggcgaggtccagactgtcttagtacaagatagcccccctgcaactgcggctgccacatcgaacacaacctgcagctcaccggccagccgggccccccatctttctggtactagcaaaaaacactcagctgccattctccggaaggagcgaccactccccaagattgctcccgccggctctatcattagcctaaatgccgcccagttggcagccgccgcccaggcaatgcagacgataaatatcaacggagtgcaggtccagggtgtgcccgtgaccatcacgaacactggcggccagcagcagctcactgtgcagaatgtgtccggcaacaacctgactatctcaggactgtcacctacccagatccagttgcagatggagcaggctctcgccggggagacccagcccggggaaaaacgccgtaggatggcttgcacttgtcctaactgtaaggacggagagaaacggagtggcgaacagggcaagaaaaagcacgtgtgtcatatccctgactgcggcaagacgtttagaaagacgtctttactgcgggcacatgtgagactgcacactggcgagcgtccattcgtctgtaattggttcttctgtggcaagcgattcaccaggagcgatgagctgcagcgccatgcacgcacacatactggagacaaaaggttcgaatgtgcgcaatgtcagaagcgcttcatgcgtagcgatcatttgactaaacactataaaacacacctggtgactaaaaacctgtag

SEQ ID NO: 135311 - DNA, 1842 bp, Artificial Sequence
  derived and/or modified sequence
atgtctgacccccagacctccatggccgccacagctgctgtgagccccagcgactacctgcagcctgctgccagcaccacccaggacagccagcccagccccctggccctgctggccgccacctgcagcaagattggccccccagctgtggaggccgctgtgaccccaccagccccaccccagcccacccccaggaagctggtgcccatcaagccagcccccctgcccctgagccctgggaagaacagctttggcatcctgagcagcaagggcaacatcctgcagatccagggcagccagctgagcgccagctacccaggcggccagctggtgtttgccatccagaaccccaccatgatcaacaagggcaccaggagcaatgccaacatccagtaccaggccgtgccccagatccaggccagcaacagccagaccatccaggtgcagcccaacctgaccaaccagatccagatcatccctggcaccaaccaggccatcatcacccccagccccagcagccacaagcctgtgcccatcaagccagcccccatccagaagagcagcaccaccaccacccctgtgcagagcggggccaacgtggtgaagctgaccggcggcggcggcaatgtgaccctgaccctgcctgtgaacaacctggtgaatgccagtgacacaggagcccccacccagctgctgacagagagcccccccacccccctgagcaagaccaacaagaaggccaggaagaagagcctgcctgccagccagccccctgtggccgtggccgagcaggtggagaccgtgctgattgagaccacagctgacaacatcatccaggccggcaacaacctgctgattgtgcagagccctgggggcggccagcctgctgtggtgcagcaggtgcaggtggtgccccccaaggccgagcagcagcaggtggtgcagatcccccagcaggccctgcgggtggtgcaggccgccagcgccaccctgcccaccgtgccccagaagcccagccagaacttccagatccaggccgctgagcccacccccacccaggtgtacatccgcacccccagcggggaggtgcagacagtgctggtgcaggacagccccccagccacagctgctgccaccagcaacaccacctgcagcagccctgccagccgggccccccacctgagcggcaccagcaagaagcacagcgctgccatcctgaggaaggagcggcccctgcccaagatcgccccagctggcagcatcatcagcctgaatgctgcccagctggccgccgccgcccaggccatgcagaccatcaacatcaacggggtgcaggtgcagggcgtgcctgtgaccatcaccaacacaggaggccagcagcagctgactgtgcagaatgtgtctggcaacaacctgaccatcagcggcctgagccccacccagatccagctgcagatggagcaggccctggccggggagacccagcccggggagaagagaagaaggatggcctgcacctgccccaactgcaaggatggagagaagaggtctggagagcagggcaagaagaagcacgtgtgccacatcccagactgtgggaagaccttcaggaagaccagcctgctgcgggcccacgtgcggctgcacactggagagcggccctttgtgtgcaactggttcttctgtgggaagcgcttcaccaggagtgatgagctgcagagacatgcccggacccacactggagacaagagatttgaatgtgcccagtgccagaagcgcttcatgagaagtgaccacctgaccaagcactacaagacccacctggtgaccaagaacctgtag

SEQ ID NO: 135312 - DNA, 1842 bp, Artificial Sequence
  derived and/or modified sequence
atgagcgacccccagaccagcatggccgccaccgccgccgtgagcccctctgattatttacagcctgccgcctccaccacacaggatagtcagccctctcccctggctcttctggctgccacatgctcaaaaatcgggccgccagctgtggaagccgccgtcacccccccagcaccaccgcagcctacacctcggaagctggtaccaataaaacccgcacctctgcccctgtcacctggcaaaaatagcttcggaattctgtcctccaagggaaacattctgcagatccaaggctctcagctcagtgccagctatcccggaggtcagctggtgtttgccatccaaaacccgaccatgatcaacaagggaacacgctctaatgctaacatacagtaccaggccgtgccacaaattcaggccagtaattcccagactatccaggtgcaaccaaatctgaccaaccagatacagattatacccggaacgaaccaggcaattatcacgcctagccctagcagtcacaaacccgttccgatcaaacccgcccccatccagaagtcaagcacgacaacgactccagtgcagtctggggcaaacgtggtgaaattaacaggaggagggggcaacgttaccctgactctgcctgtgaataatctcgtgaacgcttctgacaccggcgcccctactcaactgctgacagaatcaccccctaccccactgagcaagaccaacaagaaggcccgcaagaagtcccttcctgccagccagccgcctgtggccgtggcagagcaggtcgagactgttctgatagagacaacggcagacaatatcatccaggctggtaacaacctgctgatagtgcaaagtcccgggggcggccagccagctgttgtgcagcaagtgcaggtggtgccccctaaggctgagcagcaacaggtggtccagattccccagcaggcactgagagtggtgcaggccgcttcagctacgcttcccactgtaccacagaagccatcccagaactttcaaatccaggccgccgagcccactcccactcaggtttatatccgaaccccatccggtgaagtgcagacagtactggtccaggacagccctccagccaccgccgcagcaacaagcaatactacatgtagctctccggcctctcgcgccccccacttatctggaacctcaaagaaacattcagctgcaatcctgaggaaagagagacctttgccaaagatagctcccgccgggagcatcatctcactcaacgctgcacagttagcagctgctgctcaggcaatgcaaacgataaatataaatggcgtgcaagtgcagggtgtaccagtaacaatcacaaatactggcggacaacaacaattgaccgttcagaacgtgagcggaaacaacctcactatcagtgggcttagccccacccagatccagttgcagatggaacaggctttggctggggagactcagccaggagaaaagcgtaggcgaatggcttgcacatgccctaactgcaaagacggagagaaacgcagcggcgagcaggggaaaaagaagcatgtgtgccacattccagactgtggtaagaccttcagaaagacatcgttactgcgtgcgcatgtgagactgcacacaggcgaaaggccgtttgtctgtaattggttcttctgcggaaagcgctttacccggtcagacgagctccagcggcacgcccgtacccacacaggggataagcggttcgagtgtgcgcagtgccagaagcgcttcatgagatccgatcacctgactaagcattacaagacacatctagtgaccaagaacctgtag

SEQ ID NO: 135313 - DNA, 908 bp, Artificial Sequence
  derived and/or modified sequence
aatgttccaagcgcttattggtgaaggctgccgtcgctcgggcggtggcgggctccgggattggcggttgcttggcgggcggtgtcaggctctcggtggcggcggaggcggcggaggccagggaggaagatgtcgtaatgagcgatccacagaccagcatggctgccactgctgctgtgagtcccagtgactacctgcagcctgccgcctccaccacccaggactcccagccatctcccttagccctgcttgctgcaacatgtagcaaaattggccctccagcagttgaagctgctgtgacacctcctgctcccccacagcccacaccgcggaaacttgtccctatcaaacctgcccctctccctctcagccccggcaagaatagctttggaatcttgtcctccaaaggaaatatacttcagattcaggggtcacaactgagcgcctcctatcctggagggcagctggtgttcgctatccagaatcccaccatgatcaacaaagggacccgatcaaatgccaatatccagtaccaggcggtccctcagattcaggcaagcaattcccaaaccatccaagtacagcccaatctcaccaaccagatccagatcatccctggcaccaaccaagccatcatcaccccctcaccgtccagtcacaagcctgtccccatcaagccagcccccatccagaagtcgagtacgaccaccacccccgtgcagagcggggccaatgtggtgaagctgacaggtgggggcggcaatgtgacgctcactctgcccgtcaacaaccttgtgaacgccagtgacaccggggcccctactcagctcctcactgcttcctgccaaactgggatgctgaattcaacaagaatgttcttatttttggcatttattaatgtgctctaa

SEQ ID NO: 135314 - DNA, 3112 bp, Artificial Sequence
  derived and/or modified sequence
aatgttccaagcgcttattggtgaaggctgccgtcgctcgggcggtggcgggctccgggattggcggttgcttggcgggcggtgtcaggctctcggtggcggcggaggcggcggaggccagggaggaagatgtcgtaatgagcgatccacagaccagcatggctgccactgctgctgtgagtcccagtgactacctgcagcctgccgcctccaccacccaggactcccagccatctcccttagccctgcttgctgcaacatgtagcaaaattggccctccagcagttgaagctgctgtgacacctcctgctcccccacagcccacaccgcggaaacttgtccctatcaaacctgcccctctccctctcagccccggcaagaatagctttggaatcttgtcctccaaaggaaatatacttcagattcaggggtcacaactgagcgcctcctatcctggagggcagctggtgttcgctatccagaatcccaccatgatcaacaaagggacccgatcaaatgccaatatccagtaccaggcggtccctcagattcaggcaagcaattcccaaaccatccaagtacagcccaatctcaccaaccagatccagatcatccctggcaccaaccaagccatcatcaccccctcaccgtccagtcacaagcctgtccccatcaagccagcccccatccagaagtcgagtacgaccaccacccccgtgcagagcggggccaatgtggtgaagctgacaggtgggggcggcaatgtgacgctcactctgcccgtcaacaaccttgtgaacgccagtgacaccggggcccctactcagctcctcactgaaagccccccaaccccgctgtctaagactaacaagaaagcaaggaagaagagccttcctgcctcccagccccctgtggctgtggctgagcaggtggagacggtgctgatcgagaccaccgcggacaacatcatccaggcaggaaataacctgctcattgttcagagccctggtgggggccagccagctgtggtccagcaggtccaggtggtgccccccaaggccgagcagcagcaggtggtacagatcccccagcaggctctgcgggtggtgcaggcggcatctgccaccctccccactgtaccccagaagccctcccagaactttcagatccaggcagctgagccgacacctactcaggtctacatccgcacgccttccggtgaggtgcagacagtccttgtccaggacagccccccagcaacagctgcagccacctctaacaccacctgtagcagccctgcatcccgtgctccccatctgagtgggaccagcaaaaagcactcagctgcaattctccgaaaagagcgtcccctgccaaagattgccccagccgggagcatcatcagcctgaatgcagcccagttggcggcagctgcccaggcaatgcagaccatcaacatcaatggtgtccaggtccagggcgtgcctgtcaccatcaccaacacaggcgggcagcagcagctgacagtgcagaatgtttctgggaacaacctgaccatcagtgggctgagccccacccagatccagctgcaaatggaacaagccctggccggagagacccagcccggggagaagcggcgccgcatggcctgcacgtgtcccaactgcaaggatggggagaagaggtctggagagcagggcaagaagaagcacgtgtgccacatccccgactgtggcaagacgttccgtaagacgtccttgctgcgtgcccatgtgcgcctgcacactggcgagcggccctttgtctgcaactggttcttctgtgggaagaggttcacacggagtgacgagctccaacggcatgctcgcacccacacaggggacaaacgcttcgagtgcgcccagtgtcagaagcgcttcatgaggagtgaccacctcaccaagcattacaagacccacctggtcacgaagaacttgtaaggccaactgcggcgggaggccctgaagatgcagtcccccacctgtgtcctccctgggcccctggtggaaaggagccctgtggctgccttgggcctgccctcagccccactcctgttctgcaactgtccccacaggaaggggctctgttccctgtattgtcctccttctgaagccccttggctctgccttggcccttcccctcaccacgagctcccggcctgcccagactgtggacactggccgtgcccaatgagacgttctaaaccaggacgcgtgggaacccttatttccaaaggaaaaacatgcatttcactccgtcgaggagcaaagtgagcccctaccccccaccccgatccccgctcccaacactgccggagtcgcgtcatgccatgccccctctcctgcacctccctggccctgccggccactgtggacgccctggggcttggcacccacctctggagaaactcggggccacctccactccatgtgcccagccccgccacaacctctcctccagcacattccagctctatttaaaaagtaaagacacccaccgactcctgatccccctctttttctatggagaacgttgccttatactctacttcagatgatgaacactgtgtactgtgtgtgctttaaagaagttttatttaattgctcccttcttcctttccttgttattcacctccctgatgcctgctttcagttgagggttgggggcaatgatgagcatatgaattttttctcactctagcaattcccttttctaaatgacacagcatttaaactcaaatctggattcagataacagcacctgcacatcctgcacctcctccctctcccttcacctcacccctgcccggcccaagctctacttgtgtacagtgtatattgtataatagacaattgtgtctactacatgtttaaaaacacattgcttgttatttttgaggcttttaaattaaacaaaaatccaactttatttttagttgtaactgcttgaggtatgttttatgaattaagtgacagatttgttatcctttattaacgtactttgttggtcagcactgggctgacaaaaattttttcttgctaataaatttagttgcctgaggcaaaatcttcaa

SEQ ID NO: 135315 - DNA, 1842 bp, Artificial Sequence
  derived and/or modified sequence
atgagcgatccccagacctccatggctgccactgctgcggtgtccccttccgactatttgcaacccgctgcctcgacgacccaggattcccaaccaagccctctagcgcttctcgccgcaacatgttcaaagattggccctcccgcagtcgaagccgctgtgactccacctgccccacctcagcctacccccagaaaattggtacctatcaagcctgcccctcttcccctgagccctgggaaaaacagctttgggatactgagttcgaaaggaaatattctccagatccaaggatcgcagctgagcgcatcctacccgggtggacagctggtatttgcaatccaaaatcctactatgattaataaaggcactagatccaatgctaatattcagtaccaggcagttccccagattcaggccagcaattcgcaaacgattcaggtgcaaccaaatctgactaaccaaattcagattattcctggaaccaatcaggctattattaccccttcaccgtcatcccacaagccagtgccaattaagcctgccccaatccagaagtcctccacaacgaccacacccgtgcagtccggtgcgaatgtggtgaagctcaccggcggaggaggtaatgtgacactcacccttcctgtgaataacctggttaatgcttcagacacgggcgctcccacccaactcctcaccgagtctccacccaccccactctccaaaacgaacaagaaagcaagaaaaaagtccctgcccgcaagtcaaccgccagtggctgtggccgaacaggttgaaacggtgttgatagagactacagcagataacatcatccaagcaggcaataatctgctcatagtgcaaagtccaggcggaggtcagcctgctgtggttcagcaggtgcaagtggtgcctcccaaggccgaacagcagcaggtggtgcagatcccacagcaggcactgcgggttgtgcaggccgcttctgccacgcttcccaccgtcccccagaagccatcccagaatttccagatccaggctgcagaacctactcccacccaggtgtacatacgaacaccttcaggagaggtgcagacggtactggttcaggattcgcctccagcaacagcagcagcaacctctaatactacttgtagctcacctgcctccagagccccacatctctcaggcaccagcaagaagcattctgccgctattctgcggaaagagagacctctcccgaaaattgctccagccggatccattattagcctgaatgccgcacagttggccgctgccgcacaggcaatgcagaccatcaatattaatggcgtccaggtccagggagtcccagttactatcactaacaccgggggacagcagcagctaaccgtgcagaacgtcagcggcaacaacctcacaataagcggattgtctcccacccagatccagctacaaatggagcaggccctggccggagagacccagcccggagagaagaggcgtagaatggcttgtacgtgtccaaactgtaaggatggcgagaaacgctcgggtgagcaggggaaaaaaaaacacgtttgccatatacccgattgtgggaaaaccttccggaagactagtctattacgggcacacgttaggctgcatactggcgagcggcctttcgtgtgcaactggtttttctgtggcaagcggtttacaaggtctgacgagctgcaaaggcacgccagaactcataccggcgataaaaggtttgagtgtgcccagtgccagaaaaggttcatgaggagtgatcacttaacgaagcactacaaaacacatctagtgaccaagaatctatag

SEQ ID NO: 135316 - DNA, 1842 bp, Artificial Sequence
  derived and/or modified sequence
atgagcgacccccagaccagcatggccgccaccgccgccgtgagccccagcgactacctgcagcccgccgccagcaccacccaggacagccagcccagccccctggccctgctggccgccacctgcagcaagatcggcccccccgccgtggaggccgccgtgaccccccccgcccccccccagcccacccccagaaagctggtgcccatcaagcccgcccccctgcccctgagccccggcaagaacagcttcggcatcctgagcagcaagggcaacatcctgcagatccagggcagccagctgagcgccagctaccccggcggccagctggtgttcgccatccagaaccccaccatgatcaacaagggcaccagaagcaacgccaacatccagtaccaggccgtgccccagatccaggccagcaacagccagaccatccaggtgcagcccaacctgaccaaccagatccagatcatccccggcaccaaccaggccatcatcacccccagccccagcagccacaagcccgtgcccatcaagcccgcccccatccagaagagcagcaccaccaccacccccgtgcagagcggcgccaacgtggtgaagctgaccggcggcggcggcaacgtgaccctgaccctgcccgtgaacaacctggtgaacgccagcgacaccggcgcccccacccagctgctgaccgagagcccccccacccccctgagcaagaccaacaagaaggccagaaagaagagcctgcccgccagccagccccccgtggccgtggccgagcaggtggagaccgtgctgatcgagaccaccgccgacaacatcatccaggccggcaacaacctgctgatcgtgcagagccccggcggcggccagcccgccgtggtgcagcaggtgcaggtggtgccccccaaggccgagcagcagcaggtggtgcagatcccccagcaggccctgagagtggtgcaggccgccagcgccaccctgcccaccgtgccccagaagcccagccagaacttccagatccaggccgccgagcccacccccacccaggtgtacatcagaacccccagcggcgaggtgcagaccgtgctggtgcaggacagcccccccgccaccgccgccgccaccagcaacaccacctgcagcagccccgccagcagagccccccacctgagcggcaccagcaagaagcacagcgccgccatcctgagaaaggagagacccctgcccaagatcgcccccgccggcagcatcatcagcctgaacgccgcccagctggccgccgccgcccaggccatgcagaccatcaacatcaacggcgtgcaggtgcagggcgtgcccgtgaccatcaccaacaccggcggccagcagcagctgaccgtgcagaacgtgagcggcaacaacctgaccatcagcggcctgagccccacccagatccagctgcagatggagcaggccctggccggcgagacccagcccggcgagaagagaagaagaatggcctgcacctgccccaactgcaaggacggcgagaagagaagcggcgagcagggcaagaagaagcacgtgtgccacatccccgactgcggcaagaccttcagaaagaccagcctgctgagagcccacgtgagactgcacaccggcgagagacccttcgtgtgcaactggttcttctgcggcaagagattcaccagaagcgacgagctgcagagacacgccagaacccacaccggcgacaagagattcgagtgcgcccagtgccagaagagattcatgagaagcgaccacctgaccaagcactacaagacccacctggtgaccaagaacctgtag

SEQ ID NO: 135317 - protein, 781 aa, Artificial Sequence
  derived and/or modified sequence
MTAPEKPVKQEEMAALDVDSGGGGGGGGGHGEYLQQQQQHGNGAVAAAAAAQDTQPSPLALLAATCSKIGPPSPGDDEEEAAAAAGAPAAAGATGDLASAQLGGAPNRWEVLSATPTTIKDEAGNLVQIPSAATSSGQYVLPLQNLQNQQIFSVAPGSDSSNGTVSSVQYQVIPQIQSADGQQVQIGFTGSSDNGGINQESSQIQIIPGSNQTLLASGTPSANIQNLIPQTGQVQVQGVAIGGSSFPGQTQVVANVPLGLPGNITFVPINSVDLDSLGLSGSSQTMTAGINADGHLINTGQAMDSSDNSERTGERVSPDINETNTDTDLFVPTSSSSQLPVTIDSTGILQQNTNSLTTSSGQVHSSDLQGNYIQSPVSEETQAQNIQVSTAQPVVQHLQLQESQQPTSQAQIVQGITPQTIHGVQASGQNISQQALQNLQLQLNPGTFLIQAQTVTPSGQVTWQTFQVQGVQNLQNLQIQNTAAQQITLTPVQTLTLGQVAAGGAFTSTPVSLSTGQLPNLQTVTVNSIDSAGIQLHPGENADSPADIRIKEEEPDPEEWQLSGDSTLNTNDLTHLRVQVVDEEGDQQHQEGKRLRRVACTCPNCKEGGGRGTNLGKKKQHICHIPGCGKVYGKTSHLRAHLRWHSGERPFVCNWMYCGKRFTRSDELQRHRRTHTGEKKFVCPECSKRFMRSDHLAKHIKTHQNKKGIHSSSTVLASVEAARDDTLITAGGTTLILANIQQGSVSGIGTVNTSATSNQDILTNTEIPLQLVTVSGNETME

SEQ ID NO: 135318 - protein, 713 aa, Artificial Sequence
  derived and/or modified sequence
IGPPSPGDDEEEAAAAAGAPAAAGATGDLASAQLGGAPNRWEVLSATPTTIKDEAGNLVQIPSAATSSGQYVLPLQNLQNQQIFSVAPGSDSSNGTVSSVQYQVIPQIQSADGQQVQIGFTGSSDNGGINQESSQIQIIPGSNQTLLASGTPSANIQNLIPQTGQVQVQGVAIGGSSFPGQTQVVANVPLGLPGNITFVPINSVDLDSLGLSGSSQTMTAGINADGHLINTGQAMDSSDNSERTGERVSPDINETNTDTDLFVPTSSSSQLPVTIDSTGILQQNTNSLTTSSGQVHSSDLQGNYIQSPVSEETQAQNIQVSTAQPVVQHLQLQESQQPTSQAQIVQGITPQTIHGVQASGQNISQQALQNLQLQLNPGTFLIQAQTVTPSGQVTWQTFQVQGVQNLQNLQIQNTAAQQITLTPVQTLTLGQVAAGGAFTSTPVSLSTGQLPNLQTVTVNSIDSAGIQLHPGENADSPADIRIKEEEPDPEEWQLSGDSTLNTNDLTHLRVQVVDEEGDQQHQEGKRLRRVACTCPNCKEGGGRGTNLGKKKQHICHIPGCGKVYGKTSHLRAHLRWHSGERPFVCNWMYCGKRFTRSDELQRHRRTHTGEKKFVCPECSKRFMRSDHLAKHIKTHQNKKGIHSSSTVLASVEAARDDTLITAGGTTLILANIQQGSVSGIGTVNTSATSNQDILTNTEIPLQLVTVSGNETME

SEQ ID NO: 135319 - DNA, 3548 bp, Artificial Sequence
  derived and/or modified sequence
agccggggcccccgccgccgccggagcgacaggtgatttggcttctgcacagttaggaggagcaccaaaccgatgggaggttttgtcagccacacctacaactataaaagatgaagctggtaatctagtccagattccaagtgctgctacttcaagtgggcagtatgttcttccccttcagaatttgcagaatcaacaaatattttccgttgcaccaggatcagattcatcaaatggtgcagtgtccagtgttcaatatcaagtgataccacagatccagtcagcagatggtcagcaggttcaaattggtttcacaggctcttcagataatgggggtataaatcaagaaagcagtcaaattcagatcattcctggctctaatcaaaccttacttgcctctggaacaccttctgctaacatccagaatctcataccacagactggtcaagtccaggttcagggagttgcaattggtggttcatcttttcctggtcaaacccaagtagttgctaatgtgcctcttggtctgccaggaaatattacgtttgtaccaatcaatagtgtcgatctagattctttgggactctcgggcagttctcagacaatgactgcaggcattaatgccgacggacatttgataaacacaggacaagctatggatagttcagacaattcagaaaggactggtgagcgggtttctcctgatattaatgaaactaatactgatacagatttatttgtgccaacatcctcttcatcacagttgcctgttacgatagatagtacaggtatattacaacaaaacacaaatagcttgactacatctagtgggcaggttcattcttcagatcttcagggaaattatatccagtcgcctgtttctgaagagacacaggcacagaatattcaggtttctacagcacagcctgttgtacagcatctacaacttcaagagtctcagcagccaaccagtcaagcccaaattgtgcaaggtattacaccacagacaatccatggtgtgcaagccagtggtcaaaatatatcacaacaggctttgcaaaatcttcagttgcagctgaatcctggaacctttttaattcaggcacagacagtgaccccttctggacaggtaacttggcaaacgtttcaagtacaaggggtccagaacttgcagaatttgcaaatacagaatactgctgcccaacaaataactctgacgcctgttcaaaccctcacacttggtcaagttgcggcaggtggagccttcacttcaactccagttagtctaagcactggtcagttgccaaatctacaaacagttacagtgaactctatagattctgctggtatacagctacatccaggagagaatgctgacagtcctgcagatattaggatcaaggaagaagaacctgatcctgaagagtggcagctcagtggtgattctaccttgaataccaatgacctaacacacttaagagtacaggtggtagatgaagaaggggaccaacaacatcaagaaggaaaaagacttcggagggtagcttgcacctgtcccaactgtaaagaaggtggtggaagaggtaccaatcttgggaaaaagaagcaacacatttgtcatataccaggatgtggtaaagtctatgggaagacctcacatctgagagctcatctgcgttggcattctggagaacgcccttttgtttgtaactggatgtactgtggtaaaagatttactcgaagtgatgaattacagaggcacagaagaacacatacaggtgagaagaaatttgtttgtccagaatgttcaaaacgctttatgagaagtgaccaccttgccaaacatattaaaacacaccagaataaaaaaggtattcactctagcagtacagtgctggcatctgtggaagctgcgcgagatgatactttgattactgcaggaggaacaacgcttatccttgcaaagattcaacaaggttctgtttcagggataggaactgttaatacttccgccaccagcaatcaagatatccttaccaacactgaaatacctttacagcttgtcacagtttctggaaatgagacaatggagtaaatattacacaaatacttattcattgtggttatttttatacagtagtgagaagaatattgttcctaagttcttagatatctttttattgatgtgcaaaaatttttggattgacagtaacttggttatacatgacactgaaatgccttactttgtatgatattccatagtatattaaaaatggtaaaattgcatgggttttgtaggtacttttggaatctagaagaaatgaaattttaccaagttatataaagagaaaattgaatttaacaatgcgaatggtagtctaaccaaatgcatcaatcctgtgtggtttagtgtaaaaatgagaacatgttggtatttatctattgtaagataaaaaagctggtgggtgaaagaaatcatgttatgataaaaaattttgtaattttcttgatgactggaatttttattatgcataactgacaaatcaagtttccaagcaaatgttacatagtgtaggctttacttagcttatcaatttgtcattttgaagctaattattttaattaggttaactatgtacaatattttaagcattactcttgtaagattttgaaaactacattttaacatggaactctagggatagtcaccttttaaatcctgttgaaaagccatgtttaagatttaatttgccaaaataatgtcttgttaatattctttcaataacgaagttgggcaatataaccaatgtttaaaaaagtttaaaatgtataagttgaggcatttgggtggtaagagaatgttatagtgaattatcccttttcttgactattggaggaccaaaaaataaggtgtattgcgtcttagcagtgattttatccaatcttgtttccaaaaaccatggtctcccagggccttaaaagccatcatgtaaattaccagtaaagtgtaacatatgcaaacataacaaaatcacttccatagtgacgatactccaaccatatggatattagtcatagaagaactagaggttttatgatatttttttaagtcttttttttttgtctaggtagtcagtctgcacttaaatatcaatcattttccttttttgcttcttcccttaaaatttatatgtatccagtacatttaattgagaagcgtatgttttttattatgctgtattttctttttattttttaattattgtttatattttcaattcaaaaatgtacaaaataaagttacattgctggtctgtgtaagagctatacagttttcctaaatgtatacctgtaactgcagcagttcacctatttgcaaaaatttggaattctgttcatttgttattcttaagaccacctcaaatttaaaggctaccttattgtacgtttaaagtgtattataacagtgtggtagttaataaaacactatttttttttcttttgaaaaaaaaaaaaaaaaaaaaaaaaaaaaaaaaaaaaaaaaaaaa

SEQ ID NO: 135320 - DNA, 2346 bp, Artificial Sequence
  derived and/or modified sequence
atgaccgcccccgagaagcccgtgaagcaggaggagatggccgccctggacgtggacagcggcggcggcggcggcggcggcggcggccacggcgagtacctgcagcagcagcagcagcacggcaacggcgccgtggccgccgccgccgccgcccaggacacccagcccagccccctggccctgctggccgccacctgcagcaagatcggcccccccagccccggcgacgacgaggaggaggccgccgccgccgccggcgcccccgccgccgccggcgccaccggcgacctggccagcgcccagctgggcggcgcccccaacagatgggaggtgctgagcgccacccccaccaccatcaaggacgaggccggcaacctggtgcagatccccagcgccgccaccagcagcggccagtacgtgctgcccctgcagaacctgcagaaccagcagatcttcagcgtggcccccggcagcgacagcagcaacggcaccgtgagcagcgtgcagtaccaggtgatcccccagatccagagcgccgacggccagcaggtgcagatcggcttcaccggcagcagcgacaacggcggcatcaaccaggagagcagccagatccagatcatccccggcagcaaccagaccctgctggccagcggcacccccagcgccaacatccagaacctgatcccccagaccggccaggtgcaggtgcagggcgtggccatcggcggcagcagcttccccggccagacccaggtggtggccaacgtgcccctgggcctgcccggcaacatcaccttcgtgcccatcaacagcgtggacctggacagcctgggcctgagcggcagcagccagaccatgaccgccggcatcaacgccgacggccacctgatcaacaccggccaggccatggacagcagcgacaacagcgagagaaccggcgagagagtgagccccgacatcaacgagaccaacaccgacaccgacctgttcgtgcccaccagcagcagcagccagctgcccgtgaccatcgacagcaccggcatcctgcagcagaacaccaacagcctgaccaccagcagcggccaggtgcacagcagcgacctgcagggcaactacatccagagccccgtgagcgaggagacccaggcccagaacatccaggtgagcaccgcccagcccgtggtgcagcacctgcagctgcaggagagccagcagcccaccagccaggcccagatcgtgcagggcatcaccccccagaccatccacggcgtgcaggccagcggccagaacatcagccagcaggccctgcagaacctgcagctgcagctgaaccccggcaccttcctgatccaggcccagaccgtgacccccagcggccaggtgacctggcagaccttccaggtgcagggcgtgcagaacctgcagaacctgcagatccagaacaccgccgcccagcagatcaccctgacccccgtgcagaccctgaccctgggccaggtggccgccggcggcgccttcaccagcacccccgtgagcctgagcaccggccagctgcccaacctgcagaccgtgaccgtgaacagcatcgacagcgccggcatccagctgcaccccggcgagaacgccgacagccccgccgacatcagaatcaaggaggaggagcccgaccccgaggagtggcagctgagcggcgacagcaccctgaacaccaacgacctgacccacctgagagtgcaggtggtggacgaggagggcgaccagcagcaccaggagggcaagagactgagaagagtggcctgcacctgccccaactgcaaggagggcggcggcagaggcaccaacctgggcaagaagaagcagcacatctgccacatccccggctgcggcaaggtgtacggcaagaccagccacctgagagcccacctgagatggcacagcggcgagagacccttcgtgtgcaactggatgtactgcggcaagagattcaccagaagcgacgagctgcagagacacagaagaacccacaccggcgagaagaagttcgtgtgccccgagtgcagcaagagattcatgagaagcgaccacctggccaagcacatcaagacccaccagaacaagaagggcatccacagcagcagcaccgtgctggccagcgtggaggccgccagagacgacaccctgatcaccgccggcggcaccaccctgatcctggccaacatccagcagggcagcgtgagcggcatcggcaccgtgaacaccagcgccaccagcaaccaggacatcctgaccaacaccgagatccccctgcagctggtgaccgtgagcggcaacgagaccatggagtag

SEQ ID NO: 135321 - DNA, 2217 bp, Artificial Sequence
  derived and/or modified sequence
tgacccgagaagcccgtgaagcaggaggagatggccgccctggacgtggacagcggcggcggcggcggcggcggcggcggccacggcgagtacctgcagcagcagcagcagcacggcaacggcgccgtggccgccgccgccgccgcccagaccggcgacctggccagcgcccagctgggcggcgcccccaacagatgggaggtgctgagcgccacccccaccaccatcaaggacgaggccggcaacctggtgcagatccccagcgccgccaccagcagcggccagtacgtgctgcccctgcagaacctgcagaaccagcagatcttcagcgtggcccccggcagcgacagcagcaacggcaccgtgagcagcgtgcagtaccaggtgatcccccagatccagagcgccgacggccagcaggtgcagatcggcttcaccggcagcagcgacaacggcggcatcaaccaggagagcagccagatccagatcatccccggcagcaaccagaccctgctggccagcggcacccccagcgccaacatccagaacctgatcccccagaccggccaggtgcaggtgcagggcgtggccatcggcggcagcagcttccccggccagacccaggtggtggccaacgtgcccctgggcctgcccggcaacatcaccttcgtgcccatcaacagcgtggacctggacagcctgggcctgagcggcagcagccagaccatgaccgccggcatcaacgccgacggccacctgatcaacaccggccaggccatggacagcagcgacaacagcgagagaaccggcgagagagtgagccccgacatcaacgagaccaacaccgacaccgacctgttcgtgcccaccagcagcagcagccagctgcccgtgaccatcgacagcaccggcatcctgcagcagaacaccaacagcctgaccaccagcagcggccaggtgcacagcagcgacctgcagggcaactacatccagagccccgtgagcgaggagacccaggcccagaacatccaggtgagcaccgcccagcccgtggtgcagcacctgcagctgcaggagagccagcagcccaccagccaggcccagatcgtgcagggcatcaccccccagaccatccacggcgtgcaggccagcggccagaacatcagccagcaggccctgcagaacctgcagctgcagctgaaccccggcaccttcctgatccaggcccagaccgtgacccccagcggccaggtgacctggcagaccttccaggtgcagggcgtgcagaacctgcagaacctgcagatccagaacaccgccgcccagcagatcaccctgacccccgtgcagaccctgaccctgggccaggtggccgccggcggcgccttcaccagcacccccgtgagcctgagcaccggccagctgcccaacctgcagaccgtgaccgtgaacagcatcgacagcgccggcatccagctgcaccccggcgagaacgccgacagccccgccgacatcagaatcaaggaggaggagcccgaccccgaggagtggcagctgagcggcgacagcaccctgaacaccaacgacctgacccacctgagagtgcaggtggtggacgaggagggcgaccagcagcaccaggagggcaagagactgagaagagtggcctgcacctgccccaactgcaaggagggcggcggcagaggcaccaacctgggcaagaagaagcagcacatctgccacatccccggctgcggcaaggtgtacggcaagaccagccacctgagagcccacctgagatggcacagcggcgagagacccttcgtgtgcaactggatgtactgcggcaagagattcaccagaagcgacgagctgcagagacacagaagaacccacaccggcgagaagaagttcgtgtgccccgagtgcagcaagagattcatgagaagcgaccacctggccaagcacatcaagacccaccagaacaagaagggcatccacagcagcagcaccgtgctggccagcgtggaggccgccagagacgacaccctgatcaccgccggcggcaccaccctgatcctggccaacatccagcagggcagcgtgagcggcatcggcaccgtgaacaccagcgccaccagcaaccaggacatcctgaccaacaccgagatccccctgcagctggtgaccgtgagcggcaacgagaccatggagtag

SEQ ID NO: 135322 - DNA, 2142 bp, Artificial Sequence
  derived and/or modified sequence
atcggcccccccagccccggcgacgacgaggaggaggccgccgccgccgccggcgcccccgccgccgccggcgccaccggcgacctggccagcgcccagctgggcggcgcccccaacagatgggaggtgctgagcgccacccccaccaccatcaaggacgaggccggcaacctggtgcagatccccagcgccgccaccagcagcggccagtacgtgctgcccctgcagaacctgcagaaccagcagatcttcagcgtggcccccggcagcgacagcagcaacggcaccgtgagcagcgtgcagtaccaggtgatcccccagatccagagcgccgacggccagcaggtgcagatcggcttcaccggcagcagcgacaacggcggcatcaaccaggagagcagccagatccagatcatccccggcagcaaccagaccctgctggccagcggcacccccagcgccaacatccagaacctgatcccccagaccggccaggtgcaggtgcagggcgtggccatcggcggcagcagcttccccggccagacccaggtggtggccaacgtgcccctgggcctgcccggcaacatcaccttcgtgcccatcaacagcgtggacctggacagcctgggcctgagcggcagcagccagaccatgaccgccggcatcaacgccgacggccacctgatcaacaccggccaggccatggacagcagcgacaacagcgagagaaccggcgagagagtgagccccgacatcaacgagaccaacaccgacaccgacctgttcgtgcccaccagcagcagcagccagctgcccgtgaccatcgacagcaccggcatcctgcagcagaacaccaacagcctgaccaccagcagcggccaggtgcacagcagcgacctgcagggcaactacatccagagccccgtgagcgaggagacccaggcccagaacatccaggtgagcaccgcccagcccgtggtgcagcacctgcagctgcaggagagccagcagcccaccagccaggcccagatcgtgcagggcatcaccccccagaccatccacggcgtgcaggccagcggccagaacatcagccagcaggccctgcagaacctgcagctgcagctgaaccccggcaccttcctgatccaggcccagaccgtgacccccagcggccaggtgacctggcagaccttccaggtgcagggcgtgcagaacctgcagaacctgcagatccagaacaccgccgcccagcagatcaccctgacccccgtgcagaccctgaccctgggccaggtggccgccggcggcgccttcaccagcacccccgtgagcctgagcaccggccagctgcccaacctgcagaccgtgaccgtgaacagcatcgacagcgccggcatccagctgcaccccggcgagaacgccgacagccccgccgacatcagaatcaaggaggaggagcccgaccccgaggagtggcagctgagcggcgacagcaccctgaacaccaacgacctgacccacctgagagtgcaggtggtggacgaggagggcgaccagcagcaccaggagggcaagagactgagaagagtggcctgcacctgccccaactgcaaggagggcggcggcagaggcaccaacctgggcaagaagaagcagcacatctgccacatccccggctgcggcaaggtgtacggcaagaccagccacctgagagcccacctgagatggcacagcggcgagagacccttcgtgtgcaactggatgtactgcggcaagagattcaccagaagcgacgagctgcagagacacagaagaacccacaccggcgagaagaagttcgtgtgccccgagtgcagcaagagattcatgagaagcgaccacctggccaagcacatcaagacccaccagaacaagaagggcatccacagcagcagcaccgtgctggccagcgtggaggccgccagagacgacaccctgatcaccgccggcggcaccaccctgatcctggccaacatccagcagggcagcgtgagcggcatcggcaccgtgaacaccagcgccaccagcaaccaggacatcctgaccaacaccgagatccccctgcagctggtgaccgtgagcggcaacgagaccatggagtag

SEQ ID NO: 135323 - DNA, 2187 bp, Artificial Sequence
  derived and/or modified sequence
atggccgccctggacgtggacagcggcggcggcggcggcggcggcggcggccacggcgagtacctgcagcagcagcagcagcacggcaacggcgccgtggccgccgccgccgccgcccagaccggcgacctggccagcgcccagctgggcggcgcccccaacagatgggaggtgctgagcgccacccccaccaccatcaaggacgaggccggcaacctggtgcagatccccagcgccgccaccagcagcggccagtacgtgctgcccctgcagaacctgcagaaccagcagatcttcagcgtggcccccggcagcgacagcagcaacggcaccgtgagcagcgtgcagtaccaggtgatcccccagatccagagcgccgacggccagcaggtgcagatcggcttcaccggcagcagcgacaacggcggcatcaaccaggagagcagccagatccagatcatccccggcagcaaccagaccctgctggccagcggcacccccagcgccaacatccagaacctgatcccccagaccggccaggtgcaggtgcagggcgtggccatcggcggcagcagcttccccggccagacccaggtggtggccaacgtgcccctgggcctgcccggcaacatcaccttcgtgcccatcaacagcgtggacctggacagcctgggcctgagcggcagcagccagaccatgaccgccggcatcaacgccgacggccacctgatcaacaccggccaggccatggacagcagcgacaacagcgagagaaccggcgagagagtgagccccgacatcaacgagaccaacaccgacaccgacctgttcgtgcccaccagcagcagcagccagctgcccgtgaccatcgacagcaccggcatcctgcagcagaacaccaacagcctgaccaccagcagcggccaggtgcacagcagcgacctgcagggcaactacatccagagccccgtgagcgaggagacccaggcccagaacatccaggtgagcaccgcccagcccgtggtgcagcacctgcagctgcaggagagccagcagcccaccagccaggcccagatcgtgcagggcatcaccccccagaccatccacggcgtgcaggccagcggccagaacatcagccagcaggccctgcagaacctgcagctgcagctgaaccccggcaccttcctgatccaggcccagaccgtgacccccagcggccaggtgacctggcagaccttccaggtgcagggcgtgcagaacctgcagaacctgcagatccagaacaccgccgcccagcagatcaccctgacccccgtgcagaccctgaccctgggccaggtggccgccggcggcgccttcaccagcacccccgtgagcctgagcaccggccagctgcccaacctgcagaccgtgaccgtgaacagcatcgacagcgccggcatccagctgcaccccggcgagaacgccgacagccccgccgacatcagaatcaaggaggaggagcccgaccccgaggagtggcagctgagcggcgacagcaccctgaacaccaacgacctgacccacctgagagtgcaggtggtggacgaggagggcgaccagcagcaccaggagggcaagagactgagaagagtggcctgcacctgccccaactgcaaggagggcggcggcagaggcaccaacctgggcaagaagaagcagcacatctgccacatccccggctgcggcaaggtgtacggcaagaccagccacctgagagcccacctgagatggcacagcggcgagagacccttcgtgtgcaactggatgtactgcggcaagagattcaccagaagcgacgagctgcagagacacagaagaacccacaccggcgagaagaagttcgtgtgccccgagtgcagcaagagattcatgagaagcgaccacctggccaagcacatcaagacccaccagaacaagaagggcatccacagcagcagcaccgtgctggccagcgtggaggccgccagagacgacaccctgatcaccgccggcggcaccaccctgatcctggccaacatccagcagggcagcgtgagcggcatcggcaccgtgaacaccagcgccaccagcaaccaggacatcctgaccaacaccgagatccccctgcagctggtgaccgtgagcggcaacgagaccatggagtag

SEQ ID NO: 135324 - DNA, 2346 bp, Artificial Sequence
  derived and/or modified sequence
atgaccgcccctgagaaacccgtcaagcaagaggagatggcagccctggacgtggattctgggggaggcggtggtggcgggggaggccacggcgagtatctgcagcaacaacagcagcacggaaatggcgcagtcgccgcagcagcggcagcccaggacacccagccctccccactggccctcctggcagcaacatgttctaagatcgggcctccttccccaggggatgatgaggaggaagcagcagctgccgccggagctccagctgccgctggcgctacaggagacttggcaagcgctcagttaggcggggcacccaaccggtgggaggtgctgtctgctacaccaactacaatcaaagacgaagccgggaacttagtccagatcccttcagccgcgacttcatctggacagtacgtacttccgctgcagaatctgcagaatcaacagatcttctcagtagctcccggttccgacagcagtaacgggaccgtgagttcagttcaatatcaggtcataccccagatccaatcagcggatggccaacaagttcagattgggtttacaggtagttcagataacggcggcattaaccaagaaagctcacagatccagatcatcccgggaagtaatcagacgctcctggccagcgggactccctctgcgaacatccagaatctaattccccaaacaggccaggtccaggtacagggagtggctatcggaggctcgagcttcccgggtcaaactcaggtcgtggctaatgttccgctaggccttccaggcaatattacgtttgttccaataaattctgttgacctcgacagtctggggcttagcggctccagccagacaatgacagccggcattaacgccgatggtcatctaattaacactggacaagcaatggattcaagcgataacagcgagagaactggggaaagggttagccctgacatcaatgagactaacaccgatacggatttgtttgtgcctacatcttctagctcccagctgccagtcaccatcgacagtactgggatcctccagcagaatactaactcactgacaaccagtagtggtcaggtgcattccagcgatctacaagggaattatattcagagccctgtatctgaagaaacacaagctcagaatatccaggtgtccacggctcagccagtggttcagcacctccaactgcaagaatcgcagcagccgacctcccaggctcaaatagtgcagggtatcacccctcagaccatccacggcgttcaggcctccgggcaaaatatctcccagcaggccttgcagaatctgcagttacaactcaaccccgggaccttcctgatccaggcacagactgttacaccatccggtcaagtcacctggcagacatttcaggtgcagggggtccagaacctgcaaaacttgcaaatccaaaacacggctgcacagcaaatcaccctgactccagtgcaaactttgaccctcggccaggtcgccgccggcggagcttttacatctacacctgtttccctgtccactggccagctccctaacctacagaccgtgactgtaaattccatcgattccgctggcatccagctgcacccaggcgaaaacgctgatagtcccgccgatatccggatcaaggaagaagagccagatcccgaagaatggcagctgagtggggattcgacactcaacaccaacgatctgacccatctgcgcgtccaggttgtcgatgaggagggtgaccaacagcatcaggaagggaagaggctcagaagagtggcctgcacctgccccaattgcaaagagggcggagggaggggcactaatttaggtaaaaagaagcagcatatctgtcacattcccggctgcgggaaagtgtatggcaaaacctcccatctcagagcacacttgagatggcacagtggcgagcgccccttcgtctgcaactggatgtactgtggcaagcgcttcaccaggagcgatgagctccagcgacaccgcagaacccatacgggggagaaaaaattcgtgtgtcctgaatgtagtaagcggttcatgcgctccgaccacctcgccaagcacatcaagacacatcagaataaaaaaggcatccactcttccagtactgtgctcgcctctgtcgaagccgctagagacgacacccttattactgcggggggcacaactcttatcttagccaacattcagcaggggagtgttagtgggatcggtaccgtcaacacctctgctacctccaaccaggatatactgaccaataccgagatccctcttcagcttgttaccgtgtcaggcaacgaaaccatggagtag

SEQ ID NO: 135325 - DNA, 2217 bp, Artificial Sequence
  derived and/or modified sequence
tgacctgagaagccagttaaacaagaagagatggcagcattagacgtggattcaggaggtgggggtggtggaggcgggggccatggggaatatctccaacagcagcaacagcatggcaatggcgctgttgcagccgcggccgccgcccagacaggcgacctagcctccgcgcagttagggggggccccgaataggtgggaggtgctcagtgctacgccaacgaccatcaaagacgaagctggtaacctagttcaaatcccatctgccgccaccagctccggacaatacgtgctgcctctccagaatctgcaaaaccagcagatttttagcgtcgcccctggcagcgatagtagcaatgggaccgtctcttctgtacagtaccaggtgataccccagatccaatccgccgacgggcagcaggtacagatagggtttactggatcctccgacaatggcggaatcaatcaggagagttcacaaatccagattattcctgggtccaatcagactctgctggccagcggtacaccatcagccaacattcagaaccttatccctcagaccggacaggtccaagtccaaggggtcgccatcgggggatcttcttttcccgggcaaacacaagtcgtggccaacgtgcccctgggcctgcccggaaacatcacctttgtgcccattaattcggtagatctagactctctggggctaagtggaagctctcagactatgaccgctggtatcaatgctgacggccaccttattaacactggccaggccatggacagctctgataatagtgagcgcaccggcgagagagttagcccagacatcaatgaaacgaataccgatactgacctatttgttccaacgtcctcctccagccagcttcccgttaccatcgattctactggcatcctgcaacagaacaccaattccctcacgacgagtagtggccaggtccatagtagcgacttacagggtaattacattcaaagcccagtctccgaagagactcaggcccagaatatccaggtctctacagcccagccagtggtgcagcacttgcagctccaagaaagccagcagcccacctctcaggcgcaaattgtgcagggaatcaccccgcagacgattcacggggtacaggcaagcggacagaatatatcccagcaggccctccagaatctccagctccagctgaacccagggacatttctgatacaggcacagactgtgaccccatccggccaggtgacctggcagacatttcaggtgcagggcgtgcagaacctgcagaacttacagatccagaacactgccgctcagcagatcacactgactcctgttcagacactcactttggggcaggtagccgccgggggggcgttcaccagcacgcccgttagtctgtccaccgggcagcttcccaatctgcagacggtcacagtcaactcgatcgactctgccggcatccagttgcacccaggagaaaatgccgatagcccggccgatattcggattaaggaagaggagcccgatcccgaggaatggcagttgtccggtgatagcacgctgaacaccaacgatcttacacatcttcgtgtccaggtcgttgatgaggagggcgaccagcagcaccaggagggaaagaggttaaggcgtgtggcatgcacgtgccctaactgtaaagagggcggcgggcggggcacaaatctcggcaagaagaaacagcacatctgtcatatccctggatgcggtaaggtctatggtaagacttcccacttaagggcccacctgagatggcattccggcgagcggccttttgtctgcaactggatgtactgtggaaagcgcttcacccggtcagatgaactgcagcgacatcgaaggacccacaccggcgaaaaaaagtttgtgtgtcccgaatgcagcaagaggtttatgcggtccgatcatctggctaaacacattaagacccaccaaaacaaaaaagggattcattcttcatccacagtcctggcaagcgttgaggccgccagggatgataccctgattacagccggaggcactacgttaatccttgccaacatccagcagggatcggtgtctggcatcggcaccgtcaataccagtgctacctctaatcaggacattttaacaaacacggaaattccccttcaactggtcaccgtttctggaaatgaaactatggagtag

SEQ ID NO: 135326 - DNA, 2142 bp, Artificial Sequence
  derived and/or modified sequence
attgggccaccctcacctggggatgacgaagaggaggcagcagccgcggcaggtgcccccgccgccgcaggcgctactggagatctcgcatcagcgcaactcgggggcgcaccaaacagatgggaggttctatcggccactcccaccacaattaaggatgaggctggtaacctggttcagataccgtcagcggctacttcttcgggccagtatgtattgccactacagaacctacagaatcaacagatcttttccgttgcgcctggctcagattcgagtaacggtacagtgtcaagcgttcagtaccaggtaatcccgcagattcagtctgccgatggccagcaggtgcaaatcgggttcaccggcagttctgataatggtggcataaaccaggaatcaagtcagatccagataataccaggaagtaatcagaccttactggcctctggaacgccaagcgccaacatccaaaatttgataccacagacgggccaggttcaggtgcagggtgtggccattggaggcagctcattcccgggacagactcaggttgtcgccaacgtgcctctcggacttcccggtaacatcacattcgtccctatcaatagcgtggatttggacagcttgggactgagcggatcctcccagacgatgacagctggtatcaatgctgacgggcacttgatcaatactggtcaggcaatggacagttccgacaattccgaacgcaccggcgaacgggtttcacctgacattaacgagactaataccgatactgatctgtttgtcccaacctcctccagttctcagttacctgtcactatcgatagcacagggattttgcagcagaatacgaactctctgactacctcgagcggacaagtccacagtagtgatctccagggcaattacatacagagccccgtgtctgaagaaacccaggctcagaacattcaagttagcactgcccagcctgtggtccaacacctccagctgcaggagtcccagcagccaacctcacaagcccagattgtccaaggtattactccacagacaattcacggggtacaggccagtggtcagaatattagccagcaggctctgcagaaccttcagttacagctaaacccaggcacctttctgatccaagcacagactgttaccccaagcggccaggtgacctggcagaccttccaggtacagggagtccagaatttgcagaatctgcagatccagaatacggccgcccagcagattactcttactcccgtgcagaccctcacactgggacaggtcgcagcaggaggcgcctttacttctactccagtttcgctgagcacaggccaactgcctaacctgcagaccgtcaccgtgaacagcattgattcagcgggtatccaacttcaccctggggagaacgcagactcccctgccgatatcaggatcaaagaggaggagccagacccagaggagtggcagctgagtggggactcaacactgaacaccaacgatctcacccatctccgggtgcaagtcgtcgatgaagaaggggatcagcagcatcaggagggaaaaaggctcagacgcgttgcttgtacctgtcctaactgcaaagaaggggggggacgaggtaccaatttgggcaaaaagaaacagcacatttgccacataccaggctgcggaaaggtctacggaaaaacctctcacctcagagcccacctcagatggcacagcggagagcgtccttttgtctgcaactggatgtattgcggcaaacgctttacccgtagcgatgaattgcaacggcaccgccggacccacaccggagagaagaagtttgtatgtcccgagtgtagtaaacgcttcatgcgctctgatcatctggcaaagcacataaaaacgcaccagaataagaagggtattcattcctcatccactgtgctggcatctgttgaggctgcccgtgatgatacactgattacagccggcggtaccaccctcatactggccaacattcagcaagggtctgtctcaggaatcggcaccgtcaacacatctgctacctctaaccaggacatcctcacaaataccgagatccctcttcagttggtcaccgtcagcggcaatgaaaccatggaatag

SEQ ID NO: 135327 - DNA, 2187 bp, Artificial Sequence
  derived and/or modified sequence
atggctgctcttgacgttgacagtggcggcggtgggggtggcggcggcggacatggtgagtacctacaacagcaacagcagcacggcaacggggccgtcgctgctgccgcagctgcacagaccggggatctcgcctctgctcagttggggggcgctccgaaccgttgggaagtcctgtctgcaacacccaccaccatcaaggacgaggcggggaatctcgtgcagatcccttctgctgctacatcgtccggccagtacgtgttgccactccagaacctgcaaaaccagcaaatcttctccgtggcaccaggctccgactcttctaacgggacagtgtcttctgtccaataccaggtgatcccacagatccaatcggcggatggacagcaggttcagatcgggttcacaggctccagcgacaatggaggcattaaccaggagagttcccagatccaaatcatccctggaagtaatcagaccttactagcctcaggcacaccatccgccaatatccagaatttgatcccccaaacgggccaagtgcaggtgcagggcgtcgccatagggggttccagttttccaggtcagacgcaggtggtggctaatgtgcctttaggcctcccaggtaacataacgttcgtccctattaatagcgtcgatcttgacagcctcggcctctctggttccagtcagacaatgactgctggtattaacgccgatggacaccttattaacacaggccaagctatggattcaagcgataatagtgaaaggactggagagcgtgtttcacccgatatcaacgagacaaacacagacaccgacctgtttgtgcccacaagctcatcctcgcagttacctgtgaccatcgacagcacaggtatccttcagcaaaatactaacagtttgactactagctctggacaggtccattcctccgatctgcaggggaattatatacagtctcctgtgtctgaggagacccaggctcaaaatatccaggtttcgactgcccaaccagtcgtgcagcatttgcagctccaggagagtcagcagcccacgtcccaggcccaaatcgtgcaaggtatcacgccccagaccatacacggggttcaggccagcggtcaaaatatttcacaacaagcactgcagaatctgcaactacaactgaaccctgggacgttcctcatccaagcacagaccgtcacccccagcggccaggtgacatggcagactttccaggtgcagggcgtccaaaatctccagaacctacagatccagaacacagccgcccagcagattacgctgactccagtgcagacactcactctgggtcaggtggcagccggcggtgccttcacaagcacccccgtgtcgctcagtacgggccaattacccaaccttcaaacagtaacagtgaattccatagatagtgctggcattcagcttcacccaggagaaaacgccgactccccagcggacattagaattaaggaagaagagccggacccggaggaatggcagctcagcggagactctaccttgaacactaacgaccttactcacttgcgcgtgcaggttgtcgacgaggagggcgaccaacagcaccaggaaggcaaaaggctgcggagggtggcctgcacctgccccaactgtaaggaaggcggtgggcggggtacaaacctcgggaaaaagaagcagcatatctgccacatcccaggatgtggaaaagtctacggtaaaaccagccacctgcgggcacatctgcggtggcattcaggggaaagacctttcgtttgcaactggatgtattgtggtaagcggtttactcggtctgacgagctgcagagacatcgcagaacccacaccggagaaaagaaatttgtctgcccagaatgctcaaaacggttcatgcgatcagatcatctggccaagcatataaagacccatcagaataagaagggaattcattctagctccactgtattggcctctgtggaagcagccagggatgacaccctgatcactgcaggaggaaccactttgattctagccaacattcagcagggttcagtgtctgggattgggaccgtgaacacctcagccacctccaaccaggatattttgactaatacagagatacctctccagctggtgaccgtcagcgggaatgagaccatggaatag

SEQ ID NO: 135328 - DNA, 2346 bp, Artificial Sequence
  derived and/or modified sequence
atgacagcccctgagaagcctgtgaagcaggaggagatggccgccctggatgtggacagcggcggcggcggcggcggcggcggcggccacggggagtacctgcagcagcagcagcagcacggcaatggagctgtggccgctgctgctgctgcccaggacacccagcccagccccctggccctgctggccgccacctgcagcaagattggcccccccagccctggagatgatgaggaggaggccgctgctgctgctggggccccagctgctgctggggccaccggggacctggccagcgcccagctgggcggggcccccaaccgctgggaggtgctgagcgccacccccaccaccatcaaggatgaagctggcaacctggtgcagatccccagcgctgccaccagcagcggccagtatgtgctgcccctgcagaacctgcagaaccagcagatcttctctgtggcccctggcagtgacagcagcaatggcaccgtgtcctctgtgcagtaccaggtgatcccccagatccagagcgcagatggccagcaggtgcagatcggcttcaccggcagcagtgacaatggaggcatcaaccaggagagcagccagatccagatcatccctggcagcaaccagaccctgctggccagcggcaccccatctgccaacatccagaacctgatcccccagacaggccaggtgcaggtgcagggcgtggccatcggcggcagcagcttccctggccagacccaggtggtggccaacgtgcccctgggcctgcccggcaacatcacctttgtgcccatcaacagcgtggacctggacagcctgggcctgagcggcagcagccagaccatgacagctggcatcaatgctgatggccacctgatcaacacaggccaggccatggacagcagtgacaacagcgagaggactggagagcgggtgtccccagacatcaatgagaccaacacagacacagacctgtttgtgcccaccagcagcagcagccagctgcctgtgaccatcgacagcacaggcatcctgcagcagaacaccaacagcctgaccaccagcagcggccaggtgcacagcagtgacctgcagggcaactacatccagagccctgtgtctgaggagacccaggcccagaacatccaggtgtccacagcccagcctgtggtgcagcacctgcagctgcaggagagccagcagcccaccagccaggcccagatcgtgcagggcatcaccccccagaccatccacggcgtgcaggccagcggccagaacatcagccagcaggccctgcagaacctgcagctgcagctgaaccctggcaccttcctgatccaggcccagacagtgacccccagcggccaggtgacctggcagaccttccaggtgcagggcgtgcagaacctgcagaacctgcagatccagaacacagctgcccagcagatcaccctgacccctgtgcagaccctgaccctgggccaggtggccgccggcggggccttcaccagcacccctgtgtccctgagcacaggccagctgcccaacctgcagacagtgacagtgaacagcattgattctgctggcatccagctgcaccctggagaaaatgctgacagccctgctgacatccgcatcaaggaggaggagccagaccctgaggagtggcagctgagcggggacagcaccctgaacaccaatgacctgacccacctgcgggtgcaggtggtggatgaggagggggaccagcagcaccaggagggcaagaggctgcggcgggtggcctgcacctgccccaactgcaaggagggcggcggccggggcaccaacctgggcaagaagaagcagcacatctgccacatccctggctgtgggaaggtgtatggcaagaccagccacctgcgggcccacctgcgctggcacagcggggagcggccctttgtgtgcaactggatgtactgtgggaagcgcttcaccaggagtgatgagctgcagaggcacaggaggacccacactggagagaagaagtttgtgtgcccagaatgttccaagcgcttcatgagaagtgaccacctggccaagcacatcaagacccaccagaacaagaagggcatccacagcagcagcacagtgctggcctctgtggaggccgccagagatgacaccctcatcacagctgggggcaccaccctcatcctggccaacatccagcagggctctgtgtctggcatcggcaccgtgaacaccagcgccaccagcaaccaggacatcctgaccaacacagagatccccctgcagctggtgacagtgtctggaaatgagaccatggagtag

SEQ ID NO: 135329 - DNA, 2217 bp, Artificial Sequence
  derived and/or modified sequence
tgaccagagaagcctgtgaagcaggaggagatggccgccctggatgtggacagcggcggcggcggcggcggcggcggcggccacggggagtacctgcagcagcagcagcagcacggcaatggagctgtggccgctgctgctgctgcccagacaggagacctggccagcgcccagctgggcggggcccccaaccgctgggaggtgctgagcgccacccccaccaccatcaaggatgaggccggcaacctggtgcagatccccagcgctgccaccagcagcggccagtatgtgctgcccctgcagaacctgcagaaccagcagatcttctctgtggcccctggcagtgacagcagcaatggaacagtgtcctctgtgcagtaccaggtgatcccccagatccagagcgcagatggccagcaggtgcagatcggcttcaccggcagcagtgacaatggaggcatcaaccaggagagcagccagatccagatcatccctggcagcaaccagaccctgctggccagcggcacccccagcgccaacatccagaacctgatcccccagacaggccaggtgcaggtgcagggcgtggccatcggcggcagcagcttccctggccagacccaggtggtggccaacgtgcccctgggcctgcccggcaacatcacctttgtgcccatcaacagcgtggacctggacagcctgggcctgagcggcagcagccagaccatgacagctggcatcaatgctgatggccacctgatcaacacaggccaggccatggacagcagtgacaacagcgagaggactggagagcgggtgtccccagacatcaatgagaccaacacagacacagacctgtttgtgcccaccagcagcagcagccagctgcctgtgaccatcgacagcacaggcatcctgcagcagaacaccaacagcctgaccaccagcagcggccaggtgcacagcagtgacctgcagggcaactacatccagagccctgtgtctgaggagacccaggcccagaacatccaggtgtccacagcccagcctgtggtgcagcacctgcagctgcaggagagccagcagcccaccagccaggcccagatcgtgcagggcatcaccccccagaccatccatggagtgcaggccagcggccagaacatcagccagcaggccctgcagaacctgcagctgcagctgaaccctggcaccttcctgatccaggcccagacagtgaccccatctggccaggtgacctggcagaccttccaggtgcagggcgtgcagaacctgcagaacctgcagatccagaacacagctgcccagcagatcaccctgacccctgtgcagaccctgaccctgggccaggtggccgccggcggggccttcaccagcacccctgtgtccctgagcacaggccagctgcccaacctgcagacagtgacagtgaacagcattgacagcgctggcatccagctgcaccctggagaaaatgctgacagccctgctgacatccgcatcaaggaggaggagccagaccctgaggagtggcagctgagcggggacagcaccctgaacaccaatgacctgacccacctgcgggtgcaggtggtggatgaggagggggaccagcagcaccaggagggcaagaggctgcggcgggtggcctgcacctgccccaactgcaaggagggcggcggccggggcaccaacctgggcaagaagaagcagcacatctgccacatccctggctgcggcaaggtgtatggcaagaccagccacctgcgggcccacctgcgctggcacagcggggagcggccctttgtgtgcaactggatgtactgcggcaagcgcttcaccaggagtgatgagctgcagaggcacaggaggacccacactggagagaagaagtttgtgtgcccagagtgcagcaagcgcttcatgagaagtgaccacctggccaagcacatcaagacccaccagaacaagaagggcatccacagcagcagcacagtgctggcctctgtggaggccgccagagatgacaccctcatcacagctgggggcaccaccctcatcctggccaacatccagcagggctctgtgtctggaattggaacagtgaacaccagcgccaccagcaaccaggacatcctgaccaacacagagatccccctgcagctggtgacagtgtctggaaatgagaccatggagtag

SEQ ID NO: 135330 - DNA, 2142 bp, Artificial Sequence
  derived and/or modified sequence
attggcccccccagccctggagatgatgaggaggaggccgctgctgctgctggggccccagctgctgctggggccaccggggacctggccagcgcccagctgggcggggcccccaaccgctgggaggtgctgagcgccacccccaccaccatcaaggatgaagctggcaacctggtgcagatccccagcgctgccaccagcagcggccagtatgtgctgcccctgcagaacctgcagaaccagcagatcttctctgtggcccctggcagtgacagcagcaatggcaccgtgtcctctgtgcagtaccaggtgatcccccagatccagagcgcagatggccagcaggtgcagatcggcttcaccggcagcagtgacaatggaggcatcaaccaggagagcagccagatccagatcatccctggcagcaaccagaccctgctggccagcggcaccccatctgccaacatccagaacctgatcccccagacaggccaggtgcaggtgcagggcgtggccatcggcggcagcagcttccctggccagacccaggtggtggccaacgtgcccctgggcctgcccggcaacatcacctttgtgcccatcaacagcgtggacctggacagcctgggcctgagcggcagcagccagaccatgacagctggcatcaatgctgatggccacctgatcaacacaggccaggccatggacagcagtgacaacagcgagaggactggagagcgggtgtccccagacatcaatgagaccaacacagacacagacctgtttgtgcccaccagcagcagcagccagctgcctgtgaccatcgacagcacaggcatcctgcagcagaacaccaacagcctgaccaccagcagcggccaggtgcacagcagtgacctgcagggcaactacatccagagccctgtgtctgaggagacccaggcccagaacatccaggtgtccacagcccagcctgtggtgcagcacctgcagctgcaggagagccagcagcccaccagccaggcccagatcgtgcagggcatcaccccccagaccatccacggcgtgcaggccagcggccagaacatcagccagcaggccctgcagaacctgcagctgcagctgaaccctggcaccttcctgatccaggcccagacagtgacccccagcggccaggtgacctggcagaccttccaggtgcagggcgtgcagaacctgcagaacctgcagatccagaacacagctgcccagcagatcaccctgacccctgtgcagaccctgaccctgggccaggtggccgccggcggggccttcaccagcacccctgtgtccctgagcacaggccagctgcccaacctgcagacagtgacagtgaacagcattgattctgctggcatccagctgcaccctggagaaaatgctgacagccctgctgacatccgcatcaaggaggaggagccagaccctgaggagtggcagctgagcggggacagcaccctgaacaccaatgacctgacccacctgcgggtgcaggtggtggatgaggagggggaccagcagcaccaggagggcaagaggctgcggcgggtggcctgcacctgccccaactgcaaggagggcggcggccggggcaccaacctgggcaagaagaagcagcacatctgccacatccctggctgtgggaaggtgtatggcaagaccagccacctgcgggcccacctgcgctggcacagcggggagcggccctttgtgtgcaactggatgtactgtgggaagcgcttcaccaggagtgatgagctgcagaggcacaggaggacccacactggagagaagaagtttgtgtgcccagaatgttccaagcgcttcatgagaagtgaccacctggccaagcacatcaagacccaccagaacaagaagggcatccacagcagcagcacagtgctggcctctgtggaggccgccagagatgacaccctcatcacagctgggggcaccaccctcatcctggccaacatccagcagggctctgtgtctggcatcggcaccgtgaacaccagcgccaccagcaaccaggacatcctgaccaacacagagatccccctgcagctggtgacagtgtctggaaatgagaccatggagtag

SEQ ID NO: 135331 - DNA, 2187 bp, Artificial Sequence
  derived and/or modified sequence
atggccgccctggatgtggacagcggcggcggcggcggcggcggcggcggccacggggagtacctgcagcagcagcagcagcacggcaatggagctgtggccgctgctgctgctgcccagacaggagacctggccagcgcccagctgggcggggcccccaaccgctgggaggtgctgagcgccacccccaccaccatcaaggatgaggccggcaacctggtgcagatccccagcgctgccaccagcagcggccagtatgtgctgcccctgcagaacctgcagaaccagcagatcttctctgtggcccctggcagtgacagcagcaatggaacagtgtcctctgtgcagtaccaggtgatcccccagatccagagcgcagatggccagcaggtgcagatcggcttcaccggcagcagtgacaatggaggcatcaaccaggagagcagccagatccagatcatccctggcagcaaccagaccctgctggccagcggcacccccagcgccaacatccagaacctgatcccccagacaggccaggtgcaggtgcagggcgtggccatcggcggcagcagcttccctggccagacccaggtggtggccaacgtgcccctgggcctgcccggcaacatcacctttgtgcccatcaacagcgtggacctggacagcctgggcctgagcggcagcagccagaccatgacagctggcatcaatgctgatggccacctgatcaacacaggccaggccatggacagcagtgacaacagcgagaggactggagagcgggtgtccccagacatcaatgagaccaacacagacacagacctgtttgtgcccaccagcagcagcagccagctgcctgtgaccatcgacagcacaggcatcctgcagcagaacaccaacagcctgaccaccagcagcggccaggtgcacagcagtgacctgcagggcaactacatccagagccctgtgtctgaggagacccaggcccagaacatccaggtgtccacagcccagcctgtggtgcagcacctgcagctgcaggagagccagcagcccaccagccaggcccagatcgtgcagggcatcaccccccagaccatccatggagtgcaggccagcggccagaacatcagccagcaggccctgcagaacctgcagctgcagctgaaccctggcaccttcctgatccaggcccagacagtgaccccatctggccaggtgacctggcagaccttccaggtgcagggcgtgcagaacctgcagaacctgcagatccagaacacagctgcccagcagatcaccctgacccctgtgcagaccctgaccctgggccaggtggccgccggcggggccttcaccagcacccctgtgtccctgagcacaggccagctgcccaacctgcagacagtgacagtgaacagcattgacagcgctggcatccagctgcaccctggagaaaatgctgacagccctgctgacatccgcatcaaggaggaggagccagaccctgaggagtggcagctgagcggggacagcaccctgaacaccaatgacctgacccacctgcgggtgcaggtggtggatgaggagggggaccagcagcaccaggagggcaagaggctgcggcgggtggcctgcacctgccccaactgcaaggagggcggcggccggggcaccaacctgggcaagaagaagcagcacatctgccacatccctggctgcggcaaggtgtatggcaagaccagccacctgcgggcccacctgcgctggcacagcggggagcggccctttgtgtgcaactggatgtactgcggcaagcgcttcaccaggagtgatgagctgcagaggcacaggaggacccacactggagagaagaagtttgtgtgcccagagtgcagcaagcgcttcatgagaagtgaccacctggccaagcacatcaagacccaccagaacaagaagggcatccacagcagcagcacagtgctggcctctgtggaggccgccagagatgacaccctcatcacagctgggggcaccaccctcatcctggccaacatccagcagggctctgtgtctggaattggaacagtgaacaccagcgccaccagcaaccaggacatcctgaccaacacagagatccccctgcagctggtgacagtgtctggaaatgagaccatggagtag

SEQ ID NO: 135332 - DNA, 2346 bp, Artificial Sequence
  derived and/or modified sequence
atgaccgcccccgagaagcccgtgaagcaggaggagatggccgccctggacgtcgattctggcggagggggaggaggaggcggaggccacggagaatatctgcagcagcaacagcagcatggaaatggagcagtggcagccgccgctgcagctcaggacacgcagccttcacctctggcactcctggcggctacctgctctaagatcgggccgccttccccgggagatgatgaggaagaggctgccgccgctgcaggtgcaccagcggcagctggcgccacgggagatctggcatcagcacaactcggaggtgcccccaataggtgggaagtgctcagcgctacccccaccaccatcaaagacgaggccggaaatttagtgcaaatacccagtgctgctacgagttccggtcagtacgtcctgcctctccagaatctacagaatcagcagattttttccgttgctcccggctctgattcaagcaatggaacggttagcagtgtccagtaccaggtcattcctcagattcagtctgctgatggacagcaggttcagatcggattcaccggctcttcagataatggaggcatcaatcaggaatcctctcagatccaaataataccgggcagcaaccagaccctactggcatcagggacgccttccgcaaacatacagaatctcatcccacagacaggccaggtgcaagttcagggcgtcgctattggaggctcatcctttccaggacagacccaagtggtcgccaacgttccgttgggtcttcctggcaacatcacatttgtgcctattaatagtgtcgacctggatagtttgggattaagcggaagcagtcagacaatgactgcgggcatcaatgctgacggccacctcattaatactgggcaagccatggattcctcagacaattctgaacggactggcgagagggtatcccctgacattaacgaaaccaatactgacaccgatctttttgtgccaacatcaagtagcagtcagcttccagtcacgatagacagtaccggaatcctgcagcagaacactaattccttgaccacatcgagtggccaagtccactcctcagatcttcaggggaactacattcagtcccccgtatccgaggagacccaggcccagaacatccaagtttcgaccgctcagcctgtcgtgcagcacctccaactccaggagtcccaacaacctacctcgcaagcccagatcgtgcaagggataacacctcagaccatccatggtgtgcaagcttccggccagaatatcagtcagcaagctctccagaacctacaattacagctgaaccccggcaccttcctgatccaggctcagactgtgacaccaagcggacaggtgacgtggcagactttccaggttcagggcgtgcaaaatctgcagaacttgcaaattcagaacaccgcagcgcaacagattaccttaactccggttcagaccctgaccctgggccaggtggcggctgggggagccttcacgtcaactcccgtgagcctcagcacgggacagctccccaatctccagaccgtgactgtaaactcaattgacagtgccggcatccagcttcaccctggcgagaatgctgactcaccagcggacattagaatcaaagaggaagaacccgaccccgaggagtggcagctgagcggggacagcacactcaatactaatgatctgacacatttgagggtacaggtggtggacgaagaaggggatcagcaacaccaggagggaaaaagactgaggcgagtagcttgtacctgccccaactgcaaggaggggggaggacgagggacaaacctgggcaagaaaaagcagcacatctgccatattcccggatgcgggaaggtctacggcaagacgtcgcatcttcgtgctcacctccggtggcactctggcgagcggccttttgtctgcaactggatgtattgcgggaaacggttcactcggagtgacgaactgcagcgacacaggagaacacacactggggaaaagaaatttgtgtgtcctgagtgttctaagaggttcatgcgatccgaccacctggctaaacacatcaagactcatcagaataagaaaggaattcatagtagtagtacggttctcgcttctgttgaggccgcgcgcgacgatactctgattaccgccggcggaactacccttatcctggcgaacatacagcaaggcagcgtatcaggtattggcacagtgaacaccagcgccacttcgaaccaggatatcctcaccaatacagagattcccctccaactcgtgacagtctcgggcaacgaaactatggagtag

SEQ ID NO: 135333 - DNA, 2217 bp, Artificial Sequence
  derived and/or modified sequence
tgacccgagaagcccgtgaagcaggaggagatggccgccctggacgtggactccggtgggggaggcggggggggaggcggacatggcgagtacctgcaacagcaacagcaacacggtaatggtgccgttgccgcagcggctgctgctcagaccggtgacctggcaagcgctcagttagggggcgcccctaatagatgggaggtgctgagcgctacccctaccaccataaaggacgaggccgggaatttggtacagatcccaagtgctgccactagcagcggacagtacgttctgcctcttcaaaacctgcagaaccagcaaatcttcagtgtggcccccggcagcgactcctctaatggaacggtttcatccgtgcaataccaggttatcccccagatccagagcgccgacggacagcaggtgcagattggctttacggggtcctctgacaacggagggatcaaccaggaaagcagtcagatccagattatcccagggagcaaccagactctgctcgcctctggcacccccagcgccaacatccagaatctgattcctcagacaggccaggttcaggtgcaaggcgtagccattggggggtccagcttccccggacagacccaagtggtcgccaatgtgcctctcggcctgcccggtaacattactttcgttcccattaactcagtagatttggatagcctgggcttatccgggtcctcccagaccatgaccgcagggatcaatgccgatggccatttgattaatacaggtcaagcaatggattcctccgacaatagtgagcgcaccggagaaagggtcagccctgatattaacgagacaaatacagacaccgatctgttcgtcccaacttcctcgtcttctcaactccccgtgacaattgattccactgggatcctacaacagaatacgaactcgctgaccacttcatctggccaggtacactcaagcgacttacagggcaactacatacagagcccagtgtccgaggaaactcaggcccagaacatccaggtctctacggcccagccggtcgtgcagcatttacagctgcaggaaagccagcagcccacatcccaggctcaaatagtccaggggatcaccccccagacgattcacggcgtgcaggcctccggccagaacattagccagcaggctcttcaaaatctgcagctgcagttaaatccaggcacattcttgattcaagcacagactgtgactccgtccgggcaggtgacctggcagacttttcaggttcaaggcgtgcagaatcttcaaaatctgcagatacagaacactgcagcgcagcagatcacacttacccctgttcagacactgactctcgggcaggttgcagcagggggagcttttacctctacccctgttagtctcagtactggccagctgccaaatctccagactgttaccgtgaactcgatcgacagcgctgggatccagcttcacccaggcgaaaacgcagactctcccgcagacattcggataaaggaggaagaaccggaccccgaagagtggcagctgagtggcgattccaccctgaacacaaacgacctgacgcatcttcgcgttcaggtcgtcgatgaagagggcgaccagcagcatcaggagggaaaaaggctgcgccgcgtagcctgcacctgccctaattgtaaggaaggaggagggcgtggaactaatctgggaaagaagaagcagcatatctgccatatacccggttgtgggaaagtgtatggtaagactagccatttgcgggcgcacctgagatggcatagcggcgagcgacccttcgtgtgcaactggatgtactgtggtaagcgtttcacacgctctgatgagctccagagacaccggcgcactcacactggtgagaaaaaattcgtttgccctgagtgctccaagcggttcatgcgaagtgaccatctagcaaaacatattaagacacaccagaataagaagggcattcactccagcagtactgtgctcgcctccgtggaggcagccagggatgataccttgattacagcaggcgggaccacactgattctcgccaatatccaacaggggagcgtgtccggcattggtacggtgaacacgagtgccacaagcaatcaggatatcctgactaatactgaaattccgcttcagctggtaaccgtgtctggaaatgagacgatggagtag

SEQ ID NO: 135334 - DNA, 2142 bp, Artificial Sequence
  derived and/or modified sequence
atcggcccccccagccccggcgacgacgaggaggaggccgccgccgccgccggtgcccccgccgcggccggggcaacaggggatttagcttccgcacaattaggtggcgctcctaaccggtgggaggtgctaagtgccaccccaaccaccattaaggatgaggccggaaaccttgtgcaaatcccatctgcagccacttcctcaggccagtacgtgctcccactccagaacctgcagaaccagcagatattcagtgtagccccaggatcagattcaagtaatggcacagtctctagcgtccagtatcaggtcatccctcagattcagtcggccgatggccagcaagttcagataggattcaccgggtctagcgataacggagggattaatcaggagagctcacagatacagattataccaggttctaaccaaacgctcctggcctccgggactccctccgccaacatccagaacctgatcccccaaacgggccaggtgcaggtccagggcgtcgccattgggggaagttcattccccggccagacccaggtggtcgctaatgttcccctgggattgcctggaaacattactttcgtaccaataaattctgtcgacctagattctctgggcctgagcggaagcagccagaccatgacagctggtataaacgctgatggacaccttatcaatacagggcaagcaatggacagtagcgacaacagcgagcgcacaggagaaagggtgtctccagatatcaatgagacgaatactgacacggacttgtttgtaccaacatcaagtagctcgcagctacccgtcacaatcgactctacaggaattctgcagcaaaatactaactcacttactacctcttcaggccaggtccattcctccgatcttcagggaaattatatccagagccccgtaagcgaggaaacgcaggcgcagaacatacaagtgtctactgcccagcccgttgttcagcatctacagcttcaggagagccagcagccaacctcacaggcccagatagtccagggcattaccccacagaccattcatggagtgcaggcatccggacagaacataagccaacaggccttgcagaacttacaactgcagctgaatcccggaaccttcctgattcaggcacagacggtgacacctagcggccaagtcacctggcagacgttccaagtccagggggtccagaacctccagaatttacaaatccagaatactgccgctcagcagatcaccttgaccccagtacagaccctgacgctggggcaagtcgcggcaggaggtgctttcacgagcacacccgtgagtctctcaacgggacagttgccaaatctgcagacggtcactgtgaacagcattgactcggccggaatccagttacatccaggcgagaacgctgactctcccgctgatatccgtatcaaggaagaggaaccagatcctgaagagtggcagctgtccggtgatagcaccttgaacacgaatgatctaacccacctgcgagtgcaagtggtggatgaagagggagatcagcagcaccaggagggtaaacggttgcgccgcgtagcttgcacatgtcctaattgtaaggagggcggtgggcgcggaactaacttggggaagaagaaacaacatatctgccatatacctggctgtggtaaagtctacgggaagacatcgcaccttcgcgcccatctccggtggcactcgggtgaacgtcctttcgtttgtaattggatgtattgcggtaagcgcttcacccggagcgacgagctgcaaaggcacaggcgaacccatacaggcgagaaaaagtttgtttgtccggaatgctctaaaaggttcatgagaagcgaccacttggcaaagcatatcaagacccatcagaataagaagggaatacactcttcttcgactgtgcttgcgtcggtcgaagctgctagagacgacacccttatcacagctggcgggaccactcttatcttggccaatattcagcaaggcagcgtgagcggtattggaaccgtcaatacaagcgcgacatctaaccaggatattctcacgaacactgaaatcccccttcagttggtcaccgtgtcagggaatgaaacaatggagtag

SEQ ID NO: 135335 - DNA, 2187 bp, Artificial Sequence
  derived and/or modified sequence
atggccgccctggacgtggacagcggcggcggcggcggcggcggcggtggtcatggggaatacttacagcaacaacagcaacacgggaatggtgccgtagccgcagccgccgcggcccagaccggcgacctggcgtctgctcaactaggcggagcccctaatagatgggaggtgctgtctgccacgccaaccactatcaaagacgaggccgggaacctggtgcagattccaagcgccgcaactagctctggccagtacgtgctccctctgcaaaacctccagaaccaacagattttcagtgtcgcacccggatccgactcttccaacggaaccgtatcttcggtccagtaccaagttataccacagattcagagcgctgacggccaacaagtacaaatcgggttcacaggaagttctgataacggaggtattaaccaggaaagcagccagatccaaattattcccggcagcaatcagacactgctcgcatcaggaacaccctcagccaatatccagaacctaattcctcagaccggacaggtgcaggtgcaaggggttgccattggaggctccagctttcctgggcagactcaggtcgttgccaacgtcccactcggattgcctggtaatataaccttcgttcctatcaatagcgtcgacctggactccttggggttgtccggttcaagtcaaaccatgacagcaggcatcaacgctgacggtcacttaattaatactggccaggccatggactcatcagacaactccgaacggaccggcgagcgcgtgtcaccagatatcaatgaaacgaacaccgacaccgatctcttcgtgccaacaagttccagctcgcaactccccgtaacgatcgatagtacaggtatcttgcagcagaacaccaattcgctgactacttcatctgggcaggtgcacagttcagaccttcaaggtaactatatacagagtccagtttctgaggaaactcaggctcagaacattcaggtgtccactgctcaaccagtcgttcagcacctgcagcttcaggaatcccagcagccgacctcccaggcccagattgtgcaaggaataacaccacagacgatccacggggtccaggcctcaggtcagaacatctcccagcaggctctccaaaatttacagctgcaacttaacccaggcacattcctgatccaagcgcagacagtgaccccatctggacaggtcacctggcagaccttccaggtccaaggagtgcagaacctccagaacctccagatccagaacaccgccgctcagcagattaccctgacccccgtgcagactctgacactgggacaggtggctgccgggggagccttcacatctactccagtttctctctctaccgggcagttaccaaatctgcagactgtcactgttaactccatcgacagcgcaggaatccagttgcatccaggggaaaatgccgattctcccgccgacatacgaattaaggaagaagaacccgacccggaagaatggcagttgagtggggatagcacactgaataccaacgatctgacccacttgcgggttcaggtggtcgatgaagagggagaccagcaacaccaggagggaaaacggctccggcgcgtggcctgcacctgcccgaactgcaaggaggggggcggccggggcacgaacttaggcaagaaaaagcagcacatctgccacatccccggatgtgggaaagtttatgggaaaaccagccacctgcgagcacacctgcgctggcattccggcgagagaccgtttgtgtgcaactggatgtactgcggtaaacggttcacgagaagcgacgaactacagcggcaccggcggactcatactggggagaaaaagtttgtttgtccggagtgtagcaagagattcatgagatccgaccacttagcaaagcacatcaagacgcaccagaataagaaaggtatccactcctcttccacagtgttggcctccgtggaagctgcgcgcgacgacaccctcattacggccgggggaacaactctcatcctggccaacatccaacagggcagtgtgtctggtattggcacagtgaacacatctgctacttcaaatcaggacatactgacgaacaccgagatccccctgcaactggtgaccgtgtccgggaacgagactatggaatag

SEQ ID NO: 135336 - DNA, 2346 bp, Artificial Sequence
  derived and/or modified sequence
atgaccgcacccgagaaaccagtgaagcaggaagaaatggcagccttggatgtggattccgggggtgggggaggcggagggggtggacatggtgagtatcttcagcagcaacagcagcatggtaatggagctgttgctgcggcagctgctgcccaagatactcagccctccccattggctctgctcgccgctacttgctcaaagatcggcccaccctctccaggagatgatgaagaagaagctgctgcggctgccggagcccctgctgcagctggggcaacaggagacttggcgtcggcacagctgggcggtgcccctaaccggtgggaggtgctcagtgccacacccactaccattaaggacgaagccggaaatctggttcagatcccatctgccgcaacttcctcaggccaatatgtgcttcctttgcagaacttgcagaaccagcagatattcagtgtggctccagggtctgactcaagtaatgggaccgtatcgtctgtccagtaccaggtgattcctcagatccaaagcgccgatggtcagcaagtccaaattggctttaccggctcttccgataacggagggattaaccaagagagcagccagattcagatcatacccggaagtaaccagacactattagctagcgggacaccttcggctaacatccaaaatcttatcccacagaccggccaggtgcaggttcaaggtgtggccattggaggtagctccttcccaggtcaaacacaggtcgtggctaacgtacctctgggcctgcctggtaacattacattcgttccaatcaatagtgttgacctggacagccttggcctgagtgggagttcacagaccatgacagcaggaattaacgctgacgggcatttgattaacaccggacaggcaatggattcttccgacaacagcgaacggacaggcgagagagtgagccccgacattaatgagaccaatacagatacagacctgttcgtgcctacctcctctagttcacagttgccggtgaccatagacagcacggggattctgcaacagaatacgaatagcctcaccacttcatccggccaggtccacagctctgacctccagggtaactatatccagagcccagtgtctgaggaaacacaggcccagaatattcaagtgtctaccgctcaacctgtagtccagcatctccaattgcaggagtcccagcagcctacttcccaggctcagatcgtgcaggggataaccccccagacaatccacggagtccaggcgagcggacagaacatttctcagcaggctttgcagaacctgcagctgcagctgaatccaggaacctttctgatacaggcccagacagtgacccccagcggccaggtcacttggcagacgtttcaagtgcagggggttcaaaacctgcagaacctgcaaattcagaacaccgccgcacaacagattactctgacccccgtgcagaccttgactctcggtcaggtagctgccggtggtgccttcacctccactccagtctctttatctacaggccagttaccaaatctccagaccgtaacagtgaattccatagacagcgctggaatccagctgcatcctggagaaaacgccgacagtcccgctgacatccgcattaaggaagaagagcccgatccggaagagtggcagttatcaggggacagtactctgaataccaatgacctgacccatctgcgggtacaggtggttgacgaagagggcgatcagcagcatcaggaagggaaaagacttcgccgagtcgcctgtacctgcccaaactgtaaggaagggggaggccgtggaaccaatctgggcaagaaaaagcagcacatatgtcacatcccgggttgcggaaaagtatatggaaagaccagccacctaagggctcacctccgttggcacagtggagaaagaccatttgtgtgcaactggatgtactgtgggaagagatttacccgatcggacgagctgcagagacatagaaggacacacactggggaaaagaagtttgtgtgtcctgagtgtagcaaacgtttcatgcggtctgatcatctggccaagcatataaaaacccaccagaacaagaagggaatacattccagcagtaccgtgctagccagcgttgaggctgcacgagatgataccctgatcacggcaggcggaacaacactcatcctcgctaatattcagcagggctccgtgtcgggcatcgggactgttaacacaagcgccacaagcaatcaggacatcctgaccaacacagaaatcccactgcaactggtgactgtgtccggtaatgagactatggagtag

SEQ ID NO: 135337 - DNA, 2217 bp, Artificial Sequence
  derived and/or modified sequence
taacccgagaaaccagtgaaacaagaagagatggctgccttggatgtagacagcggcggaggtggcggtggtgggggaggacacggggagtatcttcaacagcagcaacagcacggcaacggggcagtggctgcagctgcagcagcacaaactggagacctggcctctgctcagctgggaggtgcccctaatagatgggaggtgttatccgctactcctactaccattaaggacgaagcaggtaacctggtgcagatcccttcagctgccacatcctccggccaatatgttcttcctttgcagaacctgcagaaccaacagatcttctctgtcgccccaggtagtgacagttcaaatggcaccgtgtcttcagttcaataccaagtgataccccagattcagtccgctgacggccagcaagtccagatcggctttaccggcagtagcgacaatggcggaattaatcaggaatcctcccagatccaaatcatcccaggctctaatcagaccctcctggccagtggcaccccatccgctaatattcagaacctgatcccacagactggacaagtgcaggtgcagggggtcgcgatcgggggaagcagtttccccggacaaacacaggtggtggccaatgtgccgttaggactgcccggtaatatcacatttgttcctattaactccgtcgacctggatagtctggggctgtccggctcctcccagaccatgactgctggtatcaacgcggacggacacctgattaacacgggccaggccatggatagcagcgacaattcagaacgcacaggggaaagagttagtccggatatcaacgagacaaataccgataccgatttgttcgttccaacatctagtagtagccagttaccagtgaccatcgactccaccggaatcctgcaacagaatactaatagtttaaccacctcttcaggtcaagtgcacagcagtgatcttcaaggaaactacatacaatctcccgtgtctgaggagacccaagcacagaacatccaggtgtccaccgcccagcctgtggtgcagcacttacaactgcaagagagccagcagccaacctcccaggcacagatagtccagggaattacaccgcagacaattcacggtgtgcaggcttctggtcaaaacatttcccagcaggcgctgcagaatctccaactccaattgaaccccggaacattcctgatacaggcacaaaccgtgacaccgagcggacaagtaacctggcagacgtttcaggtccagggcgtgcagaacctgcagaacctgcagatccagaacacagcggctcagcaaatcaccctgacccctgtgcagactttaacactgggacaagtcgccgcaggaggcgctttcacaagtactcccgtttctttgtccaccgggcagttgcccaacctgcagactgtaacggttaattctattgatagcgcagggattcagctacaccccggagaaaacgctgattctcccgctgacatccgcataaaggaagaggagccagaccccgaggaatggcaacttagcggcgattctacgcttaacactaacgatctgacacacctccgcgtccaggtggttgacgaggaaggggatcaacagcaccaggaaggaaagcggctgcgaagagtggcctgtacttgcccaaattgtaaggaaggtggaggcagagggaccaatcttgggaaaaagaaacaacatatctgccacattccgggatgtggtaaggtttacggaaaaacgtcacacctcagggcccatttaaggtggcatagcggagagcggccatttgtttgcaactggatgtactgtgggaagagatttaccaggtccgatgaactccaacggcatagaagaactcacacaggcgaaaagaaatttgtttgccccgaatgttctaagcgcttcatgcgatccgaccatctcgccaaacacatcaagacccaccagaacaagaagggcattcatagctctagcacagtcctggcgtccgtggaggcagcacgagacgacactctcatcaccgcgggtggtactacactaatcctcgctaatatccagcagggatcggtgagcgggattggtacagtgaacacctccgcaacctctaatcaagatatcctgaccaacaccgaaattcccctgcaactcgtgaccgtctcggggaatgagacaatggaatag

SEQ ID NO: 135338 - DNA, 2142 bp, Artificial Sequence
  derived and/or modified sequence
ataggtccaccctccccaggagacgacgaagaagaagctgctgctgccgcaggtgccccagcggcagccggagcgaccggggatctggctagtgcgcagttaggcggtgccccaaaccgctgggaggtccttagtgctactccaaccacaattaaagatgaggccggaaacttggtccagatcccctccgccgctacttcaagcggccagtatgtcctgcctcttcagaatctacagaatcaacagatttttagcgtggcacccggtagcgattctagcaacgggacagtgtcatctgtgcagtatcaggttattcctcagatccagagcgccgatggtcagcaggtccagatcggattcacgggatcctccgacaacgggggtataaatcaggagagttctcagatccagattatcccaggttccaatcaaacacttctggctagtggcactcctagcgcgaatatacagaatctgattcctcagaccgggcaggtacaggtgcagggcgtggccatcgggggatctagcttcccaggtcagactcaggtggttgctaacgtgcccctgggactgccagggaacataacttttgtgccaatcaactccgtagacctcgatagccttggactaagcggctcctcacagacaatgaccgccggaatcaacgccgatggccacctgatcaataccggacaggctatggactcatcagacaattctgagcgaaccggcgaaagagtgtcaccggatattaatgagaccaataccgataccgacctatttgttcccacttcaagcagtagtcaactgcctgtgaccatcgactccactggtatcctccagcagaacacgaatagtttgaccactagttccggtcaggtgcactcaagcgatctgcagggaaattacatccagtctccagtgtcagaggagacacaagctcagaatatccaggtcagcaccgctcagcctgtggtgcagcacctccagttgcaggagagccaacagccaacatcacaagctcagattgttcagggtattactccgcaaaccatccacggcgttcaggcttcaggccagaatatctctcagcaagcactacaaaacctgcaactgcagctgaatcctggtacttttctgattcaggcgcagacagtgaccccctctggacaggtgacttggcaaacgttccaggtgcagggcgttcagaacctgcagaacctgcagatccagaacaccgcagctcaacaaatcacccttactcctgtgcagacccttacccttggccaggtggctgctggcggagcttttacatctacgcccgtcagcctcagcactggacagctaccaaacctccaaacagtcaccgtgaattcgatagactccgccggtatccagctacacccaggagagaatgcggacagccctgcggacataagaatcaaggaggaagaacccgaccctgaggaatggcagctgagtggcgacagcaccctcaatactaacgacttgactcacctaagggtccaggtggtggacgaggagggggaccagcaacaccaggaaggcaagcggctgcggagggtggcgtgtacatgccccaactgtaaagaggggggaggcaggggcacaaatctgggtaagaaaaaacagcacatttgccacataccaggctgcgggaaggtctatgggaagaccagtcacctgagagcacacctgagatggcactccggagaacggccatttgtgtgcaattggatgtattgcggcaagagatttacaagatccgatgagctccagcggcatcgcaggacacacacgggcgagaagaagttcgtgtgccccgaatgttcaaagcgctttatgcgatctgaccatctcgcgaagcacattaagacgcatcaaaacaagaagggaatacactcttcaagtactgttctggcaagcgtggaggctgccagggatgatacccttatcaccgccggtggtaccactctaattcttgccaacatccagcagggctcagtgagcggcattgggaccgtgaataccagcgccacatctaaccaggacattcttaccaacaccgaaataccattacaactggttaccgttagtggaaatgaaacgatggagtag

SEQ ID NO: 135339 - DNA, 2187 bp, Artificial Sequence
  derived and/or modified sequence
atggccgctctcgacgtcgacagtggcggaggtggcggtggcggaggcggtcacggagagtatttgcagcagcagcagcaacacggaaacggagccgttgccgctgccgctgctgcccaaactggggatctggcgtccgcccagttgggcggtgcaccaaaccgctgggaggtcctgtccgccacacccaccaccatcaaagatgaggcgggtaacttagttcagatcccttcagccgctaccagcagtgggcaatatgtgctgcctctgcagaacctccagaaccaacagattttttcggtggctcctggatcggacagttcaaatggaacggtcagcagtgtgcaataccaggtcattccgcaaattcaaagcgccgatggacagcaagtacagatcggtttcactggttccagtgataacggtggaatcaaccaggagagtagtcaaatacaaatcatccccggtagcaaccagacactactggcctcgggaacaccttccgccaacattcaaaacctgataccacaaaccggccaggtgcaagtgcaaggcgtcgccatagggggatcaagctttcccggacagacccaggtagtggctaacgtaccccttggcctaccaggcaatatcaccttcgtcccaatcaattccgtcgatttagattccctgggattgtctgggtcaagccagacgatgaccgctggtatcaacgctgatggccacctaattaacacagggcaggctatggattcctctgataactctgaaagaaccggtgagcgggtatcgcctgatatcaacgagaccaacaccgacaccgatctgtttgtgcctacttcctcctcttcacagcttcccgtcaccatcgactccacaggaattctccagcagaataccaactcattaacaacttcaagcggtcaagtacacagtagcgatctgcaggggaattatatccaatctcctgtcagtgaggagacacaggcccagaatatccaagtgtctacagcccagcccgtggtgcagcatttacagctccaggagtcccagcagcccaccagccaggcccagattgtacagggaataactccccagactatccatggagtccaggcttctggacaaaacatttctcagcaggctctgcagaatctgcagctgcagctcaaccccggaaccttcctgattcaggcccagactgtaacgcccagcgggcaggttacatggcagacgttccaggtgcaaggcgtgcagaacctccagaacttgcagattcagaatacagcagcacagcagatcacactcacacctgtacagactctcacactcgggcaggtcgccgctgggggagcatttacctctacgcctgtatccctgagtaccggacagctgcccaacctccagaccgtgacggttaactccatagattccgctgggattcagctgcaccccggtgaaaacgccgacagccccgctgacatccgcatcaaggaggaggagcccgatcctgaggaatggcaattgtctggagacagcacactgaatactaacgacctgacacatctgagagtgcaggtggttgacgaagagggcgatcaacagcaccaggagggcaagcgactgcgaagagtagcttgcacgtgtcccaattgcaaagagggaggcggtaggggtacaaatttggggaaaaagaaacagcacatttgtcacattcccggatgcggtaaagtttacggaaaaaccagccacctcagagcgcacttgagatggcacagcggcgagcgcccttttgtgtgtaactggatgtactgcggcaaaaggttcacacgaagcgacgaattgcaacgacacagaagaacacatacaggtgagaaaaagtttgtatgtccagagtgctctaagcgcttcatgagatcggatcacctggccaagcatattaagacgcatcagaacaagaagggaattcactcatcctccactgtgctcgcttccgtggaggcagcaagagacgacacattgatcacagccggaggtacaacattaatcctggccaacatccagcagggatccgtaagtggcattggaaccgtgaacacatctgcaacaagcaatcaggatattttaaccaatactgagattccacttcagcttgtcactgtttccgggaacgagaccatggaatag

SEQ ID NO: 135340 - DNA, 6359 bp, Artificial Sequence
  derived and/or modified sequence
gggacgaatttcctccccagctcagctcccctacagcttggctaggcctgctccgagcgcctgcaaggtggaggaggcctgcgcctcgggcctggcagcggcagccggcgagggaggcgggcacagcggggtaaccggcgagccgtagccgctctcgaaaacctacgctgccacggccgctcattgtctctccccttccacccgggggcaaacaggaagcgcgccgcctggcagaccgacggacaggcgcctggaccaatgagcacagccgacaaagagcacggcggcgaatgagagccaagaagaggggcgggagttccgggcgggctgtcaccctcttccccccttttgggctggaggctccaccttttgtgtttcccgcacagtcaatcaaaataggaaaaaaaaatccccggaccgctccggccgtgtccgccgccgcttcccgcatcctctcccgccgccgccgccttcgctcctcaccatgtgtaaggcggcggggagccccgcctgaggtgccctaaacacactatgaccgctcccgaaaagcccgtgaaacaagaggaaatggctgccttggacgtggatagcggcggcggcggtggcggcggcggcggccacggcgagtatctgcagcagcagcaacagcacggaaacggtgcggtggcggcggcagcggcggcccaggacactcagccgtcaccgctcgctctgctggccgctacctgcagcaagatagggccgccatcgccgggcgacgacgaggaggaggcggccgccgcagccggggcccccgccgccgccggagcgacaggtgatttggcttctgcacagttaggaggagcaccaaaccgatgggaggttttgtcagccacacctacaactataaaagatgaagctggtaatctagtccagattccaagtgctgctacttcaagtgggcagtatgttcttccccttcagaatttgcagaatcaacaaatattttccgttgcaccaggatcagattcatcaaatggtacagtgtccagtgttcaatatcaagtgataccacagatccagtcagcagatggtcagcaggttcaaattggtttcacaggctcttcagataatgggggtataaatcaagaaagcagtcaaattcagatcattcctggctctaatcaaaccttacttgcctctggaacaccttctgctaacatccagaatctcataccacagactggtcaagtccaggttcagggagttgcaattggtggttcatcttttcctggtcaaacccaagtagttgctaatgtgcctcttggtctgccaggaaatattacgtttgtaccaatcaatagtgtcgatctagattctttgggactctcgggcagttctcagacaatgactgcaggcattaatgccgacggacatttgataaacacaggacaagctatggatagttcagacaattcagaaaggactggtgagcgggtttctcctgatattaatgaaactaatactgatacagatttatttgtgccaacatcctcttcatcacagttgcctgttacgatagatagtacaggtatattacaacaaaacacaaatagcttgactacatctagtgggcaggttcattcttcagatcttcagggaaattatatccagtcgcctgtttctgaagagacacaggcacagaatattcaggtttctacagcacagcctgttgtacagcatctacaacttcaagagtctcagcagccaaccagtcaagcccaaattgtgcaaggtattacaccacagacaatccatggtgtgcaagccagtggtcaaaatatatcacaacaggctttgcaaaatcttcagttgcagctgaatcctggaacctttttaattcaggcacagacagtgaccccttctggacaggtaacttggcaaacgtttcaagtacaaggggtccagaacttgcagaatttgcaaatacagaatactgctgcccaacaaataactttgacgcctgttcaaaccctcacacttggtcaagttgcggcaggtggagccttcacttcaactccagttagtctaagcactggtcagttgccaaatctacaaacagttacagtgaactctatagattctgctggtatacagctacatccaggagagaatgctgacagtcctgcagatattaggatcaaggaagaagaacctgatcctgaagagtggcagctcagtggtgattctaccttgaataccaatgacctaacacacttaagagtacaggtggtagatgaagaaggggaccaacaacatcaagaaggaaaaagacttcggagggtagcttgcacctgtcccaactgtaaagaaggtggtggaagaggtaccaatcttgggaaaaagaagcaacacatttgtcatataccaggatgtggtaaagtctatgggaagacctcacatctgagagctcatctgcgttggcattctggagaacgcccttttgtttgtaactggatgtactgtggtaaaagatttactcgaagtgatgaattacagaggcacagaagaacacatacaggtgagaagaaatttgtttgtccagaatgttcaaaacgctttatgagaagtgaccaccttgccaaacatattaaaacacaccagaataaaaaaggtattcactctagcagtacagtgctggcatctgtggaagctgcgcgagatgatactttgattactgcaggaggaacaacgcttatccttgcaaatattcaacaaggttctgtttcagggataggaactgttaatacttccgccaccagcaatcaagatatccttaccaacactgaaatacctttacagcttgtcacagtttctggaaatgagacaatggagtaaatattacacaaatacttattcattgtggttatttttatacagtagtgagaagaatattgttcctaagttcttagatatctttttattgatgtgcaaaaatttttggattgacagtaacttggttatacatgacactgaaatgccttactttgtatgatattccatagtatattaaaaatggtaaaattgcatgggttttgtaggtacttttggaatctagaagaaatgaaattttaccaagttatataaagagaaaattgaatttaacaatgcgaatggtagtctaaccaaatgcatcaatcctgtgtggtttagtgtaaaaatgagaacatgttggtatttatctattgtaagataaaaaagctggtgggtgaaagaaatcatgttatgataaaaaattttgtaattttcttgatgactggaatttttattatgcataactgacaaatcaagtttccaagcaaatgttacatagtgtaggctttacttagcttatcaatttgtcattttgaagctaattattttaattaggttaactatgtacaatattttaagcattactcttgtaagattttgaaaactacattttaacatggaactctagggatagtcaccttttaaatcctgttgaaaagccatgtttaagatttaatttgccaaaataatgtcttgttaatattctttcaataacgaagttgggcaatataaccaatgtttaaaaaagtttaaaatgtataagttgaggcatttgggtggtaagagaatgttatagtgaattatcccttttcttgactattggaggaccaaaaaaataaggtgtattgcgtcttagcagtgatttttatccaatcttgtttccaaaaaccatgtctcccagggccttaaaagccatcatgtaaattaccagtaaagtgtaacatatgcaaacataacaaaatcacttccatagtgacgatactccaaccatatggatattagtcatagaagaactagaggttttatgatatttttttaagtcttttttttttttgtctaggtagtcagtctgcacttaaatatcaatcattttccttttttgcttcttcccttaaaatttatatgtatccagtacatttaattgagaagcgtatgttttttattatgctgtattttctttttattttttaattattgtttatattttcaattcaaaaatgtacaaaataaagttacattgctggtcttgtaagagctatacagttttcctaaatgtatacctgtaactgcagcagttcacctatttcaaaaatttggaattctgttcatttgttattcttaagaccacctcaaatttaaaggctaccttattgtacgtttaaagtgtattataacagtgtggtagttaataaaacactatttttttttcttttgagtttgttgtattcctatgcataaaaaatattgcagtggtatggggtaagaattggtggtttatttttcttcaacttggctttttatttttagattcttgattttagacactgaattgtaaacaggcatttatttgaagaagagatatatagagacactggtcatttactaattttttacctagagtaaataagaatgagcttattaaataaaatttttgaaaaaaagtcttagcccttagcccacattgattcatatcagttttatcagtaccattttgcaatttttttgttttccgttttaaagcaatgcagaatattttgatttatcgaaaacctgaatttacattaagactcctgaaaatgataagacaagcgttggtaaccatggcaggagttacttgaaaaagttgcctttgaatttgcatgtgtttcatcattataaaggcagagtaggaggaaagagtattaatgtgattgtgtattgtagatgttttaaagtaaaaatcaagtttcttaacacatgtatacagtgggggtaaagatgtccattttctgttttccaggcccagtctgactctgtctgtaatacctgattgcattggagaactctagacacgcataaacatggacagtttttctaaatgtgagacttaagcctgtgatgtaaaataggaagttctacttggaataatataaaggaaccactagaatttacaattattttgaagttacagggattagattttgaatcttaaaatcctttaggtaatttttagaatttttaaattaagattaatgtgaagagaattaagtgagcagcaggtggttcacttgagcaaactgcccattaagtcagattaaaccatttgaatgatagtagagatgttttaagtaatactggatttttacagtaagtttatggtgtactttgaatcgataggtgtccatgcatattttatgaattcgtggagaatgaatgcaatgaagaaagtaagtagtcttgaaaattatttaaataaagttgtagatttttttagtgccccctaggaatatattagtgaactttggaacttttaccaaagttatgtaacctcagtgtagataattttaaatatttctatttttatattttaaaatgttgaatatactctggaaacaacatttgaagatttgctctgatgtcaactttttctggttataaaacctattagtattgtgtataattctcagggtaggtatactctaataggtgttttgtcaattgctttatttttgtaaaggctagagttagtgcatattgaatatatttatgtacaaataattcctgttgtaacatttagtggacgcgattatctgtatacctcaaattttaatttaagaaagtatcacttaaagagcatctcattttctatagattgaggcttaattactgaaaagtgactcaaccaaaaagcacataaccttttaaaggagctacacctaccgcagaaagtcagatgccctgtaaataactttggtctttcaaaatagtggcaatgcttaagatacttaaaaatacacatacatataagctgaaagcatgtcaagcctatttcatagaaaatagttcttaaacagtattgttcattagaaattgctggggagcattttagagattccataggcctggtagccacctcagcttactaaatcaacatctctggagatggagtgtatatgtgttttgaaacagctgctcaagtggttctgttaaacactcctgcgttacaatcacttaaaatagagcaagcatccccttaggctcttaattgtagtttaaattccagtactgcctactcagacccaaaagttttgttttatgaaaaatttgtattgtgttcaatattgtttgaaatttggggttgttgcataaatgattatggaataacatttggttttaaaataatataaactgacatgttatgctacctgttacacaatttggttttcagttttaattatatgaagctggtaacaatcgtttttgttgtaaaagaattatttttcactaaacagtatgtttaaaactga

SEQ ID NO: 135341 - DNA, 3627 bp, Artificial Sequence
  derived and/or modified sequence
ctcccgaaaagcccgtgaaacaagaggaaatggctgccttggacgtggatagcggcggcggcggtggcggcggcggcggccacggcgagtatctgcagcagcagcaacagcacggaaacggtgcggtggcggcggcagcggcggcccagacaggtgatttggcttctgcacagttaggaggagcaccaaaccgatgggaggttttgtcagccacacctacaactataaaagatgaagctggtaatctagtccagattccaagtgctgctacttcaagtgggcagtatgttcttccccttcagaatttgcagaatcaacaaatattttccgttgcaccaggatcagattcatcaaatggtacagtgtccagtgttcaatatcaagtgataccacagatccagtcagcagatggtcagcaggttcaaattggtttcacaggctcttcagataatgggggtataaatcaagaaagcagtcaaattcagatcattcctggctctaatcaaaccttacttgcctctggaacaccttctgctaacatccagaatctcataccacagactggtcaagtccaggttcagggagttgcaattggtggttcatcttttcctggtcaaacccaagtagttgctaatgtgcctcttggtctgccaggaaatattacgtttgtaccaatcaatagtgtcgatctagattctttgggactctcgggcagttctcagacaatgactgcaggcattaatgccgacggacatttgataaacacaggacaagctatggatagttcagacaattcagaaaggactggtgagcgggtttctcctgatattaatgaaactaatactgatacagatttatttgtgccaacatcctcttcatcacagttgcctgttacgatagatagtacaggtatattacaacaaaacacaaatagcttgactacatctagtgggcaggttcattcttcagatcttcagggaaattatatccagtcgcctgtttctgaagagacacaggcacagaatattcaggtttctacagcacagcctgttgtacagcatctacaacttcaagagtctcagcagccaaccagtcaagcccaaattgtgcaaggtattacaccacagacaatccatggtgtgcaagccagtggtcaaaatatatcacaacaggctttgcaaaatcttcagttgcagctgaatcctggaacctttttaattcaggcacagacagtgaccccttctggacaggtaacttggcaaacgtttcaagtacaaggggtccagaacttgcagaatttgcaaatacagaatactgctgcccaacaaataactttgacgcctgttcaaaccctcacacttggtcaagttgcggcaggtggagccttcacttcaactccagttagtctaagcactggtcagttgccaaatctacaaacagttacagtgaactctatagattctgctggtatacagctacatccaggagagaatgctgacagtcctgcagatattaggatcaaggaagaagaacctgatcctgaagagtggcagctcagtggtgattctaccttgaataccaatgacctaacacacttaagagtacaggtggtagatgaagaaggggaccaacaacatcaagaaggaaaaagacttcggagggtagcttgcacctgtcccaactgtaaagaaggtggtggaagaggtaccaatcttgggaaaaagaagcaacacatttgtcatataccaggatgtggtaaagtctatgggaagacctcacatctgagagctcatctgcgttggcattctggagaacgcccttttgtttgtaactggatgtactgtggtaaaagatttactcgaagtgatgaattacagaggcacagaagaacacatacaggtgagaagaaatttgtttgtccagaatgttcaaaacgctttatgagaagtgaccaccttgccaaacatattaaaacacaccagaataaaaaaggtattcactctagcagtacagtgctggcatctgtggaagctgcgcgagatgatactttgattactgcaggaggaacaacgcttatccttgcaaatattcaacaaggttctgtttcagggataggaactgttaatacttccgccaccagcaatcaagatatccttaccaacactgaaatacctttacagcttgtcacagtttctggaaatgagacaatggagtaaatattacacaaatacttattcattgtggttatttttatacagtagtgagaagaatattgttcctaagttcttagatatctttttattgatgtgcaaaaatttttggattgacagtaacttggttatacatgacactgaaatgccttactttgtatgatattccatagtatattaaaaatggtaaaattgcatgggttttgtaggtacttttggaatctagaagaaatgaaattttaccaagttatataaagagaaaattgaatttaacaatgcgaatggtagtctaaccaaatgcatcaatcctgtgtggtttagtgtaaaaatgagaacatgttggtatttatctattgtaagataaaaaagctggtgggtgaaagaaatcatgttatgataaaaaattttgtaattttcttgatgactggaatttttattatgcataactgacaaatcaagtttccaagcaaatgttacatagtgtaggctttacttagcttatcaatttgtcattttgaagctaattattttaattaggttaactatgtacaatattttaagcattactcttgtaagattttgaaaactacattttaacatggaactctagggatagtcaccttttaaatcctgttgaaaagccatgtttaagatttaatttgccaaaataatgtcttgttaatattctttcaataacgaagttgggcaatataaccaatgtttaaaaaagtttaaaatgtataagttgaggcatttgggtggtaagagaatgttatagtgaattatcccttttcttgactattggaggaccaaaaaaataaggtgtattgcgtcttagcagtgatttttatccaatcttgtttccaaaaaccatgtctcccagggccttaaaagccatcatgtaaattaccagtaaagtgtaacatatgcaaacataacaaaatcacttccatagtgacgatactccaaccatatggatattagtcatagaagaactagaggttttatgatatttttttaagtcttttttttttttgtctaggtagtcagtctgcacttaaatatcaatcattttccttttttgcttcttcccttaaaatttatatgtatccagtacatttaattgagaagcgtatgttttttattatgctgtattttctttttattttttaattattgtttatattttcaattcaaaaatgtacaaaataaagttacattgctggtcttgtaagagctatacagttttcctaaatgtatacctgtaactgcagcagttcacctatttcaaaaatttggaattctgttcatttgttattcttaagaccacctcaaatttaaaggctaccttattgtacgtttaaagtgtattataacagtgtggtagttaataaaacactatttttttttcttttga

SEQ ID NO: 135342 - DNA, 3937 bp, Artificial Sequence
  derived and/or modified sequence
cctcgcccgcctgccgcctttttgtgcgcgtgtgagtgtgggccccagcgtgccctcccgggggtgggttccgggcggaaggcggaggcccggcgcgcagcccgccgcccgcctgcccgcggaccggggagccggggtgcttggagcgggggacgccaggcgtgggctggcggcgggaccaggaggaggaggaggaggaggaggagagcgcgggctggcgcttgcccgggcgcagtcggcggggaccgagtcgtacttcctgtgcgaaaggcggcccgaccctaaccgccaccccctccccctgtctccctctctgaacccgcccattgggggtaggacactcagccgtcaccgctcgctctgctggccgctacctgcagcaagatagggccgccatcgccgggcgacgacgaggaggaggcggccgccgcagccggggcccccgccgccgccggagcgacaggtgatttggcttctgcacagttaggaggagcaccaaaccgatgggaggttttgtcagccacacctacaactataaaagatgaagctggtaatctagtccagattccaagtgctgctacttcaagtgggcagtatgttcttccccttcagaatttgcagaatcaacaaatattttccgttgcaccaggatcagattcatcaaatggtacagtgtccagtgttcaatatcaagtgataccacagatccagtcagcagatggtcagcaggttcaaattggtttcacaggctcttcagataatgggggtataaatcaagaaagcagtcaaattcagatcattcctggctctaatcaaaccttacttgcctctggaacaccttctgctaacatccagaatctcataccacagactggtcaagtccaggttcagggagttgcaattggtggttcatcttttcctggtcaaacccaagtagttgctaatgtgcctcttggtctgccaggaaatattacgtttgtaccaatcaatagtgtcgatctagattctttgggactctcgggcagttctcagacaatgactgcaggcattaatgccgacggacatttgataaacacaggacaagctatggatagttcagacaattcagaaaggactggtgagcgggtttctcctgatattaatgaaactaatactgatacagatttatttgtgccaacatcctcttcatcacagttgcctgttacgatagatagtacaggtatattacaacaaaacacaaatagcttgactacatctagtgggcaggttcattcttcagatcttcagggaaattatatccagtcgcctgtttctgaagagacacaggcacagaatattcaggtttctacagcacagcctgttgtacagcatctacaacttcaagagtctcagcagccaaccagtcaagcccaaattgtgcaaggtattacaccacagacaatccatggtgtgcaagccagtggtcaaaatatatcacaacaggctttgcaaaatcttcagttgcagctgaatcctggaacctttttaattcaggcacagacagtgaccccttctggacaggtaacttggcaaacgtttcaagtacaaggggtccagaacttgcagaatttgcaaatacagaatactgctgcccaacaaataactttgacgcctgttcaaaccctcacacttggtcaagttgcggcaggtggagccttcacttcaactccagttagtctaagcactggtcagttgccaaatctacaaacagttacagtgaactctatagattctgctggtatacagctacatccaggagagaatgctgacagtcctgcagatattaggatcaaggaagaagaacctgatcctgaagagtggcagctcagtggtgattctaccttgaataccaatgacctaacacacttaagagtacaggtggtagatgaagaaggggaccaacaacatcaagaaggaaaaagacttcggagggtagcttgcacctgtcccaactgtaaagaaggtggtggaagaggtaccaatcttgggaaaaagaagcaacacatttgtcatataccaggatgtggtaaagtctatgggaagacctcacatctgagagctcatctgcgttggcattctggagaacgcccttttgtttgtaactggatgtactgtggtaaaagatttactcgaagtgatgaattacagaggcacagaagaacacatacaggtgagaagaaatttgtttgtccagaatgttcaaaacgctttatgagaagtgaccaccttgccaaacatattaaaacacaccagaataaaaaaggtattcactctagcagtacagtgctggcatctgtggaagctgcgcgagatgatactttgattactgcaggaggaacaacgcttatccttgcaaatattcaacaaggttctgtttcagggataggaactgttaatacttccgccaccagcaatcaagatatccttaccaacactgaaatacctttacagcttgtcacagtttctggaaatgagacaatggagtaaatattacacaaatacttattcattgtggttatttttatacagtagtgagaagaatattgttcctaagttcttagatatctttttattgatgtgcaaaaatttttggattgacagtaacttggttatacatgacactgaaatgccttactttgtatgatattccatagtatattaaaaatggtaaaattgcatgggttttgtaggtacttttggaatctagaagaaatgaaattttaccaagttatataaagagaaaattgaatttaacaatgcgaatggtagtctaaccaaatgcatcaatcctgtgtggtttagtgtaaaaatgagaacatgttggtatttatctattgtaagataaaaaagctggtgggtgaaagaaatcatgttatgataaaaaattttgtaattttcttgatgactggaatttttattatgcataactgacaaatcaagtttccaagcaaatgttacatagtgtaggctttacttagcttatcaatttgtcattttgaagctaattattttaattaggttaactatgtacaatattttaagcattactcttgtaagattttgaaaactacattttaacatggaactctagggatagtcaccttttaaatcctgttgaaaagccatgtttaagatttaatttgccaaaataatgtcttgttaatattctttcaataacgaagttgggcaatataaccaatgtttaaaaaagtttaaaatgtataagttgaggcatttgggtggtaagagaatgttatagtgaattatcccttttcttgactattggaggaccaaaaaaataaggtgtattgcgtcttagcagtgatttttatccaatcttgtttccaaaaaccatgtctcccagggccttaaaagccatcatgtaaattaccagtaaagtgtaacatatgcaaacataacaaaatcacttccatagtgacgatactccaaccatatggatattagtcatagaagaactagaggttttatgatatttttttaagtcttttttttttttgtctaggtagtcagtctgcacttaaatatcaatcattttccttttttgcttcttcccttaaaatttatatgtatccagtacatttaattgagaagcgtatgttttttattatgctgtattttctttttattttttaattattgtttatattttcaattcaaaaatgtacaaaataaagttacattgctggtcttgtaagagctatacagttttcctaaatgtatacctgtaactgcagcagttcacctatttcaaaaatttggaattctgttcatttgttattcttaagaccacctcaaatttaaaggctaccttattgtacgtttaaagtgtattataacagtgtggtagttaataaaacactatttttttttcttttga

SEQ ID NO: 135343 - DNA, 6236 bp, Artificial Sequence
  derived and/or modified sequence
gggacgaatttcctccccagctcagctcccctacagcttggctaggcctgctccgagcgcctgcaaggtggaggaggcctgcgcctcgggcctggcagcggcagccggcgagggaggcgggcacagcggggtaaccggcgagccgtagccgctctcgaaaacctacgctgccacggccgctcattgtctctccccttccacccgggggcaaacaggaagcgcgccgcctggcagaccgacggacaggcgcctggaccaatgagcacagccgacaaagagcacggcggcgaatgagagccaagaagaggggcgggagttccgggcgggctgtcaccctcttccccccttttgggctggaggctccaccttttgtgtttcccgcacagtcaatcaaaataggaaaaaaaaatccccggaccgctccggccgtgtccgccgccgcttcccgcatcctctcccgccgccgccgccttcgctcctcaccatgtgtaaggcggcggggagccccgcctgaggtgccctaaacacactatgaccgctcccgaaaagcccgtgaaacaagaggaaatggctgccttggacgtggatagcggcggcggcggtggcggcggcggcggccacggcgagtatctgcagcagcagcaacagcacggaaacggtgcggtggcggcggcagcggcggcccagacaggtgatttggcttctgcacagttaggaggagcaccaaaccgatgggaggttttgtcagccacacctacaactataaaagatgaagctggtaatctagtccagattccaagtgctgctacttcaagtgggcagtatgttcttccccttcagaatttgcagaatcaacaaatattttccgttgcaccaggatcagattcatcaaatggtacagtgtccagtgttcaatatcaagtgataccacagatccagtcagcagatggtcagcaggttcaaattggtttcacaggctcttcagataatgggggtataaatcaagaaagcagtcaaattcagatcattcctggctctaatcaaaccttacttgcctctggaacaccttctgctaacatccagaatctcataccacagactggtcaagtccaggttcagggagttgcaattggtggttcatcttttcctggtcaaacccaagtagttgctaatgtgcctcttggtctgccaggaaatattacgtttgtaccaatcaatagtgtcgatctagattctttgggactctcgggcagttctcagacaatgactgcaggcattaatgccgacggacatttgataaacacaggacaagctatggatagttcagacaattcagaaaggactggtgagcgggtttctcctgatattaatgaaactaatactgatacagatttatttgtgccaacatcctcttcatcacagttgcctgttacgatagatagtacaggtatattacaacaaaacacaaatagcttgactacatctagtgggcaggttcattcttcagatcttcagggaaattatatccagtcgcctgtttctgaagagacacaggcacagaatattcaggtttctacagcacagcctgttgtacagcatctacaacttcaagagtctcagcagccaaccagtcaagcccaaattgtgcaaggtattacaccacagacaatccatggtgtgcaagccagtggtcaaaatatatcacaacaggctttgcaaaatcttcagttgcagctgaatcctggaacctttttaattcaggcacagacagtgaccccttctggacaggtaacttggcaaacgtttcaagtacaaggggtccagaacttgcagaatttgcaaatacagaatactgctgcccaacaaataactttgacgcctgttcaaaccctcacacttggtcaagttgcggcaggtggagccttcacttcaactccagttagtctaagcactggtcagttgccaaatctacaaacagttacagtgaactctatagattctgctggtatacagctacatccaggagagaatgctgacagtcctgcagatattaggatcaaggaagaagaacctgatcctgaagagtggcagctcagtggtgattctaccttgaataccaatgacctaacacacttaagagtacaggtggtagatgaagaaggggaccaacaacatcaagaaggaaaaagacttcggagggtagcttgcacctgtcccaactgtaaagaaggtggtggaagaggtaccaatcttgggaaaaagaagcaacacatttgtcatataccaggatgtggtaaagtctatgggaagacctcacatctgagagctcatctgcgttggcattctggagaacgcccttttgtttgtaactggatgtactgtggtaaaagatttactcgaagtgatgaattacagaggcacagaagaacacatacaggtgagaagaaatttgtttgtccagaatgttcaaaacgctttatgagaagtgaccaccttgccaaacatattaaaacacaccagaataaaaaaggtattcactctagcagtacagtgctggcatctgtggaagctgcgcgagatgatactttgattactgcaggaggaacaacgcttatccttgcaaatattcaacaaggttctgtttcagggataggaactgttaatacttccgccaccagcaatcaagatatccttaccaacactgaaatacctttacagcttgtcacagtttctggaaatgagacaatggagtaaatattacacaaatacttattcattgtggttatttttatacagtagtgagaagaatattgttcctaagttcttagatatctttttattgatgtgcaaaaatttttggattgacagtaacttggttatacatgacactgaaatgccttactttgtatgatattccatagtatattaaaaatggtaaaattgcatgggttttgtaggtacttttggaatctagaagaaatgaaattttaccaagttatataaagagaaaattgaatttaacaatgcgaatggtagtctaaccaaatgcatcaatcctgtgtggtttagtgtaaaaatgagaacatgttggtatttatctattgtaagataaaaaagctggtgggtgaaagaaatcatgttatgataaaaaattttgtaattttcttgatgactggaatttttattatgcataactgacaaatcaagtttccaagcaaatgttacatagtgtaggctttacttagcttatcaatttgtcattttgaagctaattattttaattaggttaactatgtacaatattttaagcattactcttgtaagattttgaaaactacattttaacatggaactctagggatagtcaccttttaaatcctgttgaaaagccatgtttaagatttaatttgccaaaataatgtcttgttaatattctttcaataacgaagttgggcaatataaccaatgtttaaaaaagtttaaaatgtataagttgaggcatttgggtggtaagagaatgttatagtgaattatcccttttcttgactattggaggaccaaaaaaataaggtgtattgcgtcttagcagtgatttttatccaatcttgtttccaaaaaccatgtctcccagggccttaaaagccatcatgtaaattaccagtaaagtgtaacatatgcaaacataacaaaatcacttccatagtgacgatactccaaccatatggatattagtcatagaagaactagaggttttatgatatttttttaagtcttttttttttttgtctaggtagtcagtctgcacttaaatatcaatcattttccttttttgcttcttcccttaaaatttatatgtatccagtacatttaattgagaagcgtatgttttttattatgctgtattttctttttattttttaattattgtttatattttcaattcaaaaatgtacaaaataaagttacattgctggtcttgtaagagctatacagttttcctaaatgtatacctgtaactgcagcagttcacctatttcaaaaatttggaattctgttcatttgttattcttaagaccacctcaaatttaaaggctaccttattgtacgtttaaagtgtattataacagtgtggtagttaataaaacactatttttttttcttttgagtttgttgtattcctatgcataaaaaatattgcagtggtatggggtaagaattggtggtttatttttcttcaacttggctttttatttttagattcttgattttagacactgaattgtaaacaggcatttatttgaagaagagatatatagagacactggtcatttactaattttttacctagagtaaataagaatgagcttattaaataaaatttttgaaaaaaagtcttagcccttagcccacattgattcatatcagttttatcagtaccattttgcaatttttttgttttccgttttaaagcaatgcagaatattttgatttatcgaaaacctgaatttacattaagactcctgaaaatgataagacaagcgttggtaaccatggcaggagttacttgaaaaagttgcctttgaatttgcatgtgtttcatcattataaaggcagagtaggaggaaagagtattaatgtgattgtgtattgtagatgttttaaagtaaaaatcaagtttcttaacacatgtatacagtgggggtaaagatgtccattttctgttttccaggcccagtctgactctgtctgtaatacctgattgcattggagaactctagacacgcataaacatggacagtttttctaaatgtgagacttaagcctgtgatgtaaaataggaagttctacttggaataatataaaggaaccactagaatttacaattattttgaagttacagggattagattttgaatcttaaaatcctttaggtaatttttagaatttttaaattaagattaatgtgaagagaattaagtgagcagcaggtggttcacttgagcaaactgcccattaagtcagattaaaccatttgaatgatagtagagatgttttaagtaatactggatttttacagtaagtttatggtgtactttgaatcgataggtgtccatgcatattttatgaattcgtggagaatgaatgcaatgaagaaagtaagtagtcttgaaaattatttaaataaagttgtagatttttttagtgccccctaggaatatattagtgaactttggaacttttaccaaagttatgtaacctcagtgtagataattttaaatatttctatttttatattttaaaatgttgaatatactctggaaacaacatttgaagatttgctctgatgtcaactttttctggttataaaacctattagtattgtgtataattctcagggtaggtatactctaataggtgttttgtcaattgctttatttttgtaaaggctagagttagtgcatattgaatatatttatgtacaaataattcctgttgtaacatttagtggacgcgattatctgtatacctcaaattttaatttaagaaagtatcacttaaagagcatctcattttctatagattgaggcttaattactgaaaagtgactcaaccaaaaagcacataaccttttaaaggagctacacctaccgcagaaagtcagatgccctgtaaataactttggtctttcaaaatagtggcaatgcttaagatacttaaaaatacacatacatataagctgaaagcatgtcaagcctatttcatagaaaatagttcttaaacagtattgttcattagaaattgctggggagcattttagagattccataggcctggtagccacctcagcttactaaatcaacatctctggagatggagtgtatatgtgttttgaaacagctgctcaagtggttctgttaaacactcctgcgttacaatcacttaaaatagagcaagcatccccttaggctcttaattgtagtttaaattccagtactgcctactcagacccaaaagttttgttttatgaaaaatttgtattgtgttcaatattgtttgaaatttggggttgttgcataaatgattatggaataacatttggttttaaaataatataaactgacatgttatgctacctgttacacaatttggttttcagttttaattatatgaagctggtaacaatcgtttttgttgtaaaagaattatttttcactaaacagtatgtttaaaactga

SEQ ID NO: 135344 - protein, 784 aa, Artificial Sequence
  derived and/or modified sequence
MSDQKKEEEEEAAAAAAMATEGGKTSEPENNNKKPKTSGSQDSQPSPLALLAATCSKIGTPGENQATGQQQIIIDPSQGLVQLQNQPQQLELVTTQLAGNAWQLVASTPPASKENNVSQPASSSSSSSSSNNGSASPTKTKSGNSSTPGQFQVIQVQNPSGSVQYQVIPQLQTVEGQQIQINPTSSSSLQDLQGQIQLISAGNNQAILTAANRTASGNILAQNLANQTVPVQIRPGVSIPLQLQTLPGTQAQVVTTLPINIGGVTLALPVINNVAAGGGTGQVGQPAATADSGTSNGNQLVSTPTNTTTSASTMPESPSSSTTCTTTASTSLTSSDTLVSSADTGQYASTSASSSERTIEESQTPAATESEAQSSSQLQPNGMQNAQDQSNSLQQVQIVGQPILQQIQIQQPQQQIIQAIPPQSFQLQSGQTIQTIQQQPLQNVQLQAVNPTQVLIRAPTLTPSGQISWQTVQVQNIQSLSNLQVQNAGLSQQLTITPVSSSGGTTLAQIAPVAVAGAPITLNTAQLASVPNLQTVSVANLGAAGVQVQGVPVTITSVAGQQQGQDGVKVQQATIAPVTVAVGGIANATIGAVSPDQLTQVHLQQGQQTSDQEVQPGKRLRRVACSCPNCREGEGRGSNEPGKKKQHICHIEGCGKVYGKTSHLRAHLRWHTGERPFICNWMFCGKRFTRSDELQRHRRTHTGEKRFECPECSKRFMRSDHLSKHVKTHQNKKGGGTALAIVTSGELDSSVTEVLGSPRIVTVAAISQDSNPATPNVSTNMEEF

SEQ ID NO: 135345 - DNA, 5811 bp, Artificial Sequence
  derived and/or modified sequence
agctgctacgccacagcccagcggcggccattcgcggaaaaagaggcagagcctgtgccagctacagcctcctccgagccaccgcgggcgggcgggaccggcctctcctcccgcctcgcccccacccccacccacctctatcccagtgtctccgtctgagggtttgtcctgttaatgcgggatgagcgatcagaagaaggaggaggaggaggaggcggcagcggcagcggcgatggctacagaaggagggaaaacctctgagccagagaataacaataaaaaacccaaaacctcaggctcccaggactctcagccctctcctctggctttactggcagctacttgcagcaaaatagggactcctggtgaaaatcaagcaactggacaacaacaaattattatagatccaagtcaaggattggtgcaacttcaaaatcaaccacaacagctagaactggtaacaacgcaacttgctggaaacgcttggcaacttgttgcctccactcctcctgcttcaaaagagaataacgtttctcaaccagcctctagttcgtctagttcttccagcagtaataacgggagtgcatctcctacaaaaactaaatcaggtaattcttccacccctggtcaatttcaagtcatacaagtacaaaatccaagtggtagtgtacagtaccaagtaattccacaacttcagacagtggaaggtcaacaaattcaaatcaatccaactagtagttcatctctacaggatttgcagggtcaaattcagctcatttctgcaggtaataatcaagctatactcacagctgctaacaggacagcttctgggaatattcttgctcaaaacctggcaaatcagacagttccggtccaaattagacctggtgtttcaataccactgcagttacagactcttcctggtactcaggctcaagttgtaacaaccctaccaattaacattggaggagtgactctagctttgccagtgataaacaacgtggctgccggaggagggactgggcaggttggccagcctgctgctactgctgatagtgggacttccaatgggaatcaattagtttccacacccaccaacaccactacttctgccagtactatgccagaatctccctcctcctccactacctgcacaaccactgcttcaacgtctttgacaagcagtgacacattagtgagctcagcagatactggccagtatgcaagcacatcagccagtagttctgaacgcaccattgaagaatctcaaacacctgctgctactgagtctgaagcccagagctccagtcagcttcagcctaatggaatgcagaatgcacaggatcaatcaaattctcttcagcaggtgcaaattgtaggccaacctatcttacagcagatccagatccaacagcctcagcaacagatcattcaggctattccaccacagtcgtttcaactccagtcagggcagacgattcagaccatccagcagcagcctttacagaatgttcaacttcaagcagtaaatccgactcaggtgcttatcagggctccaactttaacaccttcagggcaaatcagttggcaaactgtacaggttcagaatattcagagtctttcaaatttgcaagttcagaatgctgggttatcccaacaattaaccatcaccccagtgtcttcaagtggtggcacaactcttgctcagattgctcctgtggctgttgctggtgccccaataactttgaatactgcccagcttgcatcagtgcctaaccttcagacagtgagcgttgccaacctgggtgctgcaggtgttcaagtgcagggagttcccgttacaatcactagtgttgcaggtcagcagcaaggacaagatggagtaaaagtccagcaagctactatagctcctgtaactgtagcagttggaggaattgctaatgccacgataggtgctgttagtcctgaccaactcacacaagtgcatttgcagcaaggccagcagacttctgatcaagaggtacaacctggcaagaggcttcgaagagttgcctgttcctgtcctaattgtagggaaggagaaggaagaggcagtaatgaaccaggaaaaaagaagcagcatatctgtcatattgaaggatgtggtaaagtttatggcaaaacatctcatttacgagcacatcttcgctggcatactggagaaagaccttttatatgcaactggatgttttgtggcaaaagattcacacggagtgatgagctccagagacatagaagaacccatacaggtgaaaagagatttgaatgcccggaatgttctaaaaggtttatgcggagtgatcatctctccaaacatgtcaaaacgcaccagaataaaaaaggtggtgggacagctcttgccattgttacctcgggagaactggactcatctgttacagaggtgcttggctccccaagaattgtcacagttgcagccatttctcaagattcgaatccagcaactcccaatgtttcaaccaacatggaagaattctgaaaagttatttataacagagacctctagtgctgcacttgtttacacacctttgaaaatctggaaatgggctggtcaagtggattacagagtaggaaattatgttttcattcttggcttctttaagtattccagggtttggggtcaacacgtgaagtgttgaattttaaaaaatacaaaaagcagactgatgtactggaaacagaaaagtatttcctccatactataagttgtagttgtttggaaatatatcacataacctttatacagaatcttcccatctcttaatatcatgtgttaacatgtttaaaaagaccttagtagtttgcaggctggaccttaattggacttattttctttgaaagtactttgttataaattcagtcagtaataatttacgtgtattctttttctctatagcacagaaaacagatagttaactgatgatagggataatactgtatttccttagcttgatttttggaaaatcaaccgaaaatagtttggccgtcttttctaaatgttagaaattcttcaacagttgaattaggtaagttccaaaacagtaatctgagatgcatctcagatctttattaccactacattatagtagtgtgtatgcagacaatcagtgaagtccaattactttctccatttggagacacaagaggaacatagagttaaatcttaggttaaattttaggttgacaccttaggaaaatgctgggaaaaaaatggttaaaacaaaactcatcatagcttcagaaaaataaaatgaggcatcttaacatgcaatgttctaaagttaggattgattatattcctaaccctaggttgaaccacaaaatttcatttaaaatgtttatatttggaaatatttgcatagagtgtaaattgttctgtagtttcatattttgtaaatatgagttatgttgacaatgtgcagaattctttatgctttgatgtggtagccaaagaaagaattacacttttttccaaggccagcagaaaattctcttttaactacattgtaattcttgttttcctctactaaaaattggccagtcccattttatttctagtgctatgtaagaaggtaattaggaattataacacagtaatgtttttatgttacatcaataactgaattttccctaaaaattagcctaatatataatagatatattatgaagcaaaacttttatttttgaaaaggcagaataattttcagtgaagtaagtgactaaagaaaaaaactatattattgtttatgcaagggtcttacaggaaagggtctttttttttttttttttgagatggagtctcgctctcttgcccaggctggagtgcaatggcacgatctcagcttactgcaaccgccgcctcccaggttcaagcgattctcctgtcttagcctcctgagtagctgggattaacaggcgcctgccaccatgcctggctaatttttgtatttttagtagagacagggtttcgccatgttggccaggctggtttcaaactcctgacctcaggtgatctgcccacctcggcctcccagagtgctgggattacaggcatgagccaccatgcccggctaggaaagggtcttactaggaaagatggccaaaagtttcatatgaaaaaaattggattataaaccagtaacttaaatattaataaggatattttatgttttaaaaaagtatttacacagaatcataatcagtgaaattgaccatttgaaaactaaaagtttttacctacctgctcaatttattaacatcattgctttggggactgtttgaatataggtacgtgttttcttgtgcattctctataatttcaggaaaagtactaatgcgaattctcttccaaaattgtgatgtttcttgtatttttgatgaaggagaaatactgtaatgatcactgtttacactatgtacactttaggccagccctttgtagcgttatataaaactgaaggtcttttgtgctttcagtttgtataaaaaagctttgagattaaaggaaaaaaaaaatttttacactgtggttataaatttcaagtttcttaaagcttttgtagacttgtaacagagtctttaaatttaagttggattttgtaaattgttttgtatattttatttaatgtactcttaacaactgatgtatctggctttaaaacatcagaattggtttgttgttttgtttggtacagaggagcatttggtagtgttcattttaattttattatataggagctgaaacatcaaatatatattttatctatcattatgctacacaatcagtgctataaatttttttatgcaaagaaactttcttaatgttttaatcatgtttcctcagagtgacactttttgttgttgttaataccaagtatgaacactctgcatcattattccatgaaccagttctaatgcaaacctatgtatgtccattagaaatggaagttattttttaatcaacaatgaggcctattataaatttatcagatgaatctagatagctttatagcatataaaatatgttaatttgtgttagcaggtgcacatttcaccactgaaattagaaatattttgacagtctgttctgcataccattctgagtctacttttctgtctttagaagaatcgtaaatttcagtgtcctttatttgactcagtgggatatagctgttataagtaatagggcacagatgtgcagtagagtcttgtttaatggcatttcactgttcattccctttaccaccgttataaaacttttctttattgtaattatcagtgcaaagctatgtatttatcatggtaaaactccagtgttagaatagttttttcttacagtatactttctttggttaggtttgtgtatgtgttgctgattacattagaacttgatgttaagtcatttatcacactctcatgagagcagtaataaaagtgtgtaatctaggagaaaaagttaatttgtcaaacttagataagcatgatgtttaggtcctatttttcaattttataactgttttattgcaacaatatttgtatttaagtctccattttaatgccttgtggtgtttttttatgcatgtcactaagttgtcatcccacataaattgatgtgcagcatagggtattaaatctacataatgattttaaaacagaaatagttgatggtaaaatgtaaatgttttgcaaaaattccttataaaaagttttgtagtaacatttcacttgtaaattttttttgtaaaaaaaaaaaaa

SEQ ID NO: 135346 - DNA, 2355 bp, Artificial Sequence
  derived and/or modified sequence
atgtcagatcaaaagaaagaggaagaggaggaagccgctgccgccgccgcgatggcgacggaggggggaaagacgtccgagcctgagaataataacaagaaacccaagacaagcggctctcaggattcacagccctcacccttagctcttctcgccgctacctgcagcaagattggtactcccggcgagaatcaggccaccgggcagcagcaaattatcatagaccctagccaggggcttgtgcagctgcaaaaccagccccagcagctggagttagttactactcagttggccggtaatgcctggcaactggtcgctagcacaccacctgccagtaaggagaataatgtgagccagcctgcaagttcttcctcttcatcgtcatctagcaataacgggagcgcctcacccaccaaaacaaaaagcggcaactcttcgaccccaggtcaattccaggttatccaggttcagaatcccagcggatccgtacagtatcaggttatccctcagctgcaaacagtggaaggacaacagatccaaattaaccccacaagctcatccagcttacaggacctacaaggccaaatccagctgatcagcgctggtaacaaccaagctatccttacagccgctaaccggacagctagcggaaacattttggcacagaacctggctaaccaaaccgtccccgtccagattaggcccggcgtgtcaattcccctccaattgcagactctccctggtactcaggcccaagttgtaacgactctccccattaatattgggggtgttaccctggcgctgccagtgattaacaacgtggccgctggtggcggaacaggtcaggtgggccagcccgcggccactgcggactcgggcacttccaacggtaatcaattagtctctacccctactaatactacaacatccgcttccaccatgcctgaatcccctagttcaagcaccacatgtacaacaacagcaagtaccagcttaaccagctcagacactttggtttcttccgccgacactggccagtacgcgtcaacatccgccagtagctcggagaggactatcgaggagtctcagacccctgctgcaacagaaagtgaagctcagtcctcctctcagttgcagcctaacggtatgcagaacgctcaggatcagtccaacagcctgcagcaggtgcagatagttggacagccaattctccaacagattcagattcagcagccccagcagcagataatccaagccatccctccccaaagctttcaattacagtcaggccagacaattcagaccattcagcagcagccgttgcaaaatgtgcagttgcaggctgtgaaccctacccaggtattaatacgcgcgcccactctgactccctcagggcagatttcatggcaaaccgtgcaagtgcagaacatacagtcgttgtccaatcttcaggtccagaatgccggtctgagtcagcaactgacaattacacccgtctccagtagtggcgggacgaccttagcccagatcgcacctgtagccgtggccggggcgccaattactctgaataccgcccaactggcctccgttccaaacctccaaacagtgagtgttgctaatctgggagcggcaggagtgcaggttcagggagttcccgtgactattacgtctgtggccgggcagcagcaagggcaggacggcgtgaaagtgcagcaggctacaattgcccccgtgacggtggctgttgggggaatcgccaacgctactatcggggcagtcagtccagaccagctgacacaggttcacttgcagcagggccagcaaacatcggaccaagaagttcagccaggtaaaagactgaggcgagtcgcctgctcttgccccaactgcagggagggcgaaggacgaggctccaatgagcccggcaaaaagaagcagcatatttgccacattgagggctgtggaaaggtgtatggcaaaaccagtcacttgagggcccatctgcgatggcatactggagagcgtcctttcatttgtaactggatgttctgcggcaaacggtttaccaggtctgatgagctgcagagacacagaaggacccataccggagagaaaaggtttgaatgtccagagtgctccaagcggttcatgcggtccgaccacctttctaagcatgttaaaactcatcagaacaagaagggtggaggtactgcactggctatcgtcaccagcggcgagctggactcctccgtgacagaggtgctgggcagtcccaggatcgtcactgtagccgctatcagccaagactccaacccagcgactccaaatgtgagcactaatatggaggaattctag

SEQ ID NO: 135347 - DNA, 2355 bp, Artificial Sequence
  derived and/or modified sequence
atgtctgaccagaagaaggaggaggaggaggaggccgctgctgctgctgccatggccacagagggcggcaagaccagcgagcctgagaacaacaacaagaagcccaagaccagcggcagccaggacagccagcccagccccctggccctgctggccgccacctgcagcaagattggcaccccaggagagaaccaggccaccggccagcagcagatcatcatcgaccccagccagggcctggtgcagctgcagaaccagccccagcagctggagctggtgaccacccagctggccggaaatgcctggcagctggtggccagcaccccaccagccagcaaggagaacaacgtgtcccagcctgccagcagcagcagcagcagcagcagcagcaacaacggcagcgccagccccaccaagaccaagagcggcaacagcagcaccccaggccagttccaggtgatccaggtgcagaaccccagcggctctgtgcagtaccaggtgatcccccagctgcagacagtggagggccagcagatccagatcaaccccaccagcagcagcagcctgcaggacctgcagggccagatccagctgatctctgctggcaacaaccaggccatcctgacagctgccaacagaacagccagcggcaacatcctggcccagaacctggccaaccagacagtgcctgtgcagatccggcctggggtgtccatccccctgcagctgcagaccctgcccggcacccaggcccaggtggtgaccaccctgcccatcaacattggaggagtgaccctggccctgcctgtgatcaacaacgtggccgccggcggcggcaccggccaggtgggccagcctgctgccacagctgacagcggcaccagcaatggaaaccagctggtgtccacccccaccaacaccaccaccagcgccagcaccatgcctgagagccccagcagcagcaccacctgcaccaccacagccagcaccagcctgaccagcagtgacaccctggtgtcctctgctgacaccggccagtatgccagcaccagcgccagcagcagcgagaggaccatcgaggagagccagaccccagctgccacagagagcgaggcccagagcagcagccagctgcagcccaacggcatgcagaatgcccaggaccagagcaacagcctgcagcaggtgcagatcgtgggccagcccatcctgcagcagatccagatccagcagccccagcagcagatcatccaggccatccccccccagagcttccagctgcagagcggccagaccatccagaccatccagcagcagcccctgcagaatgtgcagctgcaggccgtgaaccccacccaggtgctgatccgggcccccaccctgacccccagcggccagatctcctggcagacagtgcaggtgcagaacatccagagcctgagcaacctgcaggtgcagaatgccggcctgagccagcagctgaccatcacccctgtgagcagcagcggcggcaccaccctggcccagatcgcccctgtggccgtggccggggcccccatcaccctgaacacagcccagctggcctctgtgcccaacctgcagacagtgtctgtggccaacctgggcgccgccggcgtgcaggtgcagggcgtgcctgtgaccatcacctctgtggccggccagcagcagggccaggatggagtgaaggtgcagcaggccaccatcgcccctgtgacagtggccgtgggcggcatcgccaatgccaccatcggggctgtgtccccagaccagctgacccaggtgcacctgcagcagggccagcagaccagtgaccaggaggtgcagcccgggaagaggctgcggcgggtggcctgcagctgccccaactgccgggagggggagggccggggcagcaatgaacctgggaagaagaagcagcacatctgccacatcgagggctgtgggaaggtgtatggcaagaccagccacctgcgggcccacctgcgctggcacactggagagcggcccttcatctgcaactggatgttctgtgggaagcgcttcaccaggagtgatgagctgcagaggcacaggaggacccacactggagagaagagatttgagtgcccagaatgttccaagcgcttcatgagaagtgaccacctgagcaagcacgtgaagacccaccagaacaagaagggcggcggcacagccctggccatcgtgaccagcggggagctggacagctctgtgacagaggtgctgggcagcccccgcatcgtgacagtggccgccatcagccaggacagcaacccagccacccccaacgtgtccaccaacatggaggagttctag

SEQ ID NO: 135348 - DNA, 2355 bp, Artificial Sequence
  derived and/or modified sequence
atgagcgaccagaagaaggaggaggaggaggaggccgccgccgccgctgcaatggccacagaaggaggaaagacctcagagccagaaaataacaacaaaaagccaaagacttccggctctcaagacagtcagccctccccactggcactactggcggcaacgtgcagcaagataggcactccaggagagaatcaagccacaggccagcagcagatcataattgaccctagccagggcctggttcagttgcaaaatcagccccagcagctagaactcgtaaccactcagctggccgggaacgcgtggcagctggttgctagcactccacccgcttcaaaggaaaataatgtttcacagccggcctcgtcttcatcttcgtcctctagcagcaacaacggcagtgccagcccaaccaagacgaagtccggaaacagcagtactcccggacaattccaagttatccaagttcagaacccaagtgggagcgtccagtatcaggtcatcccccagctccaaaccgtcgaaggtcagcagattcagatcaatccaacatcctcatcctcactgcaggacctgcaggggcaaattcagctaatctctgccggaaacaatcaagcaattctcactgcggccaatagaactgctagtgggaatatcctcgcccagaaccttgccaatcagactgttccggttcagatacgccctggtgttagtatcccattacaactccagaccttacctggaacccaggcacaggttgtgaccacacttcccatcaatattgggggcgttacactagccttacctgtgattaataatgtcgccgcaggcggagggacggggcaagtcgggcagccagccgccactgctgacagtggaacatcaaatggcaaccagttggtttctactcctacgaatactaccacctccgcatccactatgccagaatcacccagcagtagtaccacctgcaccacaacagcctctaccagcctcacctccagcgacactcttgtatcgtcagctgacactggccagtacgcttctaccagcgcaagcagcagtgagcgaaccatcgaagagtctcaaacgcccgccgcaactgaatctgaggctcaaagctcctcacaattgcagcctaatggaatgcaaaacgctcaggaccagagcaatagcctgcagcaggtccaaatcgtcggacagcctatccttcagcagatccagattcagcagccccagcagcagatcatccaggctatacctccacagtccttccagctccagtccggccagactatccaaactattcagcaacagccactgcaaaacgtacaacttcaagccgtaaaccccacccaagtgctgattcgggcccctaccttgacacctagcggacagatcagttggcagactgttcaggttcagaacatacaaagtctgtctaatttgcaggtgcagaatgcaggactgagccagcagctgactatcaccccagttagttcttcaggaggaaccacactggcccagatcgcaccagtcgccgtggcgggcgcccctattaccctgaacaccgctcagctcgcttcagtaccaaaccttcagaccgtcagcgtggcaaaccttggggctgcgggagtacaggtgcagggtgtgccagttaccattacatcagtcgcaggacagcagcagggccaggatggcgtgaaggtgcagcaggccaccatagctcctgtgaccgtagccgtcggggggatcgcaaacgcgaccataggagccgtcagccccgatcaattgacacaggtgcatctgcaacagggacagcagacgtcagaccaggaggtccagccaggaaagcgactgcggcgagtcgcatgctcatgtcccaactgcagagaaggcgaaggacgaggatcaaacgagcccggaaagaaaaagcagcacatctgccatatcgagggatgcggaaaggtttatggaaaaacaagccacctgcgtgctcatctgagatggcacaccggagagcgcccctttatctgcaactggatgttctgtggaaaacggtttaccaggagtgatgagctgcaacggcaccgccgaacccatactggggagaaaagatttgagtgtccagagtgctccaagagattcatgcgtagcgatcacctgagtaaacacgtcaagacccatcagaacaaaaagggaggaggaaccgctctggctatcgtgaccagcggggagctcgattccagtgtgactgaggtgttggggtccccccgcattgtcactgtggcggcaatctcccaggattctaatcccgccacccccaacgttagcaccaacatggaagagttttag

SEQ ID NO: 135349 - DNA, 2355 bp, Artificial Sequence
  derived and/or modified sequence
atgtcggaccaaaagaaagaggaagaagaggaagcggctgcagccgctgccatggcaaccgaaggaggaaagacatcagagcctgagaacaataataagaagcctaaaacctcaggttcacaggattcacaaccctcccccctagccctgctggccgcaacttgctctaaaatcggaacacctggcgaaaaccaagcaaccggccagcagcagataatcattgacccatcccagggcctagtccaactacaaaaccagcctcaacagctggagctggttactacacagttggccggtaacgcatggcagctggtggcctctactcccccagcaagcaaagagaacaacgtttctcaacctgcctcgtccagttcttccagcagttcgtctaacaacgggtctgccagtccaactaaaacgaagtcaggcaactcctcaacacctggacagtttcaggtaatccaagtccagaacccttcgggctcagtccagtaccaggtaattccacaactgcagacagtggaaggacaacagatccagatcaatcccaccagctcatccagtttacaggatcttcagggacagatacaattgatctccgcgggtaacaaccaagccatattaaccgcggcaaacaggactgctagcggaaacatcctagctcagaatctggcaaaccagaccgtcccggtgcagattcgtccaggcgtgtccattcccctgcagctccagacactcccaggcacccaagcccaggttgtcacgacactgcccattaatattggaggggttacgttagctctgcctgtgatcaacaacgtggcagccggtggaggtaccgggcaggtcggtcagcctgccgctactgcggactcaggaaccagcaacgggaatcagcttgtgtctactccaacaaacacgactacgagtgccagtacaatgccggagtcacccagctcaagcacaacttgtaccacaacagcctcaacctctctcacgtccagcgacacactcgtaagttccgccgatactggccagtatgcaagcactagtgccagctcttctgaaaggaccatagaggaaagccagacaccagctgcaaccgaaagcgaggcccagtcctctagccagctccaacccaacggaatgcagaacgctcaggaccagtctaactccctacagcaggtgcaaattgtggggcaaccgatcttgcagcaaatccagatccagcaaccgcaacagcagattattcaggctatccctccacaatcgttccaactgcagtcgggccagacaatccaaaccattcagcagcagcccctgcaaaatgtacagttgcaggccgttaaccccacacaggtgctgattagagcgcctacgctgacaccatctggccagataagttggcagacggtgcaggtacagaatatccagtcactgtccaatctgcaggtacagaacgccggtctgtctcagcagctgactattacaccagtgagttctagcggaggaacgacgttggcccagatcgcgccagtcgcagtggcgggagcgccaatcactcttaatacagcccagctcgccagcgtgccaaatctgcagacagtcagcgtggccaacctgggcgcagcaggagtgcaggtacagggggtacccgtgactatcactagcgttgctggacaacagcagggccaggacggggtgaaggtccaacaggcaaccattgccccagtgaccgtggcggtcggtggaatcgccaatgctaccattggagcggtctctccagaccagctgacacaagtgcacctccagcagggtcaacagaccagtgaccaggaggtacagcccggaaagaggctgcgcagagtagcgtgcagctgccccaattgccgcgaaggagaaggaagaggaagtaacgagcccggaaagaagaaacagcacatttgccatatagagggttgcggcaaagtctacggaaagactagccatttgcgggcacacttacgctggcatactggagagcgccctttcatttgtaattggatgttttgcggtaagagattcacccgatctgacgagctgcaaagacaccggcgaactcatacaggcgaaaaacggtttgagtgcccggagtgttctaaacggtttatgcgtagtgaccacttgtcaaaacacgtcaagacccatcagaataagaagggcggaggtactgccctcgccatcgtgacctcgggggagctcgattcgtcggttaccgaagtgctgggctctcctaggatcgtcactgtcgccgctatcagccaggacagtaaccctgctacccctaatgtctcgacaaatatggaagagttttag

SEQ ID NO: 135350 - DNA, 6126 bp, Artificial Sequence
  derived and/or modified sequence
atcaagggcgagtcagccgggctcgggcggagagaggagctgctacgccacagcccagcggcggccattcgcggaaaaagaggcagagcctgtgccagctacagcctcctccgagccaccgcgggcgggcgggaccggcctctcctcccgcctcgcccccacccccacccacctctatcccagtgtctccgtctgagggtttgtcctgttaatgcgggatgagcgatcagaagaaggaggaggaggaggaggcggcagcggcagcggcgatggctacagaaggagggaaaacctctgagccagagaataacaataaaaaacccaaaacctcaggctcccaggactctcagccctctcctctggctttactggcagctacttgcagcaaaatagggactcctggtgaaaatcaagcaactggacaacaacaaattattatagatccaagtcaaggattggtgcaacttcaaaatcaaccacaacagctagaactggtaacaacgcaacttgctggaaacgcttggcaacttgttgcctccactcctcctgcttcaaaagagaataacgtttctcaaccagcctctagttcgtctagttcttccagcagtaataacgggagtgcatctcctacaaaaactaaatcaggtaattcttccacccctggtcaatttcaagtcatacaagtacaaaatccaagtggtagtgtacagtaccaagtaattccacaacttcagacagtggaaggtcaacaaattcaaatcaatccaactagtagttcatctctacaggatttgcagggtcaaattcagctcatttctgcaggtaataatcaagctatactcacagctgctaacaggacagcttctgggaatattcttgctcaaaacctggcaaatcagacagttccggtccaaattagacctggtgtttcaataccactgcagttacagactcttcctggtactcaggctcaagttgtaacaaccctaccaattaacattggaggagtgactctagctttgccagtgataaacaacgtggctgccggaggagggactgggcaggttggccagcctgctgctactgctgatagtgggacttccaatgggaatcaattagtttccacacccaccaacaccactacttctgccagtactatgccagaatctccctcctcctccactacctgcacaaccactgcttcaacgtctttgacaagcagtgacacattagtgagctcagcagatactggccagtatgcaagcacatcagccagtagttctgaacgcaccattgaagaatctcaaacacctgctgctactgagtctgaagcccagagctccagtcagcttcagcctaatggaatgcagaatgcacaggatcaatcaaattctcttcagcaggtgcaaattgtaggccaacctatcttacagcagatccagatccaacagcctcagcaacagatcattcaggctattccaccacagtcgtttcaactccagtcagggcagacgattcagaccatccagcagcagcctttacagaatgttcaacttcaagcagtaaatccgactcaggtgcttatcagggctccaactttaacaccttcagggcaaatcagttggcaaactgtacaggttcagaatattcagagtctttcaaatttgcaagttcagaatgctgggttatcccaacaattaaccatcaccccagtgtcttcaagtggtggcacaactcttgctcagattgctcctgtggctgttgctggtgccccaataactttgaatactgcccagcttgcatcagtgcctaaccttcagacagtgagcgttgccaacctgggtgctgcaggtgttcaagtgcagggagttcccgttacaatcactagtgttgcaggtcagcagcaaggacaagatggagtaaaagtccagcaagctactatagctcctgtaactgtagcagttggaggaattgctaatgccacgataggtgctgttagtcctgaccaactcacacaagtgcatttgcagcaaggccagcagacttctgatcaagaggtacaacctggcaagaggcttcgaagagttgcctgttcctgtcctaattgtagggaaggagaaggaagaggcagtaatgaaccaggaaaaaagaagcagcatatctgtcatattgaaggatgtggtaaagtttatggcaaaacatctcatttacgagcacatcttcgctggcatactggagaaagaccttttatatgcaactggatgttttgtggcaaaagattcacacggagtgatgagctccagagacatagaagaacccatacaggtgaaaagagatttgaatgcccggaatgttctaaaaggtttatgcggagtgatcatctctccaaacatgtcaaaacgcaccagaataaaaaaggtggtgggacagctcttgccattgttacctcgggagaactggactcatctgttacagaggtgcttggctccccaagaattgtcacagttgcagccatttctcaagattcgaatccagcaactcccaatgtttcaaccaacatggaagaattctgaaaagttatttataacagagacctctagtgctgcacttgtttacacacctttgaaaatctggaaatgggctggtcaagtggattacagagtaggaaattatgttttcattcttggcttctttaagtattccagggtttggggtcaacacgtgaagtgttgaattttaaaaaatacaaaaagcagactgatgtactggaaacagaaaagtatttcctccatactataagttgtagttgtttggaaatatatcacataacctttatacagaatcttcccatctcttaatatcatgtgttaacatgtttaaaaagaccttagtagtttgcaggctggaccttaattggacttattttctttgaaagtactttgttataaattcagtcagtaataatttacgtgtattctttttctctatagcacagaaaacagatagttaactgatgatagggataatactgtatttccttagcttgatttttggaaaatcaaccgaaaatagtttggccgtcttttctaaatgttagaaattcttcaacagttgaattaggtaagttccaaaacagtaatctgagatgcatctcagatctttattaccactacattatagtagtgtgtatgcagacaatcagtgaagtccaattactttctccatttggagacacaagaggaacatagagttaaatcttaggttaaattttaggttgacaccttaggaaaatgctgggaaaaaaatggttaaaacaaaactcatcatagcttcagaaaaataaaatgaggcatcttaacatgcaatgttctaaagttaggattgattatattcctaaccctaggttgaaccacaaaatttcatttaaaatgtttatatttggaaatatttgcatagagtgtaaattgttctgtagtttcatattttgtaaatatgagttatgttgacaatgtgcagaattctttatgctttgatgtggtagccaaagaaagaattacacttttttccaaggccagcagaaaattctcttttaactacattgtaattcttgttttcctctactaaaaattggccagtcccattttatttctagtgctatgtaagaaggtaattaggaattataacacagtaatgtttttatgttacatcaataactgaattttccctaaaaattagcctaatatataatagatatattatgaagcaaaacttttatttttgaaaaggcagaataattttcagtgaagtaagtgactaaagaaaaaaactatattattgtttatgcaagggtcttacaggaaagggtctttttttttttttttttgagatggagtctcgctctcttgcccaggctggagtgcaatggcacgatctcagcttactgcaaccgccgcctcccaggttcaagcgattctcctgtcttagcctcctgagtagctgggattaacaggcgcctgccaccatgcctggctaatttttgtatttttagtagagacagggtttcgccatgttggccaggctggtttcaaactcctgacctcaggtgatctgcccacctcggcctcccagagtgctgggattacaggcatgagccaccatgcccggctaggaaagggtcttactaggaaagatggccaaaagtttcatatgaaaaaaattggattataaaccagtaacttaaatattaataaggatattttatgttttaaaaaagtatttacacagaatcataatcagtgaaattgaccatttgaaaactaaaagtttttacctacctgctcaatttattaacatcattgctttggggactgtttgaatataggtacgtgttttcttgtgcattctctataatttcaggaaaagtactaatgcgaattctcttccaaaattgtgatgtttcttgtatttttgatgaaggagaaatactgtaatgatcactgtttacactatgtacactttaggccagccctttgtagcgttatataaaactgaaggtcttttgtgctttcagtttgtataaaaaagctttgagattaaaggaaaaaaaaaatttttacactgtggttataaatttcaagtttcttaaagcttttgtagacttgtaacagagtctttaaatttaagttggattttgtaaattgttttgtatattttatttaatgtactcttaacaactgatgtatctggctttaaaacatcagaattggtttgttgttttgtttggtacagaggagcatttggtagtgttcattttaattttattatataggagctgaaacatcaaatatatattttatctatcattatgctacacaatcagtgctataaatttttttatgcaaagaaactttcttaatgttttaatcatgtttcctcagagtgacactttttgttgttgttaataccaagtatgaacactctgcatcattattccatgaaccagttctaatgcaaacctatgtatgtccattagaaatggaagttattttttaatcaacaatgaggcctattataaatttatcagatgaatctagatagctttatagcatataaaatatgttaatttgtgttagcaggtgcacatttcaccactgaaattagaaatattttgacagtctgttctgcataccattctgagtctacttttctgtctttagaagaatcgtaaatttcagtgtcctttatttgactcagtgggatatagctgttataagtaatagggcacagatgtgcagtagagtcttgtttaatggcatttcactgttcattccctttaccaccgttataaaacttttctttattgtaattatcagtgcaaagctatgtatttatcatggtaaaactccagtgttagaatagttttttcttacagtatactttctttggttaggtttgtgtatgtgttgctgattacattagaacttgatgttaagtcatttatcacactctcatgagagcagtaataaaagtgtgtaatctaggagaaaaagttaatttgtcaaacttagataagcatgatgtttaggtcctatttttcaattttataactgttttattgcaacaatatttgtatttaagtctccattttaatgccttgtggtgtttttttatgcatgtcactaagttgtcatcccacataaattgatgtgcagcatagggtattaaatctacataatgattttaaaacagaaatagttgatggtaaaatgtaaatgttttgcaaaaattccttataaaaagttttgtagtaacatttcacttgtaaattttttttgtaaaaaaaaaaaaatgaaaaaaaaagatgaatccagaaaaaaacctgtttcccatattctagaatttagacaattattctgccagcaaagcctctggggctgtaattgacatttttacagtgctgatttgtataaaatttgttttttgtggatttggaaataaaatcatgtacaagttgttgcctgcaataacaattgcaagtaacctattaaaaattcccttgagtttaacatgtttcatttaattatgtatactataaagcagcaataaattatttgaactatcaaccta

SEQ ID NO: 135351 - DNA, 806 bp, Artificial Sequence
  derived and/or modified sequence
gagtcagccgggctcgggcggagagaggagctgctacgccacagcccagcggcggccattcgcggaaaaagaggcagagcctgtgccagctacagcctcctccgagccaccgcgggcgggcgggaccggcctctcctcccgcctcgcccccacccccacccacctctatcccagtgtctccgtctgagggtttgtcctgttaatgcgggatgagcgatcagaagaaggaggaggaggaggaggcggcagcggcagcggcgatggctacagaaggagggaaaacctctgagccagagaataacaataaaaaacccaaaacctcaggctcccaggactctcagccctctcctctggctttactggcagctacttgcagcaaaatagggactcctggtgaaaatcaagcaactggacaacaacaacgcaacttgctggaaacgcttggcaacttgttgcctccactcctcctgcttcaaaagagaataacgtttctcaaccagcctctagttcgtctagttcttccagcagtaataacgggagtgcatctcctacaaaaactaaatcaggtaattcttccacccctggtcaatttcaagtcatacaagtacaaaatccaagtggtagtgtacagtaccaagtaattccacaacttcagacagtggaaggtcaacaaattcaaatcaatccaactagtagttcatctctacaggatttgcagggtcaaattcagctcatttctgcaggtaataatcaagctatactcacagctgctaacaggacagcttctgggaatattcttgctcaaa

SEQ ID NO: 135352 - DNA, 2355 bp, Artificial Sequence
  derived and/or modified sequence
atgagcgaccagaagaaggaggaggaggaggaggccgccgccgccgccgccatggccaccgagggcggcaagaccagcgagcccgagaacaacaacaagaagcccaagaccagcggcagccaggacagccagcccagccccctggccctgctggccgccacctgcagcaagatcggcacccccggcgagaaccaggccaccggccagcagcagatcatcatcgaccccagccagggcctggtgcagctgcagaaccagccccagcagctggagctggtgaccacccagctggccggcaacgcctggcagctggtggccagcaccccccccgccagcaaggagaacaacgtgagccagcccgccagcagcagcagcagcagcagcagcagcaacaacggcagcgccagccccaccaagaccaagagcggcaacagcagcacccccggccagttccaggtgatccaggtgcagaaccccagcggcagcgtgcagtaccaggtgatcccccagctgcagaccgtggagggccagcagatccagatcaaccccaccagcagcagcagcctgcaggacctgcagggccagatccagctgatcagcgccggcaacaaccaggccatcctgaccgccgccaacagaaccgccagcggcaacatcctggcccagaacctggccaaccagaccgtgcccgtgcagatcagacccggcgtgagcatccccctgcagctgcagaccctgcccggcacccaggcccaggtggtgaccaccctgcccatcaacatcggcggcgtgaccctggccctgcccgtgatcaacaacgtggccgccggcggcggcaccggccaggtgggccagcccgccgccaccgccgacagcggcaccagcaacggcaaccagctggtgagcacccccaccaacaccaccaccagcgccagcaccatgcccgagagccccagcagcagcaccacctgcaccaccaccgccagcaccagcctgaccagcagcgacaccctggtgagcagcgccgacaccggccagtacgccagcaccagcgccagcagcagcgagagaaccatcgaggagagccagacccccgccgccaccgagagcgaggcccagagcagcagccagctgcagcccaacggcatgcagaacgcccaggaccagagcaacagcctgcagcaggtgcagatcgtgggccagcccatcctgcagcagatccagatccagcagccccagcagcagatcatccaggccatccccccccagagcttccagctgcagagcggccagaccatccagaccatccagcagcagcccctgcagaacgtgcagctgcaggccgtgaaccccacccaggtgctgatcagagcccccaccctgacccccagcggccagatcagctggcagaccgtgcaggtgcagaacatccagagcctgagcaacctgcaggtgcagaacgccggcctgagccagcagctgaccatcacccccgtgagcagcagcggcggcaccaccctggcccagatcgcccccgtggccgtggccggcgcccccatcaccctgaacaccgcccagctggccagcgtgcccaacctgcagaccgtgagcgtggccaacctgggcgccgccggcgtgcaggtgcagggcgtgcccgtgaccatcaccagcgtggccggccagcagcagggccaggacggcgtgaaggtgcagcaggccaccatcgcccccgtgaccgtggccgtgggcggcatcgccaacgccaccatcggcgccgtgagccccgaccagctgacccaggtgcacctgcagcagggccagcagaccagcgaccaggaggtgcagcccggcaagagactgagaagagtggcctgcagctgccccaactgcagagagggcgagggcagaggcagcaacgagcccggcaagaagaagcagcacatctgccacatcgagggctgcggcaaggtgtacggcaagaccagccacctgagagcccacctgagatggcacaccggcgagagacccttcatctgcaactggatgttctgcggcaagagattcaccagaagcgacgagctgcagagacacagaagaacccacaccggcgagaagagattcgagtgccccgagtgcagcaagagattcatgagaagcgaccacctgagcaagcacgtgaagacccaccagaacaagaagggcggcggcaccgccctggccatcgtgaccagcggcgagctggacagcagcgtgaccgaggtgctgggcagccccagaatcgtgaccgtggccgccatcagccaggacagcaaccccgccacccccaacgtgagcaccaacatggaggagttctag

SEQ ID NO: 135353 - protein, 879 aa, Artificial Sequence
  derived and/or modified sequence
MAGGGGDLSTRRLNECISPVANEMNHLPAHSHDLQRMFTEDQGVDDRLLYDIVFKHFKRNKVEISNAIKKTFPFLEGLRDRDLITNKMFEDSQDSCRNLVPVQRVVYNVLSELEKTFNLPVLEALFSDVNMQEYPDLIHIYKGFENVIHDKLPLQESEEEEREERSGLQLSLEQGTGENSFRSLTWPPSGSPSHAGTTPPENGLSEHPCETEQINAKRKDTTSDKDDSLGSQQTNEQCAQKAEPTESCEQIAVQVNNGDAGREMPCPLPCDEESPEAELHNHGIQINSCSVRLVDIKKEKPFSNSKVECQAQARTHHNQASDIIVISSEDSEGSTDVDEPLEVFISAPRSEPVINNDNPLESNDEKEGQEATCSRPQIVPEPMDFRKLSTFRESFKKRVIGQDHDFSESSEEEAPAEASSGALRSKHGEKAPMTSRSTSTWRIPSRKRRFSSSDFSDLSNGEELQETCSSSLRRGSGSQPQEPENKKCSCVMCFPKGVPRSQEARTESSQASDMMDTMDVENNSTLEKHSGKRRKKRRHRSKVNGLQRGRKKDRPRKHLTLNNKVQKKRWQQRGRKANTRPLKRRRKRGPRIPKDENINFKQSELPVTCGEVKGTLYKERFKQGTSKKCIQSEDKKWFTPREFEIEGDRGASKNWKLSIRCGGYTLKVLMENKFLPEPPSTRKKRILESHNNTLVDPCEEHKKKNPDASVKFSEFLKKCSETWKTIFAKEKGKFEDMAKADKAHYEREMKTYIPPKGEKKKKFKDPNAPKRPPLAFFLFCSEYRPKIKGEHPGLSIDDVVKKLAGMWNNTAAADKQFYEKKAAKLKEKYKKDIAAYRAKGKPNSAKKRVVKAEKSKKKKEEEEDEEDEQEEENEEDDDK

SEQ ID NO: 135354 - protein, 473 aa, Artificial Sequence
  derived and/or modified sequence
MAGGGGDLSTRRLNECISPVANEMNHLPAHSHDLQRMFTEDQGVDDRLLYDIVFKHFKRNKVEISNAIKKTFPFLEGLRDRDLITNKMFEDSQDSCRNLVPVQRVVYNVLSELEKTFNLPVLEALFSDVNMQEYPDLIHIYKGFENVIHDKLPLQESEEEEREERSGLQLSLEQGTGENSFRSLTWPPSGSPSHAGTTPPENGLSEHPCETEQINAKRKDTTSDKDDSLGSQQTNEQCAQKAEPTESCEQIAVQVNNGDAGREMPCPLPCDEESPEAELHNHGIQINSCSVRLVDIKKEKPFSNSKVECQAQARTHHNQASDIIVISSEDSEGSTDVDEPLEVFISAPRSEPVINNDNPLESNDEKEGQEATCSRPQIVPEPMDFRKLSTFRESFKKRVIGQDHDFSESSEEEAPAEASSGALRSKHGEKAPMTSRSTSTWRIPSRKRQLKKKKKKKQCHPQPQPQRGLLEQS

SEQ ID NO: 135355 - protein, 480 aa, Artificial Sequence
  derived and/or modified sequence
MAGGGGDLSTRRLNECISPVANEMNHLPAHSHDLQRMFTEDQGVDDRLLYDIVFKHFKRNKVEISNAIKKTFPFLEGLRDRDLITNKMFEDSQDSCRNLVPVQRVVYNVLSELEKTFNLPVLEALFSDVNMQEYPDLIHIYKGFENVIHDKLPLQESEEEEREERSGLQLSLEQGTGENSFRSLTWPPSGSPSHAGTTPPENGLSEHPCETEQINAKRKDTTSDKDDSLGSQQTNEQCAQKAEPTESCEQIAVQVNNGDAGREMPCPLPCDEESPEAELHNHGIQINSCSVRLVDIKKEKPFSNSKVECQAQARTHHNQASDIIVISSEDSEGSTDVDEPLEVFISAPRSEPVINNDNPLESNDEKEGQEATCSRPQIVPEPMDFRKLSTFRESFKKRVIGQDHDFSESSEEEAPAEASSGALRSKHGEKAPMTSRSTSTWRIPSRKRRFSSSDFSDLSNGEELQETCSSSLRRGSGKED

SEQ ID NO: 135356 - DNA, 3688 bp, Artificial Sequence
  derived and/or modified sequence
atttgggcggagccctttctgagtcagtctgtcggccgacttcctgcttggggcctgggcagccacactgcacgcaggctgggccgactgaggggctcagaggccaggctctgaggcccacgcagggcctagggtgggaagatggcaggtgggggcggcgacctgagcaccaggaggctgaatgaatgtatttcaccagtagcaaatgagatgaaccatcttcctgcacacagccacgatttgcaaaggatgttcacggaagaccagggtgtagatgacaggctgctctatgacattgtattcaagcacttcaaaagaaataaggtggagatttcaaatgcaataaaaaagacatttccattcctcgagggcctccgtgatcgtgatctcatcacaaataaaatgtttgaagattctcaagattcttgtagaaacctggtccctgtacagagagtggtgtacaatgttcttagtgaactggagaagacatttaacctgccagttctggaagcactgttcagcgatgtcaacatgcaggaataccccgatttaattcacatttataaaggctttgaaaatgtaatccatgacaaattgcctctccaagaaagtgaagaagaagagagggaggagaggtctggcctccaactaagtcttgaacaaggaactggtgaaaactcttttcgaagcctgacttggccaccttcgggttccccatctcatgctggtacaaccccacctgaaaatggactctcagagcacccctgtgaaacagaacagataaatgcaaagagaaaagatacaaccagtgacaaagatgattcgctaggaagccaacaaacaaatgaacaatgtgctcaaaaggctgagccaacagagtcctgcgaacaaattgctgtccaagtgaataatggggatgctggaagggagatgccctgcccgttgccctgtgatgaagaaagcccagaggcagagctacacaaccatggaatccaaattaattcctgttctgtgcgactggtggatataaaaaaggaaaagccattttctaattcaaaagttgagtgccaagcccaagcaagaactcatcataaccaggcatctgacataatagtcatcagcagtgaggactctgaaggatccactgacgttgatgagcccttagaagtcttcatctcagcaccgagaagtgagcctgtgatcaataatgacaaccctttagaatcaaatgatgaaaaggagggccaagaagccacttgctcacgaccccagattgtaccagagcccatggatttcagaaaattatctacattcagagaaagttttaagaaaagagtgataggacaagaccacgacttttcagaatccagtgaggaggaggcgcccgcagaagcctcgagcggggcactgagaagcaagcatggtgagaaggctcctatgacttctagaagtacatctacttggagaatacccagcaggaagagacgtttcagcagtagtgacttttcagacctgagtaatggagaagagcttcaggaaacctgcagctcatccctaagaagagggtcaggatcacagccacaagaacctgaaaataagaagtgctcctgtgtcatgtgttttccaaaaggtgtgccaagaagccaagaagcaaggactgaaagtagtcaagcatctgacatgatggataccatggatgttgaaaacaattctactttggaaaaacacagtgggaaaagaagaaaaaagagaaggcatagatctaaagtaaatggtctccaaagagggagaaagaaagacagacctagaaaacatttaactctgaataacaaagtccaaaagaaaagatggcaacaaagaggaagaaaagccaacactagacctttgaaaagaagaagaaaaagaggtccaagaattcccaaagatgaaaatattaattttaaacaatctgaacttcctgtgacctgtggtgaggtgaagggcactctatataaggagcgattcaaacaaggaacctcaaagaagtgtatacagagtgaggataaaaagtggttcactcccagggaatttgaaattgaaggagaccgcggagcatccaagaactggaagctaagtatacgctgcggtggatataccctgaaagtcctgatggagaacaaatttctgccagaaccaccaagcacaagaaaaaagagaatactggaatctcacaacaataccttagttgacccttgtgaggagcataagaagaagaacccagatgcttcagtcaagttctcagagtttttaaagaagtgctcagagacatggaagaccatttttgctaaagagaaaggaaaatttgaagatatggcaaaggcggacaaggcccattatgaaagagaaatgaaaacctatatccctcctaaaggggagaaaaaaaagaagttcaaggatcccaatgcacccaagaggcctcctttggcctttttcctgttctgctctgagtatcgcccaaaaatcaaaggagaacatcctggcctgtccattgatgatgttgtgaagaaactggcagggatgtggaataacaccgctgcagctgacaagcagttttatgaaaagaaggctgcaaagctgaaggaaaaatacaaaaaggatattgctgcatatcgagctaaaggaaagcctaattcagcaaaaaagagagttgtcaaggctgaaaaaagcaagaaaaagaaggaagaggaagaagatgaagaggatgaacaagaggaggaaaatgaagaagatgatgataaataagttgcttctagtgcagtttttttcttgtctataaagcatttaagctgcctgtacacaactcactccttttaaagaaaaaaacttcaacgtaagactgtgtaagatttgtttttaaaccgtacactgtgtttttttgtatagttaaccactaccgaatgtgtcttcagatagccctgtcctggtggtatttagccactaacctttgcctggtacagtatgggggttgtaaattggcatggaaatttaaagcaggttcttgttagtgcacagcacaaattagttgtatatgaggatggtagttttttcaccttcagttgtctctgatgtagcttatacaaaacatttgttgttctgttaactgaatgccactctgtaattgcaaaaaaaaaaaacagttgcagctgttttgttgacattctgaatgcttctaagtaaatacaatttttaaaaaaccgtatgagggaactgtgtagacaaggtaccaggtcagtcttcttccatgtctattagctccacaaagccaatctcaatccctcaaaacaatcttgtcatacttgaaaatatgacactctagtcaaagccttggtaaaataatcagtgtttccaatctgtcctgttacaaaagaaacagattattattgaacttatgcaaataaccattgtcataagaatgtttatgaatagtttccaaattatggcaaattcatgtagagagagaaaagtaactgttttggttttgctcacaaaagtctactttacctaagggctgtcagatataagtaacttaaaagaaagagaagttttcttgacttttgaaaacaaaatatgaaaagaatcggcaatgtttcaaacaaaaagtcataaaagtcactttattcctccatcaaaaaaaaaaaaaaaaaaaaaa

SEQ ID NO: 135357 - DNA, 2640 bp, Artificial Sequence
  derived and/or modified sequence
atggccggcggcggcggcgacctgagcaccagaagactgaacgagtgcatcagccccgtggccaacgagatgaaccacctgcccgcccacagccacgacctgcagagaatgttcaccgaggaccagggcgtggacgacagactgctgtacgacatcgtgttcaagcacttcaagagaaacaaggtggagatcagcaacgccatcaagaagaccttccccttcctggagggcctgagagacagagacctgatcaccaacaagatgttcgaggacagccaggacagctgcagaaacctggtgcccgtgcagagagtggtgtacaacgtgctgagcgagctggagaagaccttcaacctgcccgtgctggaggccctgttcagcgacgtgaacatgcaggagtaccccgacctgatccacatctacaagggcttcgagaacgtgatccacgacaagctgcccctgcaggagagcgaggaggaggagagagaggagagaagcggcctgcagctgagcctggagcagggcaccggcgagaacagcttcagaagcctgacctggccccccagcggcagccccagccacgccggcaccaccccccccgagaacggcctgagcgagcacccctgcgagaccgagcagatcaacgccaagagaaaggacaccaccagcgacaaggacgacagcctgggcagccagcagaccaacgagcagtgcgcccagaaggccgagcccaccgagagctgcgagcagatcgccgtgcaggtgaacaacggcgacgccggcagagagatgccctgccccctgccctgcgacgaggagagccccgaggccgagctgcacaaccacggcatccagatcaacagctgcagcgtgagactggtggacatcaagaaggagaagcccttcagcaacagcaaggtggagtgccaggcccaggccagaacccaccacaaccaggccagcgacatcatcgtgatcagcagcgaggacagcgagggcagcaccgacgtggacgagcccctggaggtgttcatcagcgcccccagaagcgagcccgtgatcaacaacgacaaccccctggagagcaacgacgagaaggagggccaggaggccacctgcagcagaccccagatcgtgcccgagcccatggacttcagaaagctgagcaccttcagagagagcttcaagaagagagtgatcggccaggaccacgacttcagcgagagcagcgaggaggaggcccccgccgaggccagcagcggcgccctgagaagcaagcacggcgagaaggcccccatgaccagcagaagcaccagcacctggagaatccccagcagaaagagaagattcagcagcagcgacttcagcgacctgagcaacggcgaggagctgcaggagacctgcagcagcagcctgagaagaggcagcggcagccagccccaggagcccgagaacaagaagtgcagctgcgtgatgtgcttccccaagggcgtgcccagaagccaggaggccagaaccgagagcagccaggccagcgacatgatggacaccatggacgtggagaacaacagcaccctggagaagcacagcggcaagagaagaaagaagagaagacacagaagcaaggtgaacggcctgcagagaggcagaaagaaggacagacccagaaagcacctgaccctgaacaacaaggtgcagaagaagagatggcagcagagaggcagaaaggccaacaccagacccctgaagagaagaagaaagagaggccccagaatccccaaggacgagaacatcaacttcaagcagagcgagctgcccgtgacctgcggcgaggtgaagggcaccctgtacaaggagagattcaagcagggcaccagcaagaagtgcatccagagcgaggacaagaagtggttcacccccagagagttcgagatcgagggcgacagaggcgccagcaagaactggaagctgagcatcagatgcggcggctacaccctgaaggtgctgatggagaacaagttcctgcccgagccccccagcaccagaaagaagagaatcctggagagccacaacaacaccctggtggacccctgcgaggagcacaagaagaagaaccccgacgccagcgtgaagttcagcgagttcctgaagaagtgcagcgagacctggaagaccatcttcgccaaggagaagggcaagttcgaggacatggccaaggccgacaaggcccactacgagagagagatgaagacctacatcccccccaagggcgagaagaagaagaagttcaaggaccccaacgcccccaagagaccccccctggccttcttcctgttctgcagcgagtacagacccaagatcaagggcgagcaccccggcctgagcatcgacgacgtggtgaagaagctggccggcatgtggaacaacaccgccgccgccgacaagcagttctacgagaagaaggccgccaagctgaaggagaagtacaagaaggacatcgccgcctacagagccaagggcaagcccaacagcgccaagaagagagtggtgaaggccgagaagagcaagaagaagaaggaggaggaggaggacgaggaggacgagcaggaggaggagaacgaggaggacgacgacaagtag

SEQ ID NO: 135358 - DNA, 2640 bp, Artificial Sequence
  derived and/or modified sequence
atggctggaggtggaggggacttatctacaaggcggctgaatgagtgtatctctcctgtcgccaacgagatgaatcatctccccgcccacagtcacgacttacagcggatgttcaccgaggatcagggtgtcgacgatcggcttctgtacgacattgtgttcaagcactttaaacgaaataaggttgagatttctaacgcgatcaagaagacctttccatttttggaagggctgcgggatcgcgaccttatcacaaacaagatgtttgaagatagccaggatagctgcagaaatctggtgcccgtccagcgcgtcgtgtataatgttttgagtgagttagagaaaactttcaatcttccagtcttagaggcactcttctcagacgttaacatgcaggagtaccccgacctcatccacatttataaagggtttgagaacgttattcatgataagctcccgctccaagagtccgaagaagaggagagagaggaacgttctggactgcaattgagcctggagcagggcacaggcgagaattctttcaggagcctgacctggccaccaagtggctctccctcccatgctggaacaactccacccgagaatgggttgagcgagcacccctgtgaaaccgagcagatcaacgccaagcggaaggataccacctcggacaaagacgactccctcggcagtcaacaaacaaatgaacagtgcgctcaaaaagctgagccaactgagtcctgtgagcagatcgcagtgcaggtcaacaacggggatgccgggcgcgagatgccatgtccgttgccctgcgacgaggaatctccagaggctgagctgcataaccacggtattcagattaatagttgttctgtaaggctggtcgacatcaagaaggagaaaccgttctctaattccaaagtggagtgtcaggcccaagcgcggacacaccacaatcaggcatctgacattatcgtgatttctagtgaagacagcgaggggagcaccgatgtagacgagcctctcgaggttttcatctccgccccaagatcggagccagtaattaataatgacaatccactcgagagtaacgatgaaaaggaagggcaggaggcaacttgctcccgcccgcagattgtccctgaaccgatggattttaggaagctgtccacgtttagagagagcttcaagaagagagtaattgggcaggaccatgacttctccgaaagcagtgaggaggaggccccagctgaagctagcagcggggcactgcggagcaagcatggcgagaaggcccccatgaccagccgctccactagcacctggaggataccgagcagaaagcgtcgattttcctctagcgattttagtgatctgtcaaacggcgaagagctccaggaaacttgttcgtcctcgttgagacggggtagcggtagtcagcctcaagaaccagaaaataagaagtgtagctgtgtaatgtgctttcctaaaggagtcccgcggtctcaggaggcgcgcacggaatcctctcaggcttcagacatgatggataccatggacgtggagaacaactcgacgttggaaaaacactcaggtaaacgtcggaagaagagaaggcacaggtcaaaagtgaacggacttcagagggggcgcaaaaaggatcgccccagaaagcaccttacgttgaataataaagtgcagaaaaaaaggtggcagcagagaggccgaaaggctaacacacggcctctcaaaaggaggcggaaacgcggccccaggatcccaaaggatgagaatattaattttaaacagtcagagctgcccgtcacctgcggagaagtgaaggggacgctctacaaagagcgcttcaaacagggcaccagtaaaaaatgcatccagtcagaggacaagaagtggtttaccccacgtgagttcgaaatcgagggagatcggggtgcgagcaagaactggaaactgagcatcagatgcggtgggtacactctgaaggtgctcatggaaaataagtttctccccgagccaccaagcactcgcaaaaagcgaatactcgagagccacaataacaccctggtagatccttgcgaggagcacaagaagaagaatccggacgcatccgtgaagttttctgaatttcttaagaaatgttctgagacgtggaagacaattttcgccaaggaaaagggtaagtttgaagacatggcaaaggctgacaaagctcattacgagcgggagatgaaaacctacatcccgcccaagggtgagaagaagaagaaattcaaagatcctaatgcacccaaacgccctcccctggcattttttctattttgttctgagtataggcccaaaatcaaaggggaacatcccggcttgtctattgatgacgtcgtcaaaaaactggctggcatgtggaataacaccgcagccgcggacaagcagttttatgagaaaaaggcggcgaaacttaaggagaagtataaaaaagacatagcagcgtatcgtgcgaaaggcaaaccgaatagtgcaaaaaagcgcgtggtcaaagccgagaagtcaaaaaaaaagaaggaagaagaggaggatgaggaagacgagcaggaggaagagaacgaggaagatgatgataagtag

SEQ ID NO: 135359 - DNA, 2640 bp, Artificial Sequence
  derived and/or modified sequence
atggccggcggcggcggggacctgagcacccggcggctgaatgaatgcatcagccctgtggccaatgagatgaaccacctgcctgcccacagccatgacctgcagaggatgttcacagaggaccagggcgtggatgaccggctgctgtatgacatcgtgttcaagcacttcaagaggaacaaggtggagatcagcaatgccatcaagaagaccttccccttcctggagggcctgcgggaccgggacctgatcaccaacaagatgtttgaggacagccaggacagctgcaggaacctggtgcctgtgcagagggtggtgtacaacgtgctgtctgagctggagaagaccttcaacctgcctgtgctggaggccctcttcagtgatgtgaacatgcaggagtacccagacctgatccacatctacaagggctttgaaaatgtcatccatgacaagctgcccctgcaggagagcgaggaggaggagcgggaggagaggagcggcctgcagctgagcctggagcagggcaccggggagaacagcttccgcagcctgacctggcccccatctggcagccccagccatgctggcaccaccccaccagaaaatggcctgtctgagcacccctgtgaaacagagcagatcaatgccaagaggaaggacaccaccagtgacaaggatgacagcctgggcagccagcagaccaatgagcagtgtgcccagaaggccgagcccacagagagctgtgagcagattgctgtgcaggtgaacaatggagatgctggccgggagatgccctgccccctgccctgtgatgaggagagccctgaggccgagctgcacaaccacggcatccagatcaacagctgcagcgtgcggctggtggacatcaagaaggagaagcccttcagcaacagcaaggtggagtgccaggcccaggcccggacccaccacaaccaggccagtgacatcatcgtcatcagcagtgaagattctgagggcagcacagatgtggatgagcccctggaggtgttcatcagcgcccccaggtctgagcccgtcatcaacaatgacaaccccctggagagcaatgatgagaaggagggccaggaggccacctgcagccggccccagatcgtgcctgagcccatggacttcaggaagctgagcaccttccgggagagcttcaagaagagggtcatcggccaggaccatgacttcagcgagagcagcgaggaggaggccccagctgaggccagcagcggggccctgcggagcaagcatggagagaaggcccccatgaccagccgcagcaccagcacctggaggatccccagcaggaagaggcgcttcagcagcagtgacttcagtgacctgagcaatggagaggagctgcaggagacctgcagcagcagcctgcggcggggcagcggcagccagccccaggagcctgagaacaagaagtgcagctgtgtgatgtgcttccccaagggcgtgcccaggagccaggaggccaggacagagagcagccaggccagtgacatgatggacaccatggatgtggagaacaacagcaccctggagaagcacagcggcaagaggaggaagaagagaagacacaggagcaaggtgaatggcctgcagaggggcaggaagaaggaccggcccaggaagcacctgaccctgaacaacaaggtgcagaagaagcgctggcagcagaggggcaggaaggccaacacccggcccctgaagagaagaaggaagaggggcccccgcatccccaaggatgagaacatcaacttcaagcagagcgagctgcctgtgacctgtggggaggtgaagggcaccctgtacaaggagcgcttcaagcagggcaccagcaagaagtgcatccagagcgaggacaagaagtggttcaccccccgggagtttgaaattgaaggagacagaggagccagcaagaactggaagctgagcatccgctgtggcggctacaccctgaaggtgctgatggagaacaagttcctgcctgagccccccagcaccaggaagaagaggatcctggagagccacaacaacaccctggtggacccctgtgaggagcacaagaagaagaacccagatgcctctgtgaagttcagcgagttcctgaagaagtgcagcgagacctggaagaccatctttgccaaggagaagggcaagtttgaggacatggccaaggctgacaaggcccactatgagcgggagatgaagacctacatcccccccaagggggagaagaagaagaagttcaaggaccccaatgcccccaagaggcctcccctggccttcttcctgttctgcagcgagtaccggcccaagatcaagggggagcaccctggcctgagcattgatgatgtggtgaagaagctggccggcatgtggaacaacacagctgctgctgacaagcagttctatgagaagaaggccgccaagctgaaggagaagtacaagaaggacattgctgcctaccgggccaagggcaagcccaacagcgccaagaagagggtggtgaaggccgagaagagcaagaagaagaaggaggaggaggaggatgaggaggatgagcaggaggaggagaatgaagaagatgatgacaagtag

SEQ ID NO: 135360 - DNA, 2640 bp, Artificial Sequence
  derived and/or modified sequence
atggccggcggcggcggcgacctgagcacccggcggctgaacgagtgcatctctccagtagcaaatgagatgaaccacttgcccgcccattcgcatgacctgcaacgaatgtttacagaagatcaaggcgtagacgatcggcttttgtacgatattgtgtttaagcactttaagcgcaataaagtcgagattagcaatgccattaagaagacctttcctttcttggagggcctcagggaccgagatctcatcaccaataagatgttcgaagacagccaggatagctgccgtaacctcgtgccggtccagagagtcgtgtataatgtcctgagcgagctggagaagaccttcaaccttcccgtgcttgaagcgctctttagtgacgtcaacatgcaggagtatcccgatctgatccacatctacaagggcttcgagaacgtaatccacgacaagttgcccctacaagaaagtgaggaggaggagagggaagaacggagcggcctccagttatccttagaacaggggacgggtgaaaatagcttccggagcctcacatggcccccgagtgggtccccaagtcacgccggtacaaccccacccgagaacggcttgtctgaacacccgtgtgagacagagcagatcaacgccaaacgaaaggacaccacatccgacaaggacgatagccttggctcccaacaaaccaacgagcaatgtgcccagaaggcagaaccgaccgaaagctgcgaacagatagcggtgcaggtgaacaacggagacgccggacgtgaaatgccttgtccattgccttgtgacgaggaaagcccagaggcagagcttcataatcatggcatacaaattaatagctgctctgtgagactcgtggatataaagaaggaaaagcccttttcaaattcaaaggttgagtgtcaggcccaggccagaacacatcacaaccaagccagcgatattattgttatatccagtgaagactctgaggggagcactgatgtggacgagcctctggaggtgttcatcagcgccccgcgatcagagcctgtgattaacaacgacaaccccttagaatcgaatgacgagaaagagggacaggaggcgacgtgtagcagaccccagattgtcccggaacccatggactttcggaagctctctacgttcagagaaagttttaaaaagagagtgattggtcaggaccacgatttttccgaaagctctgaggaagaagctcccgccgaggcatcatccggcgccttgcgcagcaaacatggagagaaggctccaatgactagccgcagcacctcaacctggagaattccgtcacgaaaaagacgcttttctagttctgattttagcgacctctcaaatggagaagaattgcaggagacttgctctagcagcctaaggagaggttcaggaagccagcctcaggaacccgagaataagaaatgcagttgtgtaatgtgttttcctaaaggcgttccccgtagccaggaggcccgaacagaaagctctcaggcttcagatatgatggatactatggacgttgaaaataactcaactctggagaagcactccggcaaaagacgtaagaaacggcgacataggtcaaaggtcaacgggctgcagagaggtagaaagaaggaccgccccagaaagcaccttaccctgaataacaaagtgcagaagaagcgctggcagcagcgcggcaggaaggcaaacacgcgaccactgaagcgaaggagaaagaggggcccacgtattccaaaggatgagaacatcaactttaagcagagcgagctccctgttacctgcggtgaggtcaaagggacattgtacaaggaacgattcaagcagggtactagtaagaagtgtattcagtccgaggataagaagtggttcactccacgcgaattcgagatagagggggaccggggcgccagcaaaaactggaaattgtcaatccgctgtggaggctataccctgaaagttctgatggagaacaagttccttcccgagcctccatctactaggaaaaagcgcattctggagagtcacaacaacaccctggttgacccttgtgaggaacacaagaagaaaaatccagacgcctctgtgaaattctccgaatttctgaagaaatgcagtgaaacctggaagacgatatttgcaaaagaaaaaggcaaatttgaagatatggcaaaggccgataaagcgcactatgaaagagagatgaaaacttatatcccacctaagggcgagaagaaaaagaagttcaaagatccaaacgcccccaagcggccaccactggccttttttctgttctgtagtgagtacaggcctaagattaagggagaacatccgggtctgagtattgacgacgttgtgaaaaaacttgccggtatgtggaataacactgctgctgctgacaaacagttttatgaaaaaaaggcagcaaaactgaaggagaagtacaagaaggacatagccgcctaccgggccaagggaaagccgaactccgctaagaaaagagtggtcaaggccgaaaaatccaaaaaaaaaaaggaggaggaggaggacgaggaagatgaacaggaggaagaaaatgaagaagacgatgacaagtag

SEQ ID NO: 135361 - DNA, 2640 bp, Artificial Sequence
  derived and/or modified sequence
atggccggaggaggtggggatttgtccactaggagacttaatgaatgtatctctcctgtcgccaacgaaatgaatcaccttcccgctcacagccacgatcttcaaagaatgttcacagaggatcagggtgtagatgaccggctgctctacgatattgtgtttaaacatttcaagaggaataaagtggaaatctcaaacgcgataaaaaagaccttcccattcctcgaggggctgcgggatagggatctgataacaaataaaatgttcgaagactcgcaggattcctgccggaaccttgtgcctgtacagagagtagtatacaacgtgctgtccgagctagaaaaaacatttaatcttcctgtgctcgaagctttattctccgatgtgaacatgcaggaataccccgatctgattcatatttacaaaggatttgaaaatgttattcatgacaagctgccactccaggagtcggaagaggaagagcgggaggaaagaagcggtctgcagctgagcctcgaacaggggactggcgaaaatagctttagatccttgacatggcctccgtccggttctccttcccacgcagggactacccccccagagaacggtctgtccgagcacccctgcgagaccgaacaaattaacgccaagaggaaggataccacttccgataaggatgacagcctgggaagccaacaaactaacgagcagtgcgctcagaaggccgaacctacagaaagttgtgaacagatagctgtgcaagtcaacaatggagacgcaggtagagaaatgccttgccctctcccctgtgatgaagagagccctgaggcagagctccataatcacggcatccaaatcaactcatgttctgtccggctggttgatattaaaaaagaaaaacctttctcaaattcgaaggtggaatgccaggctcaggcacgcactcatcacaatcaggcctctgacattatcgtgatctctagcgaggatagtgagggtagcaccgatgtggatgagcccctggaggtttttataagcgctccaagatcggaacccgtgatcaacaacgataatcctctggagagcaacgatgagaaggagggccaggaggccacgtgcagtaggcctcaaatcgtacctgagccgatggattttcggaagctgtccacctttcgagagtcctttaaaaagagagttatagggcaagatcatgacttttccgagagctccgaagaagaggcaccagccgaggcgagcagtggcgcactgcgatcaaagcacggcgagaaggcacccatgacgtcaaggtcaacaagtacatggcgaataccatctcggaagagacggttttcaagttctgacttctccgacctgtctaatggcgaggaactgcaggagacttgctccagctcactgagacgaggcagcgggagccaaccacaggagcctgaaaataaaaagtgctcctgcgtaatgtgtttcccaaagggcgttccgcgttctcaagaggctcgcacagaatctagccaggcttcagatatgatggatacgatggacgttgaaaacaactcaaccttagagaaacacagtggaaagcggaggaaaaagcgcagacataggagtaaagtcaacggactgcagaggggcaggaaaaaggaccgacctagaaagcacctgacattaaataataaggtgcagaagaaaagatggcagcaacgcggaaggaaggctaatacgcgacctctgaagcggagacggaagcggggtccaagaattccaaaagacgaaaacataaactttaagcaaagcgaattacctgtgacctgtggagaggtaaaaggcaccctttataaagaacggttcaagcaaggaacgtcgaagaaatgcatacagtcagaagataagaaatggtttaccccaagggagtttgagatcgagggcgaccggggtgcaagtaaaaattggaaactgtctatccggtgcggaggttataccctgaaggtgctcatggagaacaagtttctgccggagccaccatctacaaggaagaagcggatactggagtcacacaacaataccctggtggacccatgcgaggaacataaaaagaaaaaccccgacgcctctgtgaaattttccgaattcttgaaaaaatgcagcgagacctggaaaaccatctttgctaaagagaaaggcaagttcgaagatatggctaaagcagacaaagcccactacgagagggagatgaaaacttatattccgccaaaaggcgagaaaaaaaaaaagttcaaggatcccaacgcgcctaaacgacctcccctggctttttttcttttttgctctgagtatagacccaaaatcaagggtgaacacccgggtctttcaatagatgacgtcgtcaagaaactggctgggatgtggaataatacggcagcagcggacaaacagttttacgaaaaaaaggccgcaaagctgaaagagaaatataaaaaagatattgcagcataccgagctaaggggaagccgaacagtgcaaagaaaagggtcgttaaggctgaaaaaagtaagaaaaaaaaagaggaggaggaggatgaagaggatgaacaggaggaggaaaacgaggaggacgatgataaatag

SEQ ID NO: 135362 - DNA, 3882 bp, Artificial Sequence
  derived and/or modified sequence
gtattgcacaaacaagtggacacccgggagctggccctgctcgtcccctgggccctccttccctggtcctgcaggtcttgctgcttgtcaggcctctcctccaaccctctgccacatttcagaaaagctgagaatcccttggagtgaaaaaggaggagaaacacagtgtccgtagcccagaaggaggttaaatactttcacttctcttttccccatttgggcggagccctttctgagtcagtctgtcggccgacttcctgcttggggcctgggcagccacactgcacgcaggctgggccgactgaggggctcagaggccaggctctgaggcccacgcagggcctagggtgggaagatggcaggtgggggcggcgacctgagcaccaggaggctgaatgaatgtatttcaccagtagcaaatgagatgaaccatcttcctgcacacagccacgatttgcaaaggatgttcacggaagaccagggtgtagatgacaggctgctctatgacattgtattcaagcacttcaaaagaaataaggtggagatttcaaatgcaataaaaaagacatttccattcctcgagggcctccgtgatcgtgatctcatcacaaataaaatgtttgaagattctcaagattcttgtagaaacctggtccctgtacagagagtggtgtacaatgttcttagtgaactggagaagacatttaacctgccagttctggaagcactgttcagcgatgtcaacatgcaggaataccccgatttaattcacatttataaaggctttgaaaatgtaatccatgacaaattgcctctccaagaaagtgaagaagaagagagggaggagaggtctggcctccaactaagtcttgaacaaggaactggtgaaaactcttttcgaagcctgacttggccaccttcgggttccccatctcatgctggtacaaccccacctgaaaatggactctcagagcacccctgtgaaacagaacagataaatgcaaagagaaaagatacaaccagtgacaaagatgattcgctaggaagccaacaaacaaatgaacaatgtgctcaaaaggctgagccaacagagtcctgcgaacaaattgctgtccaagtgaataatggggatgctggaagggagatgccctgcccgttgccctgtgatgaagaaagcccagaggcagagctacacaaccatggaatccaaattaattcctgttctgtgcgactggtggatataaaaaaggaaaagccattttctaattcaaaagttgagtgccaagcccaagcaagaactcatcataaccaggcatctgacataatagtcatcagcagtgaggactctgaaggatccactgacgttgatgagcccttagaagtcttcatctcagcaccgagaagtgagcctgtgatcaataatgacaaccctttagaatcaaatgatgaaaaggagggccaagaagccacttgctcacgaccccagattgtaccagagcccatggatttcagaaaattatctacattcagagaaagttttaagaaaagagtgataggacaagaccacgacttttcagaatccagtgaggaggaggcgcccgcagaagcctcgagcggggcactgagaagcaagcatggtgagaaggctcctatgacttctagaagtacatctacttggagaatacccagcaggaagagacgtttcagcagtagtgacttttcagacctgagtaatggagaagagcttcaggaaacctgcagctcatccctaagaagagggtcaggatcacagccacaagaacctgaaaataagaagtgctcctgtgtcatgtgttttccaaaaggtgtgccaagaagccaagaagcaaggactgaaagtagtcaagcatctgacatgatggataccatggatgttgaaaacaattctactttggaaaaacacagtgggaaaagaagaaaaaagagaaggcatagatctaaagtaaatggtctccaaagagggagaaagaaagacagacctagaaaacatttaactctgaataacaaagtccaaaagaaaagatggcaacaaagaggaagaaaagccaacactagacctttgaaaagaagaagaaaaagaggtccaagaattcccaaagatgaaaatattaattttaaacaatctgaacttcctgtgacctgtggtgaggtgaagggcactctatataaggagcgattcaaacaaggaacctcaaagaagtgtatacagagtgaggataaaaagtggttcactcccagggaatttgaaattgaaggagaccgcggagcatccaagaactggaagctaagtatacgctgcggtggatataccctgaaagtcctgatggagaacaaatttctgccagaaccaccaagcacaagaaaaaagagaatactggaatctcacaacaataccttagttgacccttgtgaggagcataagaagaagaacccagatgcttcagtcaagttctcagagtttttaaagaagtgctcagagacatggaagaccatttttgctaaagagaaaggaaaatttgaagatatggcaaaggcggacaaggcccattatgaaagagaaatgaaaacctatatccctcctaaaggggagaaaaaaaagaagttcaaggatcccaatgcacccaagaggcctcctttggcctttttcctgttctgctctgagtatcgcccaaaaatcaaaggagaacatcctggcctgtccattgatgatgttgtgaagaaactggcagggatgtggaataacaccgctgcagctgacaagcagttttatgaaaagaaggctgcaaagctgaaggaaaaatacaaaaaggatattgctgcatatcgagctaaaggaaagcctaattcagcaaaaaagagagttgtcaaggctgaaaaaagcaagaaaaagaaggaagaggaagaagatgaagaggatgaacaagaggaggaaaatgaagaagatgatgataaataagttgcttctagtgcagtttttttcttgtctataaagcatttaagctgcctgtacacaactcactccttttaaagaaaaaaacttcaacgtaagactgtgtaagatttgtttttaaaccgtacactgtgtttttttgtatagttaaccactaccgaatgtgtcttcagatagccctgtcctggtggtatttagccactaacctttgcctggtacagtatgggggttgtaaattggcatggaaatttaaagcaggttcttgttagtgcacagcacaaattagttgtatatgaggatggtagttttttcaccttcagttgtctctgatgtagcttatacaaaacatttgttgttctgttaactgaatgccactctgtaattgcaaaaaaaaaaaacagttgcagctgttttgttgacattctgaatgcttctaagtaaatacaatttttaaaaaaccgtatgagggaactgtgtagacaaggtaccaggtcagtcttcttccatgtctattagctccacaaagccaatctcaatccctcaaaacaatcttgtcatacttgaaaatatgacactctagtcaaagccttggtaaaataatcagtgtttccaatctgtcctgttacaaaagaaacagattattattgaacttatgcaaataaccattgtcataagaatgtttatgaatagtttccaaattatggcaaattcatgtagagagagaaaagtaactgttttggttttgctcacaaaagtctactttacctaagggctgtcagatataagtaacttaaaagaaagagaagttttcttgacttttgaaaacaaaatatgaaaagaatcggcaatgtttcaaacaaaaagtcataaaagtcactttattcctccatcaa

SEQ ID NO: 135363 - protein, 505 aa, Artificial Sequence
  derived and/or modified sequence
MNINDLKLTLSKAGQEHLLRFWNELEEAQQVELYAELQAMNFEELNFFFQKAIEGFNQSSHQKNVDARMEPVPREVLGSATRDQDQLQAWESEGLFQISQNKVAVLLLAGGQGTRLGVAYPKGMYDVGLPSRKTLFQIQAERILKLQQVAEKYYGNKCIIPWYIMTSGRTMESTKEFFTKHKYFGLKKENVIFFQQGMLPAMSFDGKIILEEKNKVSMAPDGNGGLYRALAAQNIVEDMEQRGIWSIHVYCVDNILVKVADPRFIGFCIQKGADCGAKVVEKTNPTEPVGVVCRVDGVYQVVEYSEISLATAQKRSSDGRLLFNAGNIANHFFTVPFLRDVVNVYEPQLQHHVAQKKIPYVDTQGQLIKPDKPNGIKMEKFVFDIFQFAKKFVVYEVLREDEFSPLKNADSQNGKDNPTTARHALMSLHHCWVLNAGGHFIDENGSRLPAIPRLKDANDVPIQCEISPLISYAGEGLESYVADKEFHAPLIIDENGVHELVKNGI

SEQ ID NO: 135364 - DNA, 1518 bp, Artificial Sequence
  derived and/or modified sequence
atgaacatcaacgacctgaagctgaccctgagcaaggccggccaggagcacctgctgagattctggaacgagctggaggaggcccagcaggtggagctgtacgccgagctgcaggccatgaacttcgaggagctgaacttcttcttccagaaggccatcgagggcttcaaccagagcagccaccagaagaacgtggacgccagaatggagcccgtgcccagagaggtgctgggcagcgccaccagagaccaggaccagctgcaggcctgggagagcgagggcctgttccagatcagccagaacaaggtggccgtgctgctgctggccggcggccagggcaccagactgggcgtggcctaccccaagggcatgtacgacgtgggcctgcccagcagaaagaccctgttccagatccaggccgagagaatcctgaagctgcagcaggtggccgagaagtactacggcaacaagtgcatcatcccctggtacatcatgaccagcggcagaaccatggagagcaccaaggagttcttcaccaagcacaagtacttcggcctgaagaaggagaacgtgatcttcttccagcagggcatgctgcccgccatgagcttcgacggcaagatcatcctggaggagaagaacaaggtgagcatggcccccgacggcaacggcggcctgtacagagccctggccgcccagaacatcgtggaggacatggagcagagaggcatctggagcatccacgtgtactgcgtggacaacatcctggtgaaggtggccgaccccagattcatcggcttctgcatccagaagggcgccgactgcggcgccaaggtggtggagaagaccaaccccaccgagcccgtgggcgtggtgtgcagagtggacggcgtgtaccaggtggtggagtacagcgagatcagcctggccaccgcccagaagagaagcagcgacggcagactgctgttcaacgccggcaacatcgccaaccacttcttcaccgtgcccttcctgagagacgtggtgaacgtgtacgagccccagctgcagcaccacgtggcccagaagaagatcccctacgtggacacccagggccagctgatcaagcccgacaagcccaacggcatcaagatggagaagttcgtgttcgacatcttccagttcgccaagaagttcgtggtgtacgaggtgctgagagaggacgagttcagccccctgaagaacgccgacagccagaacggcaaggacaaccccaccaccgccagacacgccctgatgagcctgcaccactgctgggtgctgaacgccggcggccacttcatcgacgagaacggcagcagactgcccgccatccccagactgaaggacgccaacgacgtgcccatccagtgcgagatcagccccctgatcagctacgccggcgagggcctggagagctacgtggccgacaaggagttccacgcccccctgatcatcgacgagaacggcgtgcacgagctggtgaagaacggcatctag

SEQ ID NO: 135365 - DNA, 663 bp, Artificial Sequence
  derived and/or modified sequence
atgaacatcaacgacctgaagctgaccctgagcaaggccggccaggagcacctgctgagattctggaacgagctggaggaggcccagcaggtggagctgtacgccgagctgcaggccatgaacttcgaggagctgaacttcttcttccagaaggccatcgagggcttcaaccagagcagccaccagaagaacgtggacgccagaatggagcccgtgcccagagaggtgctgggcagcgccaccagagaccaggaccagctgcaggcctgggagagcgagggcctgttccagatcagccagaacaaggtggccgtgctgctgctggccggcggccagggcaccagactgggcgtggcctaccccaagggcatgtacgacgtgggcctgcccagcagaaagaccctgttccagatccaggccgagagaatcctgaagctgcagcaggtggccgagaagtactacggcaacaagtgcatcatcccctggtacatcatgaccagcggcagaaccatggagagcaccaaggagttcttcaccaagcacaagtacttcggcctgaagaaggagaacgtgatcttcttccagcagggcatgctgcccgccatgagcttcgacggcaagatcatcctggaggagaagaacaaggtgagcatggccccctag

SEQ ID NO: 135366 - DNA, 1518 bp, Artificial Sequence
  derived and/or modified sequence
atgaatattaacgacctgaaactgaccctcagtaaagccggccaagagcacctgctcagattttggaatgaattggaggaggctcagcaggtggaactctacgcagagctgcaggcaatgaactttgaggaactcaatttcttttttcaaaaagccatcgagggatttaaccagtcttctcatcagaagaatgtggacgcccggatggagcctgtcccccgggaggtcttggggtctgccaccagggatcaggatcagctccaggcatgggaatccgaaggcttattccaaatctcacaaaataaagtggctgttctgctgcttgctggggggcaaggcacacgtctcggcgtagcctaccccaagggtatgtacgatgtcggcctgccctcccgcaaaacccttttccagatccaagccgaacggatcctgaaattgcagcaggttgccgaaaagtactacgggaataaatgtattataccatggtatataatgacgtcgggtaggacaatggagagtactaaagagtttttcaccaaacataaatactttggcctgaaaaaagaaaacgttatctttttccagcagggcatgcttccggcaatgtcctttgacggcaagatcatcttggaggagaaaaacaaagtatctatggctccggatggaaatggggggctctaccgggctctggctgctcagaacattgtggaagatatggagcagagagggatatggagtattcacgtgtactgcgtggacaacatcctcgtgaaggtggctgaccctcggttcatcggtttttgcattcagaaaggtgctgattgcggtgccaaggtggtggagaaaacgaatcctacggaaccagtgggggttgtgtgtcgtgttgacggcgtctatcaagttgtggagtattctgagatttccctggcgaccgcacaaaagcggtcttcggatggtagactactcttcaatgctggaaacattgcaaaccacttctttacggttccattcttgagagatgtggtcaacgtctacgagccccagctgcagcatcatgtcgcacagaagaagattccctatgtagacacgcagggccagctgataaagcctgataagcctaatggaattaaaatggagaaatttgttttcgacattttccagttcgctaaaaaattcgtagtttacgaagtcctgcgggaggacgagttctctccccttaaaaacgccgacagccaaaatggcaaggacaaccccaccaccgctaggcacgctctgatgagcctgcaccactgctgggtgctcaacgcaggcggacactttatcgatgaaaatggcagcagactgcctgctatcccaaggcttaaagacgctaacgatgtgccaatccagtgtgagatcagtccccttatctcctacgctggtgaaggtctagaatcatatgttgctgataaggagtttcatgcacctctgatcattgacgaaaacggtgtgcacgagttggttaaaaatggaatctag

SEQ ID NO: 135367 - DNA, 663 bp, Artificial Sequence
  derived and/or modified sequence
atgaatattaacgatctaaagttgactctttctaaggctggccaggagcatctgctgagattctggaatgaactcgaggaggcccagcaggtcgagctctacgctgagctgcaggccatgaattttgaagaactaaacttcttttttcagaaggcaattgaaggcttcaaccagagctcccaccagaaaaacgtcgacgctcggatggagccggttccaagggaagtcttgggctccgctaccagagatcaggatcagcttcaagcctgggaaagtgaggggttgttccagattagtcagaacaaagttgcagtcctgttactggctggcggacagggcacccgcctgggagtagcctatccaaaaggaatgtatgatgtgggactgccttcacggaaaactctttttcagatccaggcagaaaggatcctgaagcttcagcaggttgccgagaaatactatgggaacaagtgtataataccctggtacatcatgacgtcagggcggacgatggagtccacaaaagagttttttacaaaacacaaatactttggtctgaaaaaagaaaatgttattttcttccaacagggcatgctgccggctatgtcctttgatggaaaaattattctggaggagaagaataaggtttcaatggcaccatag

SEQ ID NO: 135368 - DNA, 1518 bp, Artificial Sequence
  derived and/or modified sequence
atgaacatcaatgacctgaagctgaccctgagcaaggccggccaggagcacctgctgcgcttctggaatgagctggaggaggcccagcaggtggagctgtatgcagagctgcaggccatgaactttgaggagctgaacttcttcttccagaaggccatcgagggcttcaaccagagcagccaccagaagaatgtggatgccaggatggagcctgtgccccgggaggtgctgggcagcgccacccgggaccaggaccagctgcaggcctgggagagcgagggcctcttccagatcagccagaacaaggtggccgtgctgctgctggccggcggccagggcacccggctgggcgtggcctaccccaagggcatgtatgatgtgggcctgcccagcaggaagaccctcttccagatccaggccgagcgcatcctgaagctgcagcaggtggccgagaagtactacggcaacaagtgcatcatcccctggtacatcatgaccagcggccgcaccatggagagcaccaaggagttcttcaccaagcacaagtacttcggcctgaagaaggaaaatgtcatcttcttccagcagggcatgctgcctgccatgagctttgatggcaagatcatcctggaggagaagaacaaggtgtccatggccccagatggaaatggaggcctgtaccgggccctggccgcccagaacatcgtggaggacatggagcagaggggcatctggagcatccacgtgtactgtgtggacaacatcctggtgaaggtggccgacccccgcttcatcggcttctgcatccagaagggagctgactgtggggccaaggtggtggagaagaccaaccccacagagcctgtgggcgtggtgtgccgggtggatggagtgtaccaggtggtggagtacagcgagatcagcctggccacagcccagaagaggagcagtgatggccgcctgctcttcaatgccggcaacatcgccaaccacttcttcaccgtgcccttcctgagagatgtggtgaatgtgtatgagccccagctgcagcaccacgtggcccagaagaagatcccctacgtggacacccagggccagctgatcaagccagacaagcccaacggcatcaagatggagaagtttgtgtttgacatcttccagtttgccaagaagtttgtggtgtatgaggtgctgcgggaggatgagttcagccccctgaagaatgctgacagccagaatggcaaggacaaccccaccacagcccggcatgccctgatgagcctgcaccactgctgggtgctgaatgctgggggccacttcattgatgaaaatggcagccggctgcctgccatcccccggctgaaggatgccaatgatgtgcccatccagtgtgagatcagccccctcatctcctatgctggggagggcctggagagctatgtggccgacaaggagttccacgcccccctcatcattgatgaaaatggagtgcatgagctggtgaagaatggcatctag

SEQ ID NO: 135369 - DNA, 663 bp, Artificial Sequence
  derived and/or modified sequence
atgaacatcaatgacctgaagctgaccctgagcaaggccggccaggagcacctgctgcgcttctggaatgagctggaggaggcccagcaggtggagctgtatgcagagctgcaggccatgaactttgaggagctgaacttcttcttccagaaggccatcgagggcttcaaccagagcagccaccagaagaatgtggatgccaggatggagcctgtgccccgggaggtgctgggcagcgccacccgggaccaggaccagctgcaggcctgggagagcgagggcctcttccagatcagccagaacaaggtggccgtgctgctgctggccggcggccagggcacccggctgggcgtggcctaccccaagggcatgtatgatgtgggcctgcccagcaggaagaccctcttccagatccaggccgagcgcatcctgaagctgcagcaggtggccgagaagtactacggcaacaagtgcatcatcccctggtacatcatgaccagcggccgcaccatggagagcaccaaggagttcttcaccaagcacaagtacttcggcctgaagaaggaaaatgtcatcttcttccagcagggcatgctgcctgccatgagctttgatggcaagatcatcctggaggagaagaacaaggtgtccatggccccctag

SEQ ID NO: 135370 - DNA, 1518 bp, Artificial Sequence
  derived and/or modified sequence
atgaacatcaacgacctgaagctgaccctgagcaaggccggccaggagcatttactaagattctggaatgagctcgaagaggctcagcaggtagagctctacgcagagctgcaggcaatgaatttcgaggagttgaatttctttttccagaaggccatagagggattcaaccagagcagccaccaaaagaatgtagacgcgaggatggagccagttccacgggaggttcttggctctgcgaccagagatcaggatcagttgcaagcctgggagagcgaaggcttgttccaaatttcgcagaacaaggttgctgttctcctgcttgccggcggacaggggacccgcctgggggtggcttatccgaaggggatgtatgatgttggcctgcctagtcgtaagaccctgtttcagatccaagcagaacgcattctgaaattgcagcaggttgccgagaagtattacgggaacaagtgcatcattccctggtacattatgacctcagggaggacaatggagtctactaaagaatttttcacaaagcataagtacttcggactgaagaaggaaaacgtcatttttttccaacaggggatgctgcctgcaatgagctttgacggcaagatcatccttgaagagaagaataaggtgagcatggctcccgacggtaacggagggttatatagggcccttgccgcacagaacattgtcgaggatatggagcagcggggaatctggtctatccacgtgtactgcgttgacaacatcctggtcaaagtcgccgaccctaggttcatcgggttctgcattcagaagggcgccgactgcggcgctaaggtcgtggagaaaacaaatccgacagaaccagtcggcgttgtgtgtcgcgttgatggggtttaccaggttgtggaatactccgaaatctccctggctacagcccagaaacgatcctccgacggtcgtttactgtttaatgctgggaatatcgctaaccacttctttacagtacccttcctacgggatgtagtcaacgtttacgagccccagctgcaacaccacgtggcccagaaaaagataccttatgttgatacccaggggcagctgattaagcccgataagcccaatggtattaagatggaaaagtttgtgttcgacatatttcaatttgccaagaagttcgtggtctatgaggtattgagggaggatgagttttcacccctcaaaaacgctgacagccagaatgggaaggataatcctaccacggcacgacatgcacttatgtctcttcaccactgctgggtgttgaacgctggcggccatttcatagacgagaacggatcgcggctgccggctatcccaagactcaaggatgcaaacgatgtacccattcagtgtgaaatctctccactcatttcttatgctggagaagggctcgagagttatgtcgcagataaagaatttcacgccccacttatcattgacgagaacggagtgcatgagctggtcaaaaatggaatctag

SEQ ID NO: 135371 - DNA, 663 bp, Artificial Sequence
  derived and/or modified sequence
atgaacatcaacgacctgaagctgaccctgagcaaggccggccaggaacacctactgcggttctggaatgaactagaagaggcgcagcaggtcgaactttacgccgagttgcaggcaatgaactttgaagaacttaacttcttttttcaaaaagccattgagggctttaaccagtctagtcaccaaaagaatgtagatgcccgaatggagcctgttcccagagaagtcctgggctccgccacccgggaccaggaccaactccaggcgtgggagtccgaggggcttttccagatctcccagaataaagtggcagtgctgttactggcgggcggccaggggacgagactcggcgtagcctatcccaaaggcatgtatgacgtcggtctcccctcccgcaagactttgttccagatccaggcggagaggattttgaagctccaacaggtagccgaaaagtactacgggaataagtgcataattccatggtatatcatgacctccggaagaacgatggagtctaccaaggagttttttaccaaacacaaatactttggcctcaagaaggagaatgttattttttttcagcagggcatgcttccagcaatgtcattcgacggcaaaatcatcttggaagaaaagaacaaggtgtccatggcgccttag

SEQ ID NO: 135372 - DNA, 1518 bp, Artificial Sequence
  derived and/or modified sequence
atgaacatcaacgatctgaagttgaccctatcaaaggcagggcaggagcatctgcttcgcttctggaatgagctggaggaagcacagcaagttgagctttacgcagagctgcaggctatgaactttgaggaactgaacttcttttttcagaaggccattgagggctttaaccagagctcgcaccagaaaaacgtggacgccaggatggaacccgtcccccgagaagtcctgggttccgctaccagagatcaggaccaactgcaggcatgggaatccgaggggctttttcagattagccagaacaaagttgcagtgcttcttcttgcagggggacaagggaccagactcggagtggcctacccaaaggggatgtacgacgtgggtctgccgtcacgcaaaaccctgtttcagatacaggccgaaagaatcctgaagctacagcaagtggccgagaagtattacgggaataagtgtataatcccatggtacataatgacctccgggcgtaccatggagagcactaaagagtttttcactaaacacaaatattttggcctgaagaaggagaacgtgatctttttccagcagggcatgctgcccgctatgtccttcgatggtaagataattcttgaggagaagaataaggtgagcatggcccctgatggcaatggtggtctgtatagggctctggccgctcaaaatattgtggaggacatggagcagaggggaatctggagtatccacgtgtattgtgtagacaacatactggtgaaggtagccgatcccagatttatcggtttttgcatccagaagggcgcagactgcggggcaaaagttgtggaaaagacaaatcccactgaacctgtcggtgtggtgtgcagagtagatggcgtgtatcaggtcgtcgagtattctgaaatcagtctcgcgacagctcagaaacgcagttctgacggaaggttgttattcaatgctggtaatatagccaaccacttttttacagtgccatttttaagagatgtcgtgaacgtctacgagcctcaactccaacatcatgtagctcagaagaagattccctacgtggatacacaaggacagcttataaaacctgataaacccaatgggatcaagatggagaaatttgtgttcgacatcttccaatttgccaagaagttcgtcgtgtacgaagtgctgcgggaggatgagttcagccccttaaaaaacgccgattctcagaatgggaaggacaacccaacaaccgccagacatgccctgatgtcactacatcactgttgggtcctgaatgccggaggtcactttattgacgagaatgggtctaggctgccagcaatcccacggctgaaggacgccaatgacgtccctatccagtgcgaaattagtccgctgatttcttatgccggagagggcctggagtcctacgtcgccgacaaggaatttcacgccccactgatcatcgacgagaatggcgtacatgaacttgtgaagaatggcatctag

SEQ ID NO: 135373 - DNA, 663 bp, Artificial Sequence
  derived and/or modified sequence
atgaacataaacgacctgaagctcacgctatctaaagcgggtcaggaacatcttctgcgcttttggaatgaactggaggaagcccagcaggtggagctgtacgccgaactccaagctatgaattttgaggaactcaattttttttttcaaaaggccattgaagggttcaaccagtcttcccaccagaaaaacgtagacgctcgcatggagcctgtgccacgcgaagtgctgggatcagcgactcgcgaccaggatcagcttcaggcctgggaatccgaaggcctgtttcagatatcccagaacaaggttgcagtcctgctgttggcaggcggacagggtacaaggttgggggtggcatatccgaagggtatgtacgacgtggggctgccatcccgtaagaccctctttcagattcaagcagagcgtatcctgaagttacagcaggtcgccgaaaagtattatggcaacaaatgcatcataccatggtacattatgacgtccggcaggaccatggagagcacaaaagaattctttaccaaacataagtactttggtctcaaaaaagaaaacgtgatcttcttccagcagggcatgttgccagccatgtcattcgatggtaagattatcttggaggagaagaataaggtctccatggccccttag

SEQ ID NO: 135374 - DNA, 2294 bp, Artificial Sequence
  derived and/or modified sequence
ctgtgctcccggcgctgacgtgtctgggcggtcggcttccactccttcaggcgtcggcagccactagtcgtggcgagaggggcggggtggccggggctggcgctccacttggcccccgctcccggcccgccccgccgccgcggccccccggatgagggtatatattcggagcgagcgcgggacgccgatgagtggccgcgcggaaggagctggagacggtcgtagctgcggtcgcgccgagaaaggtttacaggtacatacattacacccctatttctacaaagcttggctattagagcattatgaacattaatgacctcaaactcacgttgtccaaagctgggcaagagcacctactacgtttctggaatgagcttgaagaagcccaacaggtagaactttatgcagagctccaggccatgaactttgaggagctgaacttctttttccaaaaggccattgaaggttttaaccagtcttctcaccaaaagaatgtggatgcacgaatggaacctgtgcctcgagaggtattaggcagtgctacaagggatcaagatcagctccaggcctgggaaagtgaaggacttttccagatttctcagaataaagtagcagttcttcttctagctggtgggcaggggacaagactcggcgttgcatatcctaaggggatgtatgatgttggtttgccatcccgtaagacactttttcagattcaagcagagcgtatcctgaagctacagcaggttgctgaaaaatattatggcaacaaatgcattattccatggtatataatgaccagtggcagaacaatggaatctacaaaggagttcttcaccaagcacaagtactttggtttaaaaaaagagaatgtaatcttttttcagcaaggaatgctccccgccatgagttttgatgggaaaattattttggaagagaagaacaaagtttctatggctccagatgggaatggtggtctttatcgggcacttgcagcccagaatattgtggaggatatggagcaaagaggcatttggagcattcatgtctattgtgttgacaacatattagtaaaagtggcagacccacggttcattggattttgcattcagaaaggagcagactgtggagcaaaggtggtagagaaaacgaaccctacagaaccagttggagtggtttgccgagtggatggagtttaccaggtggtagaatatagtgagatttccctggcaacagctcaaaaacgaagctcagacggacgactgctgttcaatgcggggaacattgccaaccatttcttcactgtaccatttctgagagatgttgtcaatgtttatgaacctcagttgcagcaccatgtggctcaaaagaagattccttatgtggatacccaaggacagttaattaagccagacaaacccaatggaataaagatggaaaaatttgtctttgacatcttccagtttgcaaagaagtttgtggtatatgaagtattgcgagaagatgagttttccccactaaagaatgctgatagtcagaatgggaaagacaaccctactactgcaaggcatgctttgatgtcccttcatcattgctgggtcctcaatgcagggggccatttcatagatgaaaatggctctcgccttccagcaattccccgcttgaaggatgccaatgatgtaccaatccaatgtgaaatctctcctcttatctcctatgctggagaaggattagaaagttatgtggcagataaagaattccatgcacctctaatcatcgatgagaatggagttcatgagctggtgaaaaatggtatttgaaccagataccaagttttgtttgccacgataggaatagcttttatttttgatagaccaactgtgaacctacaagacgtcttggacaactgaagtttaaatatccacagggttttattttgcttgttgaactcttagagctattgcaaacttcccaagatccagatgactgaatttcagatagcatttttatgattcccaactcattgaaggtcttatttatataattttttccaagccaaggagaccattggccatccaggaaatttcgtacagctgaaatataggcaggatgttcaacatcagtttacttgcagctggaagcatttgtttttgaagttgtacatagtaataatatgtcattgtacatgttgaaaggtttctatggtactaaaagtttgttttattttatcaaacattaagcttttttaagaaaataattgggcagtgaaataaatgtatcttcttgtctctgga

SEQ ID NO: 135375 - DNA, 776 bp, Artificial Sequence
  derived and/or modified sequence
gtctgtgctcccggcgctgacgtgtctgggcggtcgtagctgcggtcgcgccgagaaaggtttacaggtacatacattacacccctatttctacaaagcttggctattagagcattatgaacattaatgacctcaaactcacgttgtccaaagctgggcaagagcacctactacgtttctggaatgagcttgaagaagcccaacaggtagaactttatgcagagctccaggccatgaactttgaggagctgaacttctttttccaaaaggccattgaaggttttaaccagtcttctcaccaaaagaatgtggatgcacgaatggaacctgtgcctcgagaggtattaggcagtgctacaagggatcaagatcagctccaggcctgggaaagtgaaggacttttccagatttctcagaataaagtagcagttcttcttctagctggtgggcaggggacaagactcggcgttgcatatcctaaggggatgtatgatgttggtttgccatcccgtaagacactttttcagattcaagcagagcgtatcctgaagctacagcaggttgctgaaaaatattatggcaacaaatgcattattccatggtatataatgaccagtggcagaacaatggaatctacaaaggagttcttcaccaagcacaagtactttggtttaaaaaaagagaatgtaatcttttttcagcaaggaatgctccccgccatgagttttgatgggaaaattattttggaagagaagaacaaagtttctatggctcca

SEQ ID NO: 135376 - protein, 437 aa, Artificial Sequence
  derived and/or modified sequence
MRRSSRPGSASSSRKHTPNFFSENSSMSITSEDSKGLRSAEPGPGEPEGRRARGPSCGEPALSAGVPGGTTWAGSSQQKPAPRSHNWQTACGAATVRGGASEPTGSPVVSEEPLDLLPTLDLRQEMPPPRVFKSFLSLLFQGLSVLLSLAGDVLVSMYREVCSIRFLFTAVSLLSLFLSAFWLGLLYLVSPLENEPKEMLTLSEYHERVRSQGQQLQQLQAELDKLHKEVSTVRAANSERVAKLVFQRLNEDFVRKPDYALSSVGASIDLQKTSHDYADRNTAYFWNRFSFWNYARPPTVILEPHVFPGNCWAFEGDQGQVVIQLPGRVQLSDITLQHPPPSVEHTGGANSAPRDFAVFGLQVYDETEVSLGKFTFDVEKSEIQTFHLQNDPPAAFPKVKIQILSNWGHPRFTCLYRVRAHGVRTSEGAEGSAQGPH

SEQ ID NO: 135377 - DNA, 1314 bp, Artificial Sequence
  derived and/or modified sequence
atgagaagaagcagcagacccggcagcgccagcagcagcagaaagcacacccccaacttcttcagcgagaacagcagcatgagcatcaccagcgaggacagcaagggcctgagaagcgccgagcccggccccggcgagcccgagggcagaagagccagaggccccagctgcggcgagcccgccctgagcgccggcgtgcccggcggcaccacctgggccggcagcagccagcagaagcccgcccccagaagccacaactggcagaccgcctgcggcgccgccaccgtgagaggcggcgccagcgagcccaccggcagccccgtggtgagcgaggagcccctggacctgctgcccaccctggacctgagacaggagatgcccccccccagagtgttcaagagcttcctgagcctgctgttccagggcctgagcgtgctgctgagcctggccggcgacgtgctggtgagcatgtacagagaggtgtgcagcatcagattcctgttcaccgccgtgagcctgctgagcctgttcctgagcgccttctggctgggcctgctgtacctggtgagccccctggagaacgagcccaaggagatgctgaccctgagcgagtaccacgagagagtgagaagccagggccagcagctgcagcagctgcaggccgagctggacaagctgcacaaggaggtgagcaccgtgagagccgccaacagcgagagagtggccaagctggtgttccagagactgaacgaggacttcgtgagaaagcccgactacgccctgagcagcgtgggcgccagcatcgacctgcagaagaccagccacgactacgccgacagaaacaccgcctacttctggaacagattcagcttctggaactacgccagaccccccaccgtgatcctggagccccacgtgttccccggcaactgctgggccttcgagggcgaccagggccaggtggtgatccagctgcccggcagagtgcagctgagcgacatcaccctgcagcaccccccccccagcgtggagcacaccggcggcgccaacagcgcccccagagacttcgccgtgttcggcctgcaggtgtacgacgagaccgaggtgagcctgggcaagttcaccttcgacgtggagaagagcgagatccagaccttccacctgcagaacgacccccccgccgccttccccaaggtgaagatccagatcctgagcaactggggccaccccagattcacctgcctgtacagagtgagagcccacggcgtgagaaccagcgagggcgccgagggcagcgcccagggcccccactag

SEQ ID NO: 135378 - DNA, 1314 bp, Artificial Sequence
  derived and/or modified sequence
atgaggcgctctagcaggccaggctccgcatcatctagtagaaagcataccccgaatttcttttctgagaattctagtatgtcgattactagcgaggattctaaggggcttaggagcgccgagcccgggcccggggagcctgagggcaggagggcacggggcccgtcatgtggcgaacccgccttatctgccggtgtccctggcggcacgacctgggctggcagtagccagcagaagcccgcgccaaggagtcacaattggcagaccgcctgtggcgctgccacagtgagaggtggggcaagcgagcctactggttcaccagtggtttccgaagagcctttggatctgctgcccaccttggatctgaggcaggagatgcctccgcctcgggtctttaaaagctttttatctcttctgtttcaaggcctgtctgtactgctgtctcttgccggagacgtgttggtgtcgatgtaccgggaggtctgtagcatccgcttcttatttactgccgtgtccttactgtccctgttcctgtcagccttctggcttggcctgttgtatctggtgtctcctctggagaacgagcccaaagagatgctgaccctaagtgaataccatgagcgcgtgaggtctcagggtcagcagctgcagcaattacaggctgagctggacaaactccataaagaagtgagcactgttagagccgccaattccgaaagagtggcgaaacttgtgttccagcgactgaatgaggacttcgtgaggaagccagactacgccctgagctcagtgggggcgtccatcgacctacagaagacaagtcatgactacgccgatcggaatactgcttatttctggaaccgattttccttctggaactacgcccgcccacccacggtcattcttgagccacacgtgtttccaggtaactgttgggcattcgagggcgaccagggacaggtagtgatccagctgcctgggcgagttcagctcagtgacataactctgcagcatccaccaccgtcggttgaacacaccggtggagcaaacagtgcccccagagactttgcggtgtttggactccaggtctatgacgagaccgaggtgtccctcgggaaatttacattcgacgttgagaaaagtgaaatccagaccttccaccttcagaacgacccccccgcagcctttcccaaggtgaagattcagatcttgagtaattgggggcatcctagattcacctgcctttatcgggtcagggctcacggagtgcggacaagtgaaggcgctgaggggtctgcccagggcccgcattag

SEQ ID NO: 135379 - DNA, 1314 bp, Artificial Sequence
  derived and/or modified sequence
atgaggaggagcagcaggcctggcagcgccagcagcagcaggaagcacacccccaacttcttcagcgagaacagctccatgagcatcaccagcgaggacagcaagggcctgcggtctgctgagcccggccctggagagcctgagggccggcgggcccggggccccagctgtggggagcccgccctgtctgctggggtgcctgggggcaccacctgggccggcagcagccagcagaagccagcccccaggagccacaactggcagacagcctgtggggccgccaccgtgcggggcggggccagcgagcccaccggcagccctgtggtgtctgaggagcccctggacctgctgcccaccctggacctgcggcaggagatgcccccacccagggtcttcaagagcttcctgagcctgctcttccagggcctgtctgtgctgctgagcctggccggagatgtgctggtgtccatgtaccgggaggtgtgcagcatccgcttcctgttcaccgctgtgtccctgctgagcctcttcctgagcgccttctggctgggcctgctgtacctggtgagccccctggagaatgagcccaaggagatgctgaccctgtctgagtaccacgagcgggtgcgcagccagggccagcagctgcagcagctgcaggccgagctggacaagctgcacaaggaggtgtccacagtgcgggccgccaacagcgagcgggtggccaagctggtgttccagaggctgaatgaagattttgtgaggaagccagactatgccctgagctctgtgggcgccagcattgacctgcagaagaccagccatgactatgctgacaggaacacagcctacttctggaaccgcttctccttctggaactatgcccggcccccaacagtcatcctggagccccacgtgtttcctggcaactgctgggcctttgaaggagaccagggccaggtggtgatccagctgcccggccgggtgcagctgagtgacatcaccctgcagcaccccccacccagcgtggagcacactggaggagccaacagcgccccccgggactttgctgtgtttggcctgcaggtgtatgatgaaacagaggtgtccctgggcaagttcacctttgatgtggagaagtctgagatccagaccttccacctgcagaatgaccccccagctgccttccccaaggtgaagatccagatcctgagcaactggggccacccccgcttcacctgcctgtacagagtgcgggcccatggagtgaggaccagcgagggcgctgagggcagcgcccagggcccccactag

SEQ ID NO: 135380 - DNA, 1314 bp, Artificial Sequence
  derived and/or modified sequence
atgcggcggagcagccggcccggcagcgccagcagcagccggaagcatactcccaacttcttctctgaaaacagttcaatgtccatcacttcggaagacagcaaaggcttacggagtgccgaaccgggtcctggcgagcccgagggcagaagggctcgagggccttcctgtggagagccagccttatcagccggagtcccaggcggaaccacatgggcaggttctagtcaacagaaaccagcaccgagaagccacaattggcagacagcttgcggcgccgctaccgtaaggggcggggcttcagagccaacaggcagcccagtggtgtccgaagagccactggacttgttgcccacattagacctgaggcaggagatgccacccccccgcgttttcaaaagcttcctctcgcttctgttccaaggactcagcgttcttttgtccctagcgggggacgtcctggttagcatgtatagggaagtgtgctccattcgcttcctgtttacagccgtctcactgctcagcctcttcttatccgccttctggctggggctcctgtatctggtgtcacctctcgagaacgaacccaaggaaatgctgaccctttcagaataccacgagcgggtgcgctctcaagggcaacagcttcagcagcttcaggccgaactcgacaagctgcacaaggaagtgtccacagtgcgggccgcaaactccgagagagtggccaaactagtgttccagcggcttaacgaggactttgtcagaaaacccgactacgcattgagcagcgttggcgcttcgattgacttacagaaaacctcccacgactatgccgaccgaaacaccgcctatttttggaatcggtttagcttttggaactacgcaaggccccccacagtcattctggaaccacacgtgtttcctgggaattgttgggctttcgagggggaccaagggcaggtggttatccagctgcccggacgggtgcagttgtctgatatcactttacagcatcccccaccatctgttgaacatacagggggtgcaaactccgcccctcgggactttgccgtgtttggattacaagtctacgacgagacggaggtatccctgggcaagttcactttcgacgtcgagaagagcgaaattcagaccttccacctccagaatgaccccccagctgctttcccaaaggttaagattcaaatactcagcaattggggccacccacgcttcacttgcctgtaccgcgtaagggctcacggcgtgaggacatctgaaggagctgaaggctcggctcaggggccgcactag

SEQ ID NO: 135381 - DNA, 1314 bp, Artificial Sequence
  derived and/or modified sequence
atgaggaggagctctcgaccaggatcagcttcttcttctcgcaagcatacacctaacttctttagcgaaaacagttctatgtctatcacatcggaggatagcaagggactgcgctctgctgagcccggtccaggagagccggaaggacggagagccagggggccttcttgtggagagcccgctctgtcagcaggggttccgggagggactacctgggccggttcttctcagcagaagcctgcccctcggtctcataattggcagactgcttgtggagctgccactgtgcgcggtggagcatccgagcctactggcagtcctgtggtgagcgaggagccacttgacctgttgccaacccttgacctgcgacaggaaatgcctccgccacgtgtattcaaatcattcctgtctctgttgtttcaaggtctgagcgttttgctaagtctcgcaggagacgtattggtgtccatgtatcgcgaggtgtgtagcatacgattcctgttcacagcagtctccttactgagcctttttctgtctgccttctggctcgggctcctgtatctggtaagtccactggagaacgagccaaaagaaatgctgacattaagcgaataccatgaaagagtgaggagccagggtcagcaactccaacaactacaggcagaactggataaactccacaaggaggtgtctacagtaagagcggctaacagcgaacgagtggccaagctcgtgttccagagacttaacgaggactttgttagaaaaccagactacgctctgtcatccgtgggcgcatctatcgacctgcagaaaacctcccatgattatgcggatagaaatactgcttacttttggaaccggttctctttttggaattacgcacgacccccaactgttattctcgagcctcatgttttcccgggaaactgctgggcgttcgagggagaccaaggtcaggtagtcatccagttacccggtagggtccagttgagcgacatcacactccaacatcctccacctagcgtggagcatacagggggtgccaattccgcaccacgcgacttcgctgttttcggacttcaggtctacgacgagaccgaagtgtcattggggaagtttactttcgatgtggagaagtccgaaatccaaaccttccatctccagaatgatcctcccgctgcatttcctaaggtcaaaatccagatcctgtctaattggggacatccgagatttacctgtttgtatagagtgcgagcccatggcgtgcgcacctctgaaggagccgagggttccgcccaaggaccacattag

SEQ ID NO: 135382 - DNA, 1453 bp, Artificial Sequence
  derived and/or modified sequence
tcacgcagggtccgtggggtccccgcggcgcgcagcggctgaaggaggccccagggccttggcgaccgcagcggcggctttagcgtcagtgactaggcagcagggggtcaggatgcggcgaagctcccgcccgggctcggcctcgtcctcgcgcaagcacacgcccaactttttcagcgagaacagctcaatgagcatcacctcggaggacagcaaagggctccggtcagcggagcccgggcctggggagcccgagggcagaagagcccggggcccgagctgcggtgagcccgccttgagcgcgggagtgcccggaggaaccacatgggcaggaagctctcagcagaagccagcgcctcggagccacaactggcagacagcctgtggcgcggcaaccgtgaggggcggggcctcggaaccgactgggtctccagtagtctctgaggagccgctcgaccttctcccgaccctggatctgaggcaggagatgcctcccccgcgggtgttcaagagctttctgagcctgctcttccaggggctgagcgtgttgttatccctggcaggagacgtgctggtcagcatgtacagggaggtctgttccatccgcttcctgttcacggctgtgtcgctgctgagcctctttctgtcagcattctggctggggcttctgtacctggtctctcctttggagaatgaacctaaggagatgctgactctaagtgagtaccacgagcgcgtgcgctcccaggggcagcagctgcagcagctccaggccgagctggataaactccacaaggaggtgtccactgttcgggcagccaacagcgagagagtggccaagctcgtgttccagaggctgaatgaggattttgtgcggaagcccgactatgctttgagctctgtgggagcctccatcgacctgcagaagacatcccacgattacgcagacaggaacactgcctacttctggaatcgcttcagcttctggaactacgcacggccgcccacggttatcctggagccccacgtgttccctgggaattgctgggcttttgaaggcgaccaaggccaggtggtgatccaactgccgggccgagtgcagctgagcgacatcactctgcagcatccaccgcccagcgtggagcacaccggaggagccaacagcgccccccgcgatttcgcggtctttggcctccaggtttatgatgaaactgaagtttccttggggaaattcaccttcgatgttgagaaatcggagattcagactttccacctgcagaatgaccccccagctgcctttcccaaggtgaagatccagattctaagcaactggggccacccccgtttcacgtgcttgtatcgagtccgtgcccacggtgtgcgaacctcagagggggcagagggcagtgcacaggggccccattaaacatgctgatttttggagtagaattga

SEQ ID NO: 135383 - protein, 303 aa, Artificial Sequence
  derived and/or modified sequence
MRAWIFFLLCLAGRALAAPQQEALPDETEVVEETVAEVTEVSVGANPVQVEVGEFDDGAEETEEEVVAENPCQNHHCKHGKVCELDENNTPMCVCQDPTSCPAPIGEFEKVCSNDNKTFDSSCHFFATKCTLEGTKKGHKLHLDYIGPCKYIPPCLDSELTEFPLRMRDWLKNVLVTLYERDEDNNLLTEKQKLRVKKIHENEKRLEAGDHPVELLARDFEKNYNMYIFPVHWQFGQLDQHPIDGYLSHTELAPLRAPLIPMEHCTTRFFETCDLDNDKYIALDEWAGCFGIKQKDIDKDLVI

SEQ ID NO: 135384 - protein, 111 aa, Artificial Sequence
  derived and/or modified sequence
MRAWIFFLLCLAGRALAAPQQEALPDETEVVEETVAEVTEVSVGANPVQVEVGEFDDGAEETEEEVVAENPCQNHHCKHGKVCELDENNTPMCVCQDPTSCPAPIGEFEKV

SEQ ID NO: 135385 - DNA, 162 bp, Artificial Sequence
  derived and/or modified sequence
atgagagcctggatcttcttcctgctgtgcctggccggcagagccctggccgccccccagcaggaggccctgcccgacgagaccgaggtggtggaggagaccgtggccgaggtgaccgaggtgagcgtgggcgccaaccccgtgcaggtggaggtgggctag

SEQ ID NO: 135386 - DNA, 336 bp, Artificial Sequence
  derived and/or modified sequence
atgagagcctggatcttcttcctgctgtgcctggccggcagagccctggccgccccccagcaggaggccctgcccgacgagaccgaggtggtggaggagaccgtggccgaggtgaccgaggtgagcgtgggcgccaaccccgtgcaggtggaggtgggcgagttcgacgacggcgccgaggagaccgaggaggaggtggtggccgagaacccctgccagaaccaccactgcaagcacggcaaggtgtgcgagctggacgagaacaacacccccatgtgcgtgtgccaggaccccaccagctgccccgcccccatcggcgagttcgagaaggtgtag

SEQ ID NO: 135387 - DNA, 162 bp, Artificial Sequence
  derived and/or modified sequence
atgcgagcgtggatctttttcttgctgtgtctcgccggcagggccttagccgccccccaacaggaggccctacccgacgaaacagaggtcgtagaagagacagttgccgaggtcacagaggtgtccgtaggcgctaaccctgtgcaggtggaggtagggtag

SEQ ID NO: 135388 - DNA, 336 bp, Artificial Sequence
  derived and/or modified sequence
atgagagcatggatcttcttcttgttgtgcctggcaggcagagcgcttgctgcaccccagcaggaggctctgccagacgaaactgaggttgtggaggaaaccgttgccgaagtaactgaggtatctgtgggcgctaaccctgtacaggtcgaggtcggtgagttcgacgacggagcggaggaaacggaggaggaagtcgttgcggaaaatccgtgtcaaaatcatcattgtaaacatggcaaggtatgcgagctggatgagaataacacacccatgtgtgtctgtcaggatcctacaagctgtccggctccaatcggggagtttgagaaagtctag

SEQ ID NO: 135389 - DNA, 162 bp, Artificial Sequence
  derived and/or modified sequence
atgagggcctggatcttcttcctgctgtgcctggccggccgggccctggccgccccccagcaggaggccctgcctgatgaaacagaggtggtggaggagaccgtggccgaggtgacagaggtgtctgtgggcgccaaccctgtgcaggtggaggtgggctag

SEQ ID NO: 135390 - DNA, 336 bp, Artificial Sequence
  derived and/or modified sequence
atgagggcctggatcttcttcctgctgtgcctggccggccgggccctggccgccccccagcaggaggccctgcctgatgaaacagaggtggtggaggagaccgtggccgaggtgacagaggtgtctgtgggcgccaaccctgtgcaggtggaggtgggggagtttgatgatggagctgaggagacagaggaggaggtggtggccgagaacccctgccagaaccaccactgcaagcacggcaaggtgtgtgagctggatgagaacaacacccccatgtgtgtgtgccaggaccccaccagctgcccagcccccatcggggagtttgagaaggtgtag

SEQ ID NO: 135391 - DNA, 162 bp, Artificial Sequence
  derived and/or modified sequence
atgcgggcctggatcttcttcctgctgtgcctggccggccgggccctcgctgctccccagcaagaggctctcccagacgaaacagaggtcgtggaggagacagtggcagaagtcacagaggtgtccgtgggcgcgaatccagtgcaagtcgaggtgggatag

SEQ ID NO: 135392 - DNA, 336 bp, Artificial Sequence
  derived and/or modified sequence
atgcgggcctggatcttcttcctgctgtgcctggccggccgggccctggcagcaccccagcaggaggccctcccggatgaaactgaagtcgtggaggagacggtggcagaggtgactgaggtcagcgttggtgccaacccggtgcaagtagaagttggggaattcgacgacggcgctgaggagaccgaagaagaggtggttgccgaaaatccgtgccagaatcaccactgtaaacacggcaaggtctgtgagctcgatgaaaacaacacccccatgtgcgtgtgccaggatcctacaagttgtccagctcccatcggcgaatttgagaaagtgtag

SEQ ID NO: 135393 - DNA, 162 bp, Artificial Sequence
  derived and/or modified sequence
atgcgggcatggatcttcttcctcctgtgtctggctggcagagcccttgcagcacctcaacaggaagccctgcctgatgagacggaggtggtagaagaaactgtcgccgaggtgacggaagtgtcggtgggggctaatccggtccaggtggaagtgggttag

SEQ ID NO: 135394 - DNA, 336 bp, Artificial Sequence
  derived and/or modified sequence
atgagggcttggatattcttccttctctgtcttgccggacgggcactcgccgctcctcagcaggaggcactgcctgatgaaaccgaggtggtcgaagaaacggttgctgaagtcactgaggtgtcagtgggtgcgaatccggttcaggtcgaagtgggtgagttcgacgacggggcagaggagacagaggaggaggtagtggccgagaatccttgccagaatcatcactgcaagcacggaaaggtctgtgagctggacgaaaacaatacacccatgtgtgtatgtcaggatcctacctcctgccccgcacctattggcgagtttgaaaaagtttag

SEQ ID NO: 135395 - DNA, 3701 bp, Artificial Sequence
  derived and/or modified sequence
taggcagcagccccggaacagatgaggcaggcagggttgggacgtttggtcaggacagcccaccgcaaaaagaggaggaaagaaatgaaagacagagacagctttggctatgggagaaggaggaggccgggggaaggaggagacaggaggaggagggaccacggggtggaggggagatagacccagcccagagctctgagtggtttcctgttgcctgtctctaaacccctccacattcccgcggtccttcagactgcccggagagcgcgctctgcctgccgcctgcctgcctgccactgagggttcccagcaccatgagggcctggatcttctttctcctttgcctggccgggagggccttggcagcccctcagcaagaagccctgcctgatgagacagaggtggtggaagaaactgtggcagaggtgactgaggtatctgtgggagctaatcctgtccaggtggaagtaggagaatttgatgatggtgcagaggaaaccgaagaggaggtggtggcggaaaatccctgccagaaccaccactgcaaacacggcaaggtgtgcgagctggatgagaacaacacccccatgtgcgtgtgccaggaccccaccagctgcccagcccccattggcgagtttgagaaggtgtgcagcaatgacaacaagaccttcgactcttcctgccacttctttgccacaaagtgcaccctggagggcaccaagaagggccacaagctccacctggactacatcgggccttgcaaatacatccccccttgcctggactctgagctgaccgaattccccctgcgcatgcgggactggctcaagaacgtcctggtcaccctgtatgagagggatgaggacaacaaccttctgactgagaagcagaagctgcgggtgaagaagatccatgagaatgagaagcgcctggaggcaggagaccaccccgtggagctgctggcccgggacttcgagaagaactataacatgtacatcttccctgtacactggcagttcggccagctggaccagcaccccattgacgggtacctctcccacaccgagctggctccactgcgtgctcccctcatccccatggagcattgcaccacccgctttttcgagacctgtgacctggacaatgacaagtacatcgccctggatgagtgggccggctgcttcggcatcaagcagaaggatatcgacaaggatcttgtgatctaaatccactccttccacagtaccggattctctctttaaccctccccttcgtgtttcccccaatgtttaaaatgtttggatggtttgttgttctgcctggagacaaggtgctaacatagatttaagtgaatacattaacggtgctaaaaatgaaaattctaacccaagacatgacattcttagctgtaacttaactattaaggccttttccacacgcattaatagtcccatttttctcttgccatttgtagctttgcccattgtcttattggcacatgggtggacacggatctgctgggctctgccttaaacacacattgcagcttcaacttttctctttagtgttctgtttgaaactaatacttaccgagtcagactttgtgttcatttcatttcagggtcttggctgcctgtgggcttccccaggtggcctggaggtgggcaaagggaagtaacagacacacgatgttgtcaaggatggttttgggactagaggctcagtggtgggagagatccctgcagaacccaccaaccagaacgtggtttgcctgaggctgtaactgagagaaagattctggggctgtgttatgaaaatatagacattctcacataagcccagttcatcaccatttcctcctttacctttcagtgcagtttcttttcacattaggctgttggttcaaacttttgggagcacggactgtcagttctctgggaagtggtcagcgcatcctgcagggcttctcctcctctgtcttttggagaaccagggctcttctcaggggctctagggactgccaggctgtttcagccaggaaggccaaaatcaagagtgagatgtagaaagttgtaaaatagaaaaagtggagttggtgaatcggttgttctttcctcacatttggatgattgtcataaggtttttagcatgttcctccttttcttcaccctccccttttttcttctattaatcaagagaaacttcaaagttaatgggatggtcggatctcacaggctgagaactcgttcacctccaagcatttcatgaaaaagctgcttcttattaatcatacaaactctcaccatgatgtgaagagtttcacaaatccttcaaaataaaaagtaatgacttagaaactgccttcctgggtgatttgcatgtgtcttagtcttagtcaccttattatcctgacacaaaaacacatgagcatacatgtctacacatgactacacaaatgcaaacctttgcaaacacattatgcttttgcacacacacacctgtacacacacaccggcatgtttatacacagggagtgtatggttcctgtaagcactaagttagctgttttcatttaatgacctgtggtttaacccttttgatcactaccaccattatcagcaccagactgagcagctatatccttttattaatcatggtcattcattcattcattcattcacaaaatatttatgatgtatttactctgcaccaggtcccatgccaagcactggggacacagttatggcaaagtagacaaagcatttgttcatttggagcttagagtccaggaggaatacattagataatgacacaatcaaatataaattgcaagatgtcacaggtgtgatgaagggagagtaggagagaccatgagtatgtgtaacaggaggacacagcattattctagtgctgtactgttccgtacggcagccactacccacatgtaactttttaagatttaaatttaaattagttaacattcaaaacgcagctccccaatcacactagcaacatttcaagtgcttgagagccatgcatgattagtggttaccctattgaataggtcagaagtagaatcttttcatcatcacagaaagttctattggacagtgctcttctagatcatcataagactacagagcacttttcaaagctcatgcatgttcatcatgttagtgtcgtattttgagctggggttttgagactccccttagagatagagaaacagacccaagaaatgtgctcaattgcaatgggccacatacctagatctccagatgtcatttcccctctcttattttaagttatgttaagattactaaaacaataaaagctcctaaaaaatcaaactgtattctggtgttctcttctacacagtgggagggcgagcagtaggagagattggcccatttggtgctggccatttgaggaatgcaagcccagcactagtctcataatctctaggaatctgtagagagaggaattgaagtaaatttcagcattggctcattcagtcattcggcgacattcatcaggtacctgcaatgtgttaggggatcttatgagtaggcagcgtgcgtgatccttgctcccctggagctttctaacattctagcaggcagaccacacataaatttgcaatactgtttctgataaaaacgtgctgtaaaggaaataaagcagagaactatcatggaaaa

SEQ ID NO: 135396 - DNA, 497 bp, Artificial Sequence
  derived and/or modified sequence
gtttcctgttgcctgtctctaaacccctccacattcccgcggtccttcagactgcccggagagcgcgctctgcctgccgcctgcctgcctgccactgaggccttggtcttctcatctgtactattgggcagaaatatgtgacttgagcccccagtggggtgctggattatgaaaacaccctgaaaatgataaatgtatgcatcatcacagactaaagaaatacaaaggagggagtttttgtttaatattggtcatttatatgaagggaatttaaattttcgccaggcacgctacacctaggtttgattggcaaaggatcacagctggttcccagcaccatgagggcctggatcttctttctcctttgcctggccgggagggccttggcagcccctcagcaagaagccctgcctgatgagacagaggtggtggaagaaactgtggcagaggtgactgaggtatctgtgggagctaatcctgtccaggtggaagtagga

SEQ ID NO: 135397 - DNA, 511 bp, Artificial Sequence
  derived and/or modified sequence
agctatcagctgccacatcgacatagcctagagcaaagagggggagggaggagaagaagggggttgcctggagaaggaatcaacttttgaaactttctccaagtcccacccaccagaaggctcttctctgcctgactcactctccgaggaatgcgagttgccacgggttcccagcaccatgagggcctggatcttctttctcctttgcctggccgggagggccttggcagcccctcagcaagaagccctgcctgatgagacagaggtggtggaagaaactgtggcagaggtgactgaggtatctgtgggagctaatcctgtccaggtggaagtaggagaatttgatgatggtgcagaggaaaccgaagaggaggtggtggcggaaaatccctgccagaaccaccactgcaaacacggcaaggtgtgcgagctggatgagaacaacacccccatgtgcgtgtgccaggaccccaccagctgcccagcccccattggcgagtttgagaaggtg

SEQ ID NO: 135398 - DNA, 912 bp, Artificial Sequence
  derived and/or modified sequence
atgagagcctggattttttttctactctgcctagcggggcgtgctttggcagccccccagcaggaagcactccccgacgagactgaggtcgtcgaagagacggtcgcagaggttactgaggtgagcgttggggcaaatccagtgcaagtcgaagtgggggagtttgacgatggcgcggaggaaaccgaggaggaggtcgtggcagagaatccttgccagaatcatcattgtaaacacggcaaggtgtgcgaactcgatgagaataataccccaatgtgcgtgtgtcaggaccccacaagttgtccggcccccatcggcgaattcgaaaaggtgtgctcaaacgacaacaaaacatttgactcatcatgtcatttctttgccaccaaatgcacactggagggaactaagaaggggcacaagctgcacctcgactacataggtccctgcaagtacatacctccttgccttgattcagaactgaccgaatttcccctgcggatgagggattggctgaagaatgtcctggtaactctgtacgagcgcgacgaagataataacctcctcactgaaaagcagaagcttcgcgtgaaaaagatccacgaaaacgaaaaaagactggaagcaggcgaccatcccgtggaattgctggcccgcgatttcgagaagaactataacatgtacatctttccagtgcactggcaattcggccagcttgatcaacatccaatcgatggttatctctcacacaccgagctggccccactgagggcccctctcattccaatggagcactgcaccacaagatttttcgagacgtgtgacctagacaacgataagtacattgccctggatgagtgggcaggatgcttcggcattaaacagaaggatattgacaaggacctggtgatctag

SEQ ID NO: 135399 - DNA, 912 bp, Artificial Sequence
  derived and/or modified sequence
atgagggcctggatcttcttcctgctgtgcctggccggccgggccctggccgccccccagcaggaggccctgcctgatgaaacagaggtggtggaggagaccgtggccgaggtgacagaggtgtctgtgggcgccaaccctgtgcaggtggaggtgggggagtttgatgatggagctgaggagacagaggaggaggtggtggccgagaacccctgccagaaccaccactgcaagcacggcaaggtgtgtgagctggatgagaacaacacccccatgtgtgtgtgccaggaccccaccagctgcccagcccccatcggggagtttgagaaggtgtgcagcaatgacaacaagacctttgacagcagctgccacttctttgccaccaagtgcaccctggagggcaccaagaagggccacaagctgcacctggactacatcggcccctgcaagtacatccccccctgcctggacagcgagctgacagagttccccctgaggatgagggactggctgaagaatgtgctggtgaccctgtatgaaagagatgaggacaacaacctgctgacagagaagcagaagctgcgggtgaagaagatccatgaaaatgagaagaggctggaggccggggaccaccctgtggagctgctggcccgggactttgagaagaactacaacatgtacatcttccctgtgcactggcagtttggccagctggaccagcaccccattgatggctacctgagccacacagagctggcccccctgcgggcccccctcatccccatggagcactgcaccacccgcttctttgagacctgtgacctggacaatgacaagtacatcgccctggatgagtgggccggctgcttcggcatcaagcagaaggacatcgacaaggacctggtgatctag

SEQ ID NO: 135400 - DNA, 912 bp, Artificial Sequence
  derived and/or modified sequence
atgcgggcctggatcttcttcctgctgtgcctggccggccgggccctggcagcaccacagcaggaagctctccctgacgagactgaagtcgtcgaagaaaccgtggcagaggtgacagaggtgtccgtcggagcgaatcctgtgcaggtggaagtcggagaatttgacgatggtgccgaagagactgaagaggaggtggtagctgagaatccttgccaaaaccatcactgcaagcacggaaaggtgtgcgaattggacgaaaacaatacacctatgtgcgtgtgccaggacccgaccagctgcccagctcctattggcgaatttgagaaggtctgctcgaatgacaataaaacgttcgacagttcttgccacttttttgctactaagtgcaccctcgagggcaccaagaagggacataaattacaccttgactatatcgggccatgtaagtatattcctccctgcctcgattccgagttgaccgagtttcctctgcgcatgcgagactggctgaagaatgtactcgtcacgctctacgaaagggatgaagacaacaacctcctcactgaaaagcagaaacttcgggtgaaaaagatccacgaaaatgaaaaaaggcttgaagccggagaccacccggtggagctgcttgcacgggattttgagaagaactacaatatgtacatcttccccgtgcactggcaatttgggcaactcgatcagcaccccatcgatggctacttgagccacacagaattggctccattgcgagccccactcattcctatggagcactgcactactcgcttcttcgaaacttgcgaccttgacaatgacaaatacatcgcgctcgacgagtgggccggttgttttggcataaagcaaaaggatatagataaggacctcgtgatctag

SEQ ID NO: 135401 - DNA, 912 bp, Artificial Sequence
  derived and/or modified sequence
atgcgcgcatggatatttttcctcctctgtctggctgggcgtgcactagccgctccccagcaggaagctctgcccgacgaaaccgaggtagtggaggaaacagttgccgaggtgaccgaagtatccgtgggagctaatccagtgcaggttgaagtaggcgagttcgacgatggagccgaggagaccgaggaggaggtggttgctgagaatccttgtcaaaatcaccattgcaaacacggcaaggtgtgcgagctggacgagaataacacccctatgtgtgtgtgccaagatcctacttcctgtcctgcacccattggggaatttgagaaggtctgttccaatgacaataaaaccttcgactcatcgtgccatttcttcgccaccaagtgcacgcttgagggaaccaagaaaggccataagttacacctggattatataggaccttgtaaatatatacctccctgtttagactctgagctcacggaatttcccttacgcatgcgcgattggctcaagaacgtactggtcaccttgtatgagagagacgaggataataacctgttgactgagaaacagaagctgcgagtgaagaagatccacgagaacgaaaagcggcttgaggcaggtgaccatccagtggagctgttagcccgtgacttcgaaaagaattataacatgtatattttccccgtccactggcagttcgggcagctagaccagcaccctatcgacgggtatctgtcccacacagagctcgcaccactgcgcgctccgttaatacccatggagcactgtacaacccggtttttcgagacttgtgatctggacaatgataagtacatcgccctggatgagtgggccggatgtttcggaataaagcagaaggacattgacaaggacctcgtaatttag

SEQ ID NO: 135402 - DNA, 912 bp, Artificial Sequence
  derived and/or modified sequence
atgagagcctggatcttcttcctgctgtgcctggccggcagagccctggccgccccccagcaggaggccctgcccgacgagaccgaggtggtggaggagaccgtggccgaggtgaccgaggtgagcgtgggcgccaaccccgtgcaggtggaggtgggcgagttcgacgacggcgccgaggagaccgaggaggaggtggtggccgagaacccctgccagaaccaccactgcaagcacggcaaggtgtgcgagctggacgagaacaacacccccatgtgcgtgtgccaggaccccaccagctgccccgcccccatcggcgagttcgagaaggtgtgcagcaacgacaacaagaccttcgacagcagctgccacttcttcgccaccaagtgcaccctggagggcaccaagaagggccacaagctgcacctggactacatcggcccctgcaagtacatccccccctgcctggacagcgagctgaccgagttccccctgagaatgagagactggctgaagaacgtgctggtgaccctgtacgagagagacgaggacaacaacctgctgaccgagaagcagaagctgagagtgaagaagatccacgagaacgagaagagactggaggccggcgaccaccccgtggagctgctggccagagacttcgagaagaactacaacatgtacatcttccccgtgcactggcagttcggccagctggaccagcaccccatcgacggctacctgagccacaccgagctggcccccctgagagcccccctgatccccatggagcactgcaccaccagattcttcgagacctgcgacctggacaacgacaagtacatcgccctggacgagtgggccggctgcttcggcatcaagcagaaggacatcgacaaggacctggtgatctag

SEQ ID NO: 135403 - protein, 795 aa, Artificial Sequence
  derived and/or modified sequence
MAVLLLLLRALRRGPGPGPRPLWGPGPAWSPGFPARPGRGRPYMASRPPGDLAEAGGRALQSLQLRLLTPTFEGINGLLLKQHLVQNPVRLWQLLGGTFYFNTSRLKQKNKEKDKSKGKAPEEDEEERRRRERDDQMYRERLRTLLVIAVVMSLLNALSTSGGSISWNDFVHEMLAKGEVQRVQVVPESDVVEVYLHPGAVVFGRPRLALMYRMQVANIDKFEEKLRAAEDELNIEAKDRIPVSYKRTGFFGNALYSVGMTAVGLAILWYVFRLAGMTGREGGFSAFNQLKMARFTIVDGKMGKGVSFKDVAGMHEAKLEVREFVDYLKSPERFLQLGAKVPKGALLLGPPGCGKTLLAKAVATEAQVPFLAMAGPEFVEVIGGLGAARVRSLFKEARARAPCIVYIDEIDAVGKKRSTTMSGFSNTEEEQTLNQLLVEMDGMGTTDHVIVLASTNRADILDGALMRPGRLDRHVFIDLPTLQERREIFEQHLKSLKLTQSSTFYSQRLAELTPGFSGADIANICNEAALHAAREGHTSVHTLNFEYAVERVLAGTAKKSKILSKEEQKVVAFHESGHALVGWMLEHTEAVMKVSITPRTNAALGFAQMLPRDQHLFTKEQLFERMCMALGGRASEALSFNEVTSGAQDDLRKVTRIAYSMVKQFGMAPGIGPISFPEAQEGLMGIGRRPFSQGLQQMMDHEARLLVAKAYRHTEKVLQDNLDKLQALANALLEKEVINYEDIEALIGPPPHGPKKMIAPQRWIDAQREKQDLGEEETEETQQPPLGGEEPTWPK

SEQ ID NO: 135404 - protein, 223 aa, Artificial Sequence
  derived and/or modified sequence
MRLRCTRRGRDTLPCTLSTSSTPWSASSQVPRAQLGKAVGSCRGVGSCCARHCKTHLASLRQPCGERTGAACVLLIYFRVTIYFYVEIEKLLIIVAKQEGLSGNHKPVERKYMTYLSAQDHELIQVVQNGHLQMCGKSETGNEASPGLPKRARSCPRKNRKWLRFMSRATPWWAGCWSTRRDEGLHNPSTNAALGFAQAPQRPAPLHEQLFERMCMALGGRAS

SEQ ID NO: 135405 - DNA, 2388 bp, Artificial Sequence
  derived and/or modified sequence
atggccgtgctgctgctgctgctgagagccctgagaagaggccccggccccggccccagacccctgtggggccccggccccgcctggagccccggcttccccgccagacccggcagaggcagaccctacatggccagcagaccccccggcgacctggccgaggccggcggcagagccctgcagagcctgcagctgagactgctgacccccaccttcgagggcatcaacggcctgctgctgaagcagcacctggtgcagaaccccgtgagactgtggcagctgctgggcggcaccttctacttcaacaccagcagactgaagcagaagaacaaggagaaggacaagagcaagggcaaggcccccgaggaggacgaggaggagagaagaagaagagagagagacgaccagatgtacagagagagactgagaaccctgctggtgatcgccgtggtgatgagcctgctgaacgccctgagcaccagcggcggcagcatcagctggaacgacttcgtgcacgagatgctggccaagggcgaggtgcagagagtgcaggtggtgcccgagagcgacgtggtggaggtgtacctgcaccccggcgccgtggtgttcggcagacccagactggccctgatgtacagaatgcaggtggccaacatcgacaagttcgaggagaagctgagagccgccgaggacgagctgaacatcgaggccaaggacagaatccccgtgagctacaagagaaccggcttcttcggcaacgccctgtacagcgtgggcatgaccgccgtgggcctggccatcctgtggtacgtgttcagactggccggcatgaccggcagagagggcggcttcagcgccttcaaccagctgaagatggccagattcaccatcgtggacggcaagatgggcaagggcgtgagcttcaaggacgtggccggcatgcacgaggccaagctggaggtgagagagttcgtggactacctgaagagccccgagagattcctgcagctgggcgccaaggtgcccaagggcgccctgctgctgggcccccccggctgcggcaagaccctgctggccaaggccgtggccaccgaggcccaggtgcccttcctggccatggccggccccgagttcgtggaggtgatcggcggcctgggcgccgccagagtgagaagcctgttcaaggaggccagagccagagccccctgcatcgtgtacatcgacgagatcgacgccgtgggcaagaagagaagcaccaccatgagcggcttcagcaacaccgaggaggagcagaccctgaaccagctgctggtggagatggacggcatgggcaccaccgaccacgtgatcgtgctggccagcaccaacagagccgacatcctggacggcgccctgatgagacccggcagactggacagacacgtgttcatcgacctgcccaccctgcaggagagaagagagatcttcgagcagcacctgaagagcctgaagctgacccagagcagcaccttctacagccagagactggccgagctgacccccggcttcagcggcgccgacatcgccaacatctgcaacgaggccgccctgcacgccgccagagagggccacaccagcgtgcacaccctgaacttcgagtacgccgtggagagagtgctggccggcaccgccaagaagagcaagatcctgagcaaggaggagcagaaggtggtggccttccacgagagcggccacgccctggtgggctggatgctggagcacaccgaggccgtgatgaaggtgagcatcacccccagaaccaacgccgccctgggcttcgcccagatgctgcccagagaccagcacctgttcaccaaggagcagctgttcgagagaatgtgcatggccctgggcggcagagccagcgaggccctgagcttcaacgaggtgaccagcggcgcccaggacgacctgagaaaggtgaccagaatcgcctacagcatggtgaagcagttcggcatggcccccggcatcggccccatcagcttccccgaggcccaggagggcctgatgggcatcggcagaagacccttcagccagggcctgcagcagatgatggaccacgaggccagactgctggtggccaaggcctacagacacaccgagaaggtgctgcaggacaacctggacaagctgcaggccctggccaacgccctgctggagaaggaggtgatcaactacgaggacatcgaggccctgatcggcccccccccccacggccccaagaagatgatcgccccccagagatggatcgacgcccagagagagaagcaggacctgggcgaggaggagaccgaggagacccagcagccccccctgggcggcgaggagcccacctggcccaagtag

SEQ ID NO: 135406 - DNA, 2388 bp, Artificial Sequence
  derived and/or modified sequence
atggccgttctgctgctcctgctgcgcgctctcaggaggggtcccggtccgggtccaaggcccttatggggtcctggaccggcatggagccccggattccccgctaggcccggacgaggccggccctatatggcaagtcgtccgccaggtgatctggccgaagctggaggacgagccctgcaaagtcttcagctgagattactaacgccaaccttcgaaggcataaatggtctcttactcaagcagcatctggtgcagaatcctgtgcgcctttggcagctgctggggggaactttttactttaacacgtcccgtctgaaacagaaaaataaggaaaaagacaagtccaaaggaaaagcacctgaggaagatgaggaagaaaggcggcgacgtgagcgtgatgaccagatgtatagggagaggctccgtacactgttggtgatcgccgtcgtgatgtcccttctgaacgccctctccacgtcaggaggcagtatatcatggaatgactttgtgcatgagatgcttgctaagggagaggtgcagagggttcaagtcgtgccagaatcagatgtggttgaagtctatcttcatcctggggctgtggtcttcggcagaccgcggttggcactcatgtaccgcatgcaggtggcgaacatcgataagtttgaagagaaactgcgggccgctgaagacgaattaaatatcgaggctaaggataggatcccagtctcctacaaacgcaccggattctttggcaacgccctttactcggtggggatgacagccgttgggcttgcaatcctgtggtatgtgttcaggctggcaggcatgacagggcgcgagggtggattttccgccttcaaccaactaaagatggcccgttttacaatcgtagacggcaaaatgggcaagggcgtttcctttaaagacgtggcaggaatgcacgaggcaaagctggaagtgagagagttcgtcgattatctaaaatcacctgaacgctttctgcagctcggcgccaaggttcctaagggagctctgctcctgggtcccccaggctgcggcaagaccttgctagccaaggccgtggcaactgaggcgcaagtgccctttttggccatggccgggccagagttcgtggaagtcatcggggggctgggtgcggcgcgcgtacgaagtttatttaaggaagcgagggccagagcaccatgcatagtgtacattgacgaaattgatgcagttggtaaaaaaagatcgaccactatgtctggattttccaacacagaagaggagcaaaccttgaaccagctcctcgtcgaaatggatggcatggggactactgatcacgtcattgtgttagctagcacaaacagagcagacattcttgatggcgccttgatgcggcccggcagacttgacaggcatgtcttcatcgatctgcctacactgcaggaacgtagagagatatttgaacagcacctcaaatcacttaaactgacccagagttctacattttatagccagcggctggccgaattaactcccggcttcagcggcgccgatatagctaatatatgtaacgaagccgcacttcacgctgcgcgcgagggtcacacttctgtgcacaccctaaacttcgagtacgcagttgaaagagtgctcgccggaaccgcgaaaaagtccaaaatcctgagtaaagaggagcagaaggtagtcgcttttcacgaatcaggacatgcactggtaggctggatgctggagcatacagaagcagttatgaaggtgtcaattacccctcgaacaaacgccgcgttagggttcgcacagatgcttccccgggaccaacacctgttcactaaggagcagctgtttgagaggatgtgtatggccctgggcggccgcgcatccgaggcactgtcgtttaacgaggtgactagtggggctcaggacgacctgaggaaggttacccggattgcctatagtatggtgaagcagtttggaatggctcccggaatcggccctatttccttccctgaggctcaagaaggactcatgggtatcggtcgaagaccgttttcccagggactgcagcagatgatggaccatgaagccaggcttctggtcgccaaagcgtatcgccataccgaaaaagtgcttcaggacaacctcgataagcttcaggctctcgcaaacgcactgctcgagaaggaggtgattaactatgaagacattgaagccctgataggcccccctcctcatgggccaaaaaaaatgattgctcctcagcgctggattgatgcccagcgggagaagcaggacttaggcgaggaagaaacagaggaaactcaacagccaccgcttggcggcgaggagcctacatggccaaagtag

SEQ ID NO: 135407 - DNA, 672 bp, Artificial Sequence
  derived and/or modified sequence
atgaggctcaggtgtacccgcagagggagagataccttaccgtgcacactgtctacatcgagcaccccatggagcgctagtagccaggtgcccagggcacaactcggaaaggcagtggggagctgcagaggagtggggagctgctgcgcaagacactgtaaaacacacttggctagccttcgccagccatgcggggagagaacaggagcagcctgtgtcttgctgatttactttcgggttactatttatttctacgtcgagatcgaaaagctactcatcatcgtcgcaaagcaggaaggattaagcggcaaccacaaacccgtcgagcggaaatatatgacttacctgtccgcccaggatcacgagcttattcaggtggtccagaacggccacctacaaatgtgtggcaagtcagagactggaaacgaagccagcccaggtctgcccaaacgtgctcgaagctgccctaggaaaaatcggaaatggcttcggttcatgagcagagctaccccgtggtgggccgggtgttggtcaaccaggcgggatgagggcttgcacaatcccagtacaaatgccgcactgggattcgcacaggcccctcagagaccagctcctttgcatgaacagttgtttgaacggatgtgtatggccctgggaggccgcgcctcctag

SEQ ID NO: 135408 - DNA, 2388 bp, Artificial Sequence
  derived and/or modified sequence
atggctgtgctgctgctgctgctgcgggccctgcggcggggccctggccctggcccccggcccctgtggggccctggccctgcctggagccctggcttccctgcccggcccggccggggccggccctacatggccagccggcccccaggggacctggccgaggccggcggccgggccctgcagagcctgcagctgcggctgctgacccccacctttgagggcatcaatggcctgctgctgaagcagcacctggtgcagaaccctgtgcggctgtggcagctgctgggcggcaccttctacttcaacaccagccggctgaagcagaagaacaaggagaaggacaagagcaagggcaaggccccagaagaagatgaggaggagaggagaagaagagaaagagatgaccagatgtaccgggagcggctgcggaccctgctggtgattgctgtggtgatgagcctgctgaatgccctgagcaccagcggcggcagcatctcctggaatgactttgtgcatgagatgctggccaagggggaggtgcagagggtgcaggtggtgcctgagagtgatgtggtggaggtgtacctgcaccctggagctgtggtgtttggccggccccggctggccctgatgtacaggatgcaggtggccaacatcgacaagtttgaggagaagctgcgggctgctgaagatgagctgaacatcgaggccaaggaccgcatccctgtgtcctacaagaggacaggcttctttggaaatgccctgtacagcgtgggcatgacagctgtgggcctggccatcctgtggtacgtgttccggctggccggcatgacaggccgggagggcggcttcagcgccttcaaccagctgaagatggcccgcttcaccatcgtggatggcaagatgggcaagggcgtgtccttcaaggatgtggccggcatgcatgaggccaagctggaggtgcgggagtttgtggactacctgaagagccctgagcgcttcctgcagctgggcgccaaggtgcccaagggggccctgctgctgggccccccaggctgcggcaagaccctgctggccaaggctgtggccacagaggcccaggtgcccttcctggccatggccggccctgagtttgtggaggtgattggaggcctgggcgccgcccgggtgcgcagcctcttcaaggaggcccgggcccgggccccctgcatcgtgtacattgatgaaattgatgctgtgggcaagaagaggagcaccaccatgagcggcttcagcaacacagaggaggagcagaccctgaaccagctgctggtggagatggatggcatgggcaccacagaccacgtgattgtgctggccagcaccaacagagctgacatcctggatggagccctgatgaggcctggccgcctggacagacatgtgttcatcgacctgcccaccctgcaggagcggcgggagatctttgagcagcacctgaagagcctgaagctgacccagagcagcaccttctacagccagaggctggccgagctgaccccaggcttctctggagctgacatcgccaacatctgcaatgaggccgccctgcacgccgcccgggagggccacacctctgtgcacaccctgaactttgaatatgctgtggagcgggtgctggccggcacagccaagaagagcaagatcctgagcaaggaggagcagaaggtggtggccttccacgagagcggccacgccctggtgggctggatgctggagcacacagaggccgtgatgaaggtgtccatcacccccaggaccaatgctgccctgggctttgcccagatgctgccccgggaccagcacctgttcaccaaggagcagctgtttgagaggatgtgcatggccctgggcggccgggccagcgaggccctgtccttcaatgaggtgaccagcggggcccaggatgacctgaggaaggtgaccagaattgcctacagcatggtgaagcagtttggcatggcccctggcatcggccccatctccttccctgaggcccaggagggcctgatgggcatcggccggcggcccttcagccagggcctgcagcagatgatggaccacgaggcccggctgctggtggccaaggcctaccgccacacagagaaggtgctgcaggacaacctggacaagctgcaggccctggccaatgccctgctggagaaggaggtgatcaactatgaagatattgaggccctgattggccccccaccccacggccccaagaagatgattgccccccagcgctggattgatgcccagcgggagaagcaggacctgggggaggaggagacagaggagacccagcagccccccctgggcggggaggagcccacctggcccaagtag

SEQ ID NO: 135409 - DNA, 2388 bp, Artificial Sequence
  derived and/or modified sequence
atggccgtgctgctgctgctgctgcgggccctgcggcggggccccggacccggcccccgacccctgtggggaccaggccccgcgtggagtcctgggtttccagcccggcccgggcgggggaggccctacatggcgagccggccgcccggtgacctggccgaggccggcggccgggcactccaaagtctgcagctcaggctgttaaccccaacatttgagggcattaacggcctcttattaaagcagcatttggtccagaaccccgtgagactatggcagttactgggtggcaccttctacttcaataccagccgactgaaacaaaagaataaagagaaggataaatccaaaggaaaagccccagaagaagatgaagaggagagacggcgacgagaacgagatgaccagatgtaccgtgaacggctgaggaccctccttgtcatagccgtcgtcatgagcctcttgaacgcactgagcaccagcgggggatccatttcctggaatgattttgtacatgagatgttagcgaagggcgaggtgcagcgagtgcaggtggtgcctgaatctgacgtggtggaggtctatctgcatccgggcgccgtggtgtttggacggccccgcttggccctgatgtatcgcatgcaggttgcaaatatagataagtttgaggagaaattgcgggcagcggaagacgagcttaacattgaagccaaggatcgaattcccgttagctataagaggacaggcttcttcgggaatgcgctttactctgtcgggatgacagctgtgggcttagctatcttatggtacgtcttccgactggccggtatgacgggacgcgagggtggattctctgcttttaaccagctgaagatggctagattcacgatcgtggacggtaaaatgggaaagggagttagctttaaagatgtggcaggaatgcatgaggccaagctggaggtgagggaatttgtcgattatctaaagtcaccagaacgctttttgcagctcggggccaaagtcccaaagggtgctctacttctagggccgcctgggtgcggtaagaccctgctcgcaaaggcggtggcaactgaggcccaggttcccttcctggctatggctggccccgagttcgttgaggtcataggtggcttaggcgccgccagagtcagaagcctgttcaaggaagcacgggctcgcgccccgtgtatcgtttatatcgatgagattgacgccgtcggcaagaaaagatccacaaccatgtcaggcttctccaatacagaagaagaacaaactcttaaccagcttctcgtggagatggacggtatgggcacaacagatcacgtaatcgttctcgcaagcacaaatagagccgatattttagacggtgcattgatgaggcctgggcggctagataggcacgttttcattgacctcccgacccttcaggagcgtcgcgagattttcgagcaacacctcaaatctttgaagctgactcaaagctcaaccttttacagccagaggctggctgagttaactcccggcttttcaggcgctgatatcgccaacatatgcaacgaggccgcactacacgccgcgcgcgaagggcatacatcggtgcacactctgaattttgagtacgctgtggaacgcgttctggccgggactgccaaaaaaagcaagatcctgagtaaagaagaacagaaagtggttgccttccatgagagcggccacgctctggttggctggatgctggaacacacagaagctgtcatgaaagtttctatcacccctcgcacaaatgctgctcttggtttcgcacagatgctccctcgtgaccagcatctctttacaaaagaacagctatttgagcgcatgtgcatggcccttggggggcgggctagcgaggcgttgtcttttaatgaggtgacctctggtgcccaagatgacctccgtaaggtgacgagaatcgcgtactccatggtgaaacagtttggaatggctcctggaatcggcccaattagttttcccgaggctcaggaaggacttatgggaattgggcgtcgcccctttagccagggacttcagcagatgatggaccacgaagcgcgtctccttgtggcaaaggcctatcgtcatacggagaaagtgctgcaagataacctggacaagctgcaagctctcgccaatgccctattagagaaggaagtaatcaattacgaagacatagaagccctgatcggccctccgcctcatgggccaaaaaaaatgatcgccccccagcgttggattgacgctcagcgagagaagcaagatcttggagaggaagagactgaagagacccagcaaccaccattagggggcgaggagcctacttggcccaaatag

SEQ ID NO: 135410 - DNA, 672 bp, Artificial Sequence
  derived and/or modified sequence
atgcggctgcggtgcacccggcggggccgggacaccctgccctgcacactcagcactagcagcacaccttggagcgccagctcccaggttccacgagctcaactgggaaaggctgtaggctcatgccgcggcgtggggtcctgttgcgctagacactgcaaaacacacctcgcttctttaaggcagccgtgtggggagagaaccggagccgcttgcgtgctcttgatctattttagggtgacaatttatttctacgtcgagatcgagaagttactcatcatcgtcgccaaacaggagggcttaagcggcaatcataagcccgtggagaggaaatacatgacatacctgtcagcccaagatcatgagttgatccaagtggtgcagaatggccacctgcagatgtgcggcaagtcagaaacgggcaatgaagccagtcccgggttgccgaaaagggctaggtcgtgccctcggaaaaaccgtaagtggcttaggttcatgtcgcgggcaactccttggtgggcaggctgttggtctacccgccgggatgagggactccataacccatcaacaaatgccgcgttgggctttgcacaagcaccacagaggccagccccactccatgaacaactatttgaacgcatgtgtatggctctgggcggccgggcgtcgtag

SEQ ID NO: 135411 - DNA, 2388 bp, Artificial Sequence
  derived and/or modified sequence
atggcggtgctgttgctactgctgcgtgcattaagacgaggccctgggccaggtccgagacccctgtggggaccgggacctgcgtggtctcctgggtttcccgcacggccaggtcggggtagaccgtatatggccagtcgcccacctggcgatcttgccgaggctggcggacgggctctacagtccttacagttgcgcctcctaactcccacttttgaggggataaatgggctgcttctgaagcagcatctggttcaaaatccggtgagactctggcagttattgggcggtacattttacttcaatacttcccgacttaagcaaaagaacaaagaaaaagacaagagcaagggtaaagccccagaagaggacgaggaggagaggaggcgcagagaaagggacgatcaaatgtatagagagcggctgaggaccctgttggtgatcgctgtagtgatgtccttgttgaacgctctctctacaagcggtggtagcattagctggaatgattttgtgcacgagatgctggccaaaggggaggtgcaacgtgtgcaggtagtacccgagagtgatgttgttgaggtgtacctgcaccctggcgctgtggttttcgggagaccacgccttgcattgatgtacaggatgcaggtggccaatattgacaagttcgaggagaagctgcgcgctgcagaggacgagctgaatatcgaagcaaaagacagaatacccgtgtcttataaaagaaccggcttctttggaaatgcactctactcagtgggcatgaccgccgtgggtctggcaattctgtggtatgtcttcagactggcaggaatgaccggacgcgaggggggattttcagcctttaatcaactcaaaatggcccgtttcaccattgtcgacggcaagatggggaaaggggtgtcctttaaagacgtggccggtatgcatgaagccaagctcgaggtgagagaattcgtagactatctgaaaagtcccgaacggttcctgcagctaggtgctaaagtgccgaaaggggctttgttattagggccaccaggatgtggcaagacgttactagccaaagcagtggctacggaggcacaggtcccctttctggctatggcagggccagaatttgtcgaggttatcggaggactgggagccgcacgggtgagaagtctgtttaaagaagccagggcgcgtgctccatgtatcgtatatattgacgagatcgacgccgtcggaaagaagcgtagcacaacgatgagcggttttagcaatacggaggaagaacagacactgaaccagctgcttgtcgagatggacggaatggggacaacggaccacgtaattgtgttagcttcaacaaatagggctgacattttggacggtgccctaatgaggccaggacgactggatcgccatgtgttcatagacctccccacgctgcaggagcggagagagatctttgaacagcacctgaagtcgctgaaactgacccaaagcagcaccttttatagccagagattggcagagctgactccaggattctccggtgcagatatcgccaacatttgcaatgaggccgcattgcacgctgctcgcgagggccacacatctgtgcacacactaaatttcgagtacgcggttgagagagttcttgccggaacagctaagaagagtaaaatactatctaaggaagaacagaaggtcgtggccttccacgaatctgggcacgcccttgtgggctggatgctcgaacacaccgaagctgtgatgaaagtcagtattactcccagaacaaatgccgctctgggttttgcccaaatgctacctcgggaccagcacttgttcactaaggagcaacttttcgaaagaatgtgcatggcgctcggaggtagggcatctgaggcactgagttttaatgaagtgacttccggcgcacaggatgacctgcgaaaggtcacaagaattgcttattctatggtgaaacaatttgggatggctcccggtatcggacccatttcgttccccgaagcacaggagggactgatgggcataggtaggcgaccattttcacagggactccagcagatgatggatcacgaggcaagactgctcgtggccaaggcttaccgtcacaccgaaaaggtcctgcaagacaaccttgacaagctacaggcactcgccaacgccctgctcgaaaaggaggtcatcaattatgaagatatagaagctttgattggacctccgccacacggacctaaaaaaatgatagctcctcagcgctggatagacgctcagcgcgagaagcaggatctgggcgaagaagagacagaggaaacccagcagcctcccttggggggtgaggagccgacctggccaaagtag

SEQ ID NO: 135412 - DNA, 3076 bp, Artificial Sequence
  derived and/or modified sequence
ggctttcaggccaacatggccgtgctgctgctgctgctccgtgccctccgccggggtccaggcccgggtcctcggccgctgtggggcccaggcccggcctggagtccagggttccccgccaggcccgggagggggcggccgtacatggccagcaggcctccgggggacctcgccgaggctggaggccgagctctgcagagcttacaattgagactgctaacccctacctttgaagggatcaacggattgttgttgaaacaacatttagttcagaatccagtcagactctggcaacttttaggtggtactttctattttaacacctcaaggttgaagcagaagaataaggagaaggataagtcgaaggggaaggcgcctgaagaggacgaagaggagaggagacgccgtgagcgggacgaccagatgtaccgagagcggctgcgcaccttgctggtcatcgcggttgtcatgagcctcctgaatgctctcagcaccagcggaggcagcatttcctggaacgactttgtccacgagatgctggccaagggcgaggtgcagcgcgtccaggtggtgcctgagagcgacgtggtggaagtctacctgcaccctggagccgtggtgtttgggcggcctcggctagccttgatgtaccgaatgcaggttgcaaatattgacaagtttgaagagaagcttcgagcagctgaagatgagctgaatatcgaggccaaggacaggatcccagtttcctacaagcgaacaggattctttggaaatgccctgtactctgtggggatgacggcagtgggcctggccatcctgtggtatgttttccgtctggccgggatgactggaagggaaggtggattcagtgcttttaatcagcttaaaatggctcgtttcaccattgtggatgggaagatggggaaaggagtcagcttcaaagacgtggcaggaatgcacgaagccaaactggaagtccgcgagtttgtggattatctgaagagcccagaacgcttcctccagcttggcgccaaggtcccaaagggcgcactgctgctcggcccccccggctgtgggaagacgctgctggccaaggcggtggccacggaggctcaggtgcccttcctggcgatggccggcccagagttcgtggaggtcattggaggcctcggcgctgcccgtgtgcggagcctctttaaggaagcccgagcccgggccccctgcatcgtctacatcgatgagatcgacgcggtgggcaagaagcgctccaccaccatgtccggcttctccaacacggaggaggagcagacgctcaaccagcttctggtagaaatggatggaatgggtaccacagaccatgtcatcgtcctggcgtccacgaaccgagctgacattttggacggtgctctgatgaggccaggccgactggaccggcacgtcttcattgatctccccacgctgcaggagaggcgggagatttttgagcagcacctgaagagcctgaagctgacccagtccagcaccttttactcccagcgtctggcagagctgacaccaggattcagtggggctgacatcgccaacatctgcaatgaggctgcgctgcacgcggcgcgggagggacacacttccgtgcacactctcaacttcgagtacgccgtggagcgcgtcctcgcagggactgccaaaaagagcaagatcctgtccaaggaagaacagaaagtggttgcgtttcatgagtcgggccacgccttggtgggctggatgctggagcacacggaggccgtgatgaaggtctccataacccctcggacaaacgccgccctgggctttgctcagatgctccccagagaccagcacctcttcaccaaggagcagctgtttgagcggatgtgcatggccctgggaggacgggcctcggaagcactgtccttcaacgaggtcacttctggggcacaggacgacctgaggaaggtcacccgcatcgcctactccatggtgaagcagtttgggatggcacctggcatcgggcccatctccttccctgaggcgcaggagggcctcatgggcatcgggcggcgccccttcagccaaggcctgcagcagatgatggaccatgaagcaagactgctggtggccaaggcctacagacacaccgagaaggtgctgcaggacaacctggacaagttgcaggcgctggcaaacgcccttctggaaaaggaagtgataaactatgaggacattgaggctctcattggcccgccgccccatgggccgaagaaaatgatcgcaccgcagaggtggatcgacgcccagagggagaaacaggacttgggcgaggaggagaccgaagagacccagcagcctccacttggaggcgaagagccgacttggcccaagtagttgggaggtgttggctgcacgtgcgggtggtccgggaagtgagggctcactcagccaccctgagttgcttttcagctgaggtttgcacttcctctcgcggccctcagtagtccctgcacagtgacttctgagatctgttgattgatgacccttttcatgattttaagtttctctgcagaaactactgacggagtcctgtgtttgtgagtcgtttcccctatggggaaggttatcagtgcttcccgagtgagcatggaacacttcgagttcccagggttatagacagtcgttcccagtgtggctgaggccacccagaggcagcagagcattcagactccaaacagacccctgttcatgccgacgcttgcacgaccgccccagttcctgtggctccctcggaatgctaaggggatcggacatgaaaggaccctgtgagccgattgtcctatctccagcggccctgtcatccagctcactcatcaatggggccagtcaggcccaggcactgggctccggaggactcaccactgccccctgctgccatgtggactggtgcaagttgaggacttcttgctggtctagtcacgcatgcagtgttggggatgccttggtttttactgctctgagaattgttgagatactttactaataaactgtgtagttggaaaatcta

SEQ ID NO: 135413 - DNA, 1824 bp, Artificial Sequence
  derived and/or modified sequence
atgaggctgcgctgcacgcggcgcgggagggacacacttccgtgcacactctcaacttcgagtacgccgtggagcgcgtcctcgcaggtccccagggctcagcttgggaaagcagtgggttcctgcagaggagtggggagctgctgtgccagacactgcaaaacacacctggcttctctccgacagccctgcggggagaggactggcgctgcctgtgtcttactgatttattttcgtgtaaccatttacttttatgtggaaatcgaaaagcttttgataatagtagcaaagcaggaaggactgagtgggaaccacaagccagttgaaagaaaatacatgacgtacttgagtgctcaggaccacgagctgattcaagttgtacagaatggacacttacagatgtgtggaaaatctgagacaggaaatgaagcctcaccaggactgccaaaaagagcaagatcctgtccaaggaagaacagaaagtggttgcgtttcatgagtcgggccacgccttggtgggctggatgctggagcacacggcgtgatgaaggtctccataacccctcgacaaacgccgccctgggctttgctcaggctccccagagaccagcacctcttcacgagcagctgtttgagcggatgtgcatggccctgggaggacgggcctcggaagcactgtccttcaacgaggtcacttctggggcacaggacgacctgaggaaggtcacccgcatcgcctactccatggtgaagcagtttgggatggcacctggcatcgggcccatctccttccctgaggcgcaggagggcctcatgggcatcgggcggcgccccttcagccaaggcctgcagcagatgatggaccatgaagcaagactgctggtggccaaggcctacagacacaccgagaaggtgctgcaggacaacctggacaagttgcaggcgctggcaaacgcccttctggaaaaggaagtgataaactatgaggacattgaggctctcattggcccgccgccccatgggccgaagaaaatgatcgcaccgcagaggtggatcgacgcccagagggagaaacaggacttgggcgaggaggagaccgaagagacccagcagcctccacttggaggcgaagagccgacttggcccaagtagttgggaggtgttggctgcacgtgcgggtggtccgggaagtgagggctcactcagccaccctgagttgcttttcagctgaggtttgcacttcctctcgcggccctcagtagtccctgcacagtgacttctgagatctgttgattgatgacccttttcatgattttaagtttctctgcagaaactactgacggagtcctgtgtttgtgagtcgtttcccctatggggaaggttatcagtgcttcccgagtgagcatggaacacttcgagttcccagggttatagacagtcgttcccagtgtggctgaggccacccagaggcagcagagcattcagactccaaacagacccctgttcatgccgacgcttgcacgaccgccccagttcctgtggctccctcggaatgctaaggggatcggacatgaaaggaccctgtgagccgattgtcctatctccagcggccctgtcatccagctcactcatcaatggggccagtcaggcccaggcactgggctccggaggactcaccactgccccctgctgccatgtggactggtgcaagttgaggacttcttgctggtctagtcacgcatgcagtgttggggatgccttggtttttactgctctgagaattgttgagatactttactaataaactgtgtagttggaaaatct

SEQ ID NO: 135414 - protein, 270 aa, Artificial Sequence
  derived and/or modified sequence
MLQACKMEGFPLVPPPSEDLVPYDTDLYQRQTHEYYPYLSSDGESHSDHYWDFHPHHVHSEFESFAENNFTELQSVQPPQLQQLYRHMELEQMHVLDTPMVPPHPSLGHQVSYLPRMCLQYPSLSPAQPSSDEEEGERQSPPLEVSDGEADGLEPGPGLLPGETGSKKKIRLYQFLLDLLRSGDMKDSIWWVDKDKGTFQFSSKHKEALAHRWGIQKGNRKKMTYQKMARALRNYGKTGEVKKVKKKLTYQFSGEVLGRGGLAERRHPPH

SEQ ID NO: 135415 - DNA, 1423 bp, Artificial Sequence
  derived and/or modified sequence
gactatctcccagcggcaggcccttcgataaaatcaggaacttgtgctggccctgcaatgtcaagggagggggctcacccagggctcctgtagctcagggggcaggcctgagccctgcacccgccccacgaccgtccagcccctgacggggcaccccatcctgaggggctctgcattggcccccaccgaggcaggggatctgaccgactcggagcccggctggatgttacaggcgtgcaaaatggaagggtttcccctcgtcccccctccatcagaagacctggtgccctatgacacggatctataccaacgccaaacgcacgagtattacccctatctcagcagtgatggggagagccatagcgaccattactgggacttccacccccaccacgtgcacagcgagttcgagagcttcgccgagaacaacttcacggagctccagagcgtgcagcccccgcagctgcagcagctctaccgccacatggagctggagcagatgcacgtcctcgatacccccatggtgccaccccatcccagtcttggccaccaggtctcctacctgccccggatgtgcctccagtacccatccctgtccccagcccagcccagctcagatgaggaggagggcgagcggcagagccccccactggaggtgtctgacggcgaggcggatggcctggagcccgggcctgggctcctgcctggggagacaggcagcaagaagaagatccgcctgtaccagttcctgttggacctgctccgcagcggcgacatgaaggacagcatctggtgggtggacaaggacaagggcaccttccagttctcgtccaagcacaaggaggcgctggcgcaccgctggggcatccagaagggcaaccgcaagaagatgacctaccagaagatggcgcgcgcgctgcgcaactacggcaagacgggcgaggtcaagaaggtgaagaagaagctcacctaccagttcagcggcgaagtgctgggccgcgggggcctggccgagcggcgccacccgccccactgagcccgcagcccccgccgggccccgccaggcctccccgctggccatagcattaagccctcgcccggcccggacacagggaggacgctcccggggcccagaggcaggactgtggcgggccgggcctcgcctcacccgccccctccccccactccaggccccctccacatcccgcttcgcctccctccaggactccaccccggctcccggacgccagctgggcgtcagaccccaccggggcaaccttgcagaggacgacccggggtactgccttgggagtctcaagtccgtatgtaaatcagatctcccctctcacccctcccacccattaacctcctcccaaaaaacaagtaaagttattctcaatccatcaaaaaaaaaaaaaaaaaa

SEQ ID NO: 135416 - DNA, 813 bp, Artificial Sequence
  derived and/or modified sequence
atgctgcaggcctgcaagatggagggcttccccctggtgcccccccccagcgaggacctggtgccctacgacaccgacctgtaccagagacagacccacgagtactacccctacctgagcagcgacggcgagagccacagcgaccactactgggacttccacccccaccacgtgcacagcgagttcgagagcttcgccgagaacaacttcaccgagctgcagagcgtgcagcccccccagctgcagcagctgtacagacacatggagctggagcagatgcacgtgctggacacccccatggtgcccccccaccccagcctgggccaccaggtgagctacctgcccagaatgtgcctgcagtaccccagcctgagccccgcccagcccagcagcgacgaggaggagggcgagagacagagcccccccctggaggtgagcgacggcgaggccgacggcctggagcccggccccggcctgctgcccggcgagaccggcagcaagaagaagatcagactgtaccagttcctgctggacctgctgagaagcggcgacatgaaggacagcatctggtgggtggacaaggacaagggcaccttccagttcagcagcaagcacaaggaggccctggcccacagatggggcatccagaagggcaacagaaagaagatgacctaccagaagatggccagagccctgagaaactacggcaagaccggcgaggtgaagaaggtgaagaagaagctgacctaccagttcagcggcgaggtgctgggcagaggcggcctggccgagagaagacaccccccccactag

SEQ ID NO: 135417 - DNA, 813 bp, Artificial Sequence
  derived and/or modified sequence
atgcttcaggcatgcaaaatggaaggctttcccctggtgcccccccctagcgaggatctggttccttatgacaccgatttataccagagacaaacccacgagtactacccctacctgagttctgatggagaatctcacagcgaccactactgggactttcatccgcaccacgttcactctgaattcgagtcctttgcggaaaacaacttcaccgagctccagtccgttcagcctccccagctgcaacaattataccggcacatggagcttgagcaaatgcacgtcctcgatacaccaatggtacctccacatcctagcttaggccatcaggttagctacctccctcggatgtgtctgcagtatccgagcctgtctcctgcacagccttccagcgatgaggaggagggagagcgacagagtcctcctcttgaggtcagcgatggggaggccgacggtctggaaccgggccccggcttgctgccaggggagaccggcagtaaaaagaagatccgcttatatcagttcctgctagatctgctgcgctccggggatatgaaagactccatttggtgggtagacaaagataaaggaacgttccagttctccagcaaacacaaagaggccctagcacatcgctgggggattcagaagggtaacaggaaaaagatgacataccaaaagatggctcgggccctccgcaactacggtaagacaggtgaggttaagaaagtcaagaaaaagctcacataccagttctcgggggaagttctgggtcgcgggggcctcgcggagaggcggcaccctcctcattag

SEQ ID NO: 135418 - DNA, 813 bp, Artificial Sequence
  derived and/or modified sequence
atgctgcaggcctgcaagatggagggcttccccctggtgcccccaccttctgaggacctggtgccctatgacacagacctgtaccagaggcagacccatgagtactacccctacctgagcagtgatggagagagccacagcgaccactactgggacttccacccccaccacgtgcacagcgagtttgagagctttgctgagaacaacttcacagagctgcagagcgtgcagcccccccagctgcagcagctgtaccgccacatggagctggagcagatgcacgtgctggacacccccatggtgcccccccaccccagcctgggccaccaggtgtcctacctgcccaggatgtgcctgcagtaccccagcctgagccctgcccagcccagcagtgatgaggaggagggggagcggcagagcccccccctggaggtgtctgatggagaggctgatggcctggagcccggccctggcctgctgcctggagagaccggcagcaagaagaagatccggctgtaccagttcctgctggacctgctgcggagcggggacatgaaggacagcatctggtgggtggacaaggacaagggcaccttccagttcagcagcaagcacaaggaggccctggcccaccgctggggcatccagaagggcaacaggaagaagatgacctaccagaagatggcccgggccctgagaaattatggcaagacaggagaggtgaagaaggtgaagaagaagctgacctaccagttctctggagaggtgctgggccggggcggcctggccgagaggaggcaccccccccactag

SEQ ID NO: 135419 - DNA, 813 bp, Artificial Sequence
  derived and/or modified sequence
atgctgcaggcctgcaagatggagggcttccccctggtgccccccccttcagaggatctggtgccgtatgatactgatttgtatcaacgtcagacccatgaatattacccatatctatcgagtgatggggaaagtcattcagaccattactgggacttccaccctcaccatgttcattccgaattcgagagtttcgccgagaacaattttacagagctccagagtgtacaacccccccagctgcaacaactttaccggcacatggagctagagcaaatgcatgttttagatacgccgatggtccctccacatccatctcttggccaccaggttagctacctgccccgcatgtgtctacaatatcccagcctttcacctgcccaaccctcatccgacgaagaggagggggagcgacagtcaccccccctggaagtctccgatggagaggcagatggcctggagcccggccctggtctgttgcccggggagaccggtagcaagaaaaagattagactatatcagtttttgctggatctgctgcggagcggtgacatgaaggattccatctggtgggtagataaagataaaggaacatttcagttttcgtccaaacacaaagaggccctggcgcataggtggggcatccagaaagggaatagaaaaaagatgacttaccaaaaaatggctagagcgctccgtaactacgggaaaaccggcgaggttaagaaggtcaaaaaaaagttgacatatcagtttagtggagaagtactcggacgcggcggtctcgctgaaagaaggcaccccccccattag

SEQ ID NO: 135420 - DNA, 813 bp, Artificial Sequence
  derived and/or modified sequence
atgctccaggcttgtaagatggagggatttccactggtcccaccaccctcggaagacctagtgccctatgacacggacttatatcagagacagacacatgagtactacccatacttgtccagtgatggagagagccacagcgaccattattgggactttcacccccatcacgttcattccgagttcgagtcatttgctgagaacaattttaccgagctgcagtcagttcagccaccgcagctgcagcagttataccggcatatggagctcgagcagatgcacgtgcttgacacacccatggtgcctccccacccgagcctgggtcaccaggtttcttatctgccccgtatgtgcctgcagtacccatcactgtctcctgcccagccatcctctgatgaagaggagggtgagcgtcagagtccccctctggaggtgtccgatggggaggctgacggcctggagcccggaccagggctcctccccggagagactggttcaaaaaaaaagattagattgtatcagttcctgctcgatctccttagatcaggggacatgaaggattcaatttggtgggtcgataaggataaaggaacatttcagttcagtagtaaacacaaagaagctctcgcacatcgatggggcattcagaaaggaaacagaaagaagatgacatatcaaaagatggcaagagctctgcgtaactacggtaaaacaggcgaagtcaaaaaggtcaagaaaaagttaacctaccagttcagtggagaagttctgggacgaggcggactggcggagagacggcacccgcctcactag

SEQ ID NO: 135421 - DNA, 1403 bp, Artificial Sequence
  derived and/or modified sequence
gactatctcccagcggcaggcccttcgataaaatcaggaacttgtgctggccctgcaatgtcaagggagggggctcacccagggctcctgtagctcagggggcaggcctgagccctgcacccgccccacgaccgtccagcccctgacggggcaccccatcctgaggggctctgcattggcccccaccgaggcaggggatctgaccgactcggagcccggctggatgttacaggcgtgcaaaatggaagggtttcccctcgtcccccctccatcagaagacctggtgccctatgacacggatctataccaacgccaaacgcacgagtattacccctatctcagcagtgatggggagagccatagcgaccattactgggacttccacccccaccacgtgcacagcgagttcgagagcttcgccgagaacaacttcacggagctccagagcgtgcagcccccgcagctgcagcagctctaccgccacatggagctggagcagatgcacgtcctcgatacccccatggtgccaccccatcccagtcttggccaccaggtctcctacctgccccggatgtgcctccagtacccatccctgtccccagcccagcccagctcagatgaggaggagggcgagcggcagagccccccactggaggtgtctgacggcgaggcggatggcctggagcccgggcctgggctcctgcctggggagacaggcagcaagaagaagatccgcctgtaccagttcctgttggacctgctccgcagcggcgacatgaaggacagcatctggtgggtggacaaggacaagggcaccttccagttctcgtccaagcacaaggaggcgctggcgcaccgctggggcatccagaagggcaaccgcaagaagatgacctaccagaagatggcgcgcgcgctgcgcaactacggcaagacgggcgaggtcaagaaggtgaagaagaagctcacctaccagttcagcggcgaagtgctgggccgcgggggcctggccgagcggcgccacccgccccactgagcccgcagcccccgccgggccccgccaggcctccccgctggccatagcattaagccctcgcccggcccggacacagggaggacgctcccggggcccagaggcaggactgtggcgggccgggcctcgcctcacccgccccctccccccactccaggccccctccacatcccgcttcgcctccctccaggactccaccccggctcccggacgccagctgggcgtcagaccccaccggggcaaccttgcagaggacgacccggggtactgccttgggagtctcaagtccgtatgtaaatcagatctcccctctcacccctcccacccattaacctcctcccaaaaaacaagtaaagttattctcaatcca

SEQ ID NO: 135422 - protein, 262 aa, Artificial Sequence
  derived and/or modified sequence
MLALEAAQLDGPHFSCLYPDGVFYDLDSCKHSSYPDSEGAPDSLWDWTVAPPVPATPYEAFDPAAAAFSHPQAAQLCYEPPTYSPAGNLELAPSLEAPGPGLPAYPTENFASQTLVPPAYAPYPSPVLSEEEDLPLDSPALEVSDSESDEALVAGPEGKGSEAGTRKKLRLYQFLLGLLTRGDMRECVWWVEPGAGVFQFSSKHKELLARRWGQQKGNRKRMTYQKLARALRNYAKTGEIRKVKRKLTYQFDSALLPAVRRA

SEQ ID NO: 135423 - DNA, 1493 bp, Artificial Sequence
  derived and/or modified sequence
ggcaaacagcccgcccggcaccaccatgctcgccctggaggctgcacagctcgacgggccacacttcagctgtctgtacccagatggcgtcttctatgacctggacagctgcaagcattccagctaccctgattcagagggggctcctgactccctgtgggactggactgtggccccacctgtcccagccaccccctatgaagccttcgacccggcagcagccgcttttagccacccccaggctgcccagctctgctacgaaccccccacctacagccctgcagggaacctcgaactggcccccagcctggaggccccggggcctggcctccccgcataccccacggagaacttcgctagccagaccctggttcccccggcatatgccccgtaccccagccctgtgctatcagaggaggaagacttaccgttggacagccctgccctggaggtctcggacagcgagtcggatgaggccctcgtggctggccccgaggggaagggatccgaggcagggactcgcaagaagctgcgcctgtaccagttcctgctggggctactgacgcgcggggacatgcgtgagtgcgtgtggtgggtggagccaggcgccggcgtcttccagttctcctccaagcacaaggaactcctggcgcgccgctggggccagcagaaggggaaccgcaagcgcatgacctaccagaagctggcgcgcgccctccgaaactacgccaagaccggcgagatccgcaaggtcaagcgcaagctcacctaccagttcgacagcgcgctgctgcctgcagtccgccgggcctgagcacacccgaggctcccacctgcggagccgctgggggacctcacgtcccagccaggatccccctggaagaaaaagggcgtccccacactctaggtgataggacttacgcatccccaccttttggggtaaggggagtgctgccctgccataatccccaagcccagcccgggcctgtctgggattccccacttgtgcctggggtccctctgggatttctttgtcatgtacagactccctgggatcctcatgttttgggtgacaggacctatggaccactatactcggggaggcagggtagcagttcttccagaatcccaagagcttctctgggattttcttgtgatatctgattccccagtgaggcctgggacgtttttaagatcgctgtgtgtctgtaaaccctgaatctcatctggggtgggggccctgctggcaaccctgagccctgtccaaggttccctcttgtcagatctgagatttcctagttatgtctggggccctctgggagctgttatcatctcagatctcttcgcccatctatggctgtgttgtcacatctgtcccctcatttttgagatcccccaattctctggaactattctgctgcccctttttatgtgtctggagttccccaatcacatctagggctcctccaagaaaaaaaaaaaaaaaaaaaaaa

SEQ ID NO: 135424 - DNA, 789 bp, Artificial Sequence
  derived and/or modified sequence
atgctggccctggaggccgcccagctggacggcccccacttcagctgcctgtaccccgacggcgtgttctacgacctggacagctgcaagcacagcagctaccccgacagcgagggcgcccccgacagcctgtgggactggaccgtggccccccccgtgcccgccaccccctacgaggccttcgaccccgccgccgccgccttcagccacccccaggccgcccagctgtgctacgagccccccacctacagccccgccggcaacctggagctggcccccagcctggaggcccccggccccggcctgcccgcctaccccaccgagaacttcgccagccagaccctggtgccccccgcctacgccccctaccccagccccgtgctgagcgaggaggaggacctgcccctggacagccccgccctggaggtgagcgacagcgagagcgacgaggccctggtggccggccccgagggcaagggcagcgaggccggcaccagaaagaagctgagactgtaccagttcctgctgggcctgctgaccagaggcgacatgagagagtgcgtgtggtgggtggagcccggcgccggcgtgttccagttcagcagcaagcacaaggagctgctggccagaagatggggccagcagaagggcaacagaaagagaatgacctaccagaagctggccagagccctgagaaactacgccaagaccggcgagatcagaaaggtgaagagaaagctgacctaccagttcgacagcgccctgctgcccgccgtgagaagagcctag

SEQ ID NO: 135425 - DNA, 789 bp, Artificial Sequence
  derived and/or modified sequence
atgctagcgctggaagccgctcaactcgatggcccccacttctcctgcctctaccccgacggagttttttacgacctggattcttgcaagcacagtagttatccggatagcgagggtgctcctgattccctatgggattggaccgtggcacctcctgtccctgccactccctatgaggccttcgatccagccgcagccgcgttctcacacccacaggcagctcagttatgttatgaacctcccacctattcccccgcaggaaatcttgagctggcccccagtcttgaggcaccaggccccggactgcccgcttaccccactgaaaactttgcctctcagactcttgtgcccccagcatatgctccctacccatcccctgttctctccgaggaggaagatctaccactggacagcccagcactggaggtgtccgactctgaatcagacgaggccctcgtcgcaggaccagaagggaagggttccgaggcaggaacacggaagaaattacggctatatcagtttctcttgggtctcctgacgcgcggcgatatgcgggaatgtgtgtggtgggttgaacctggcgccggggtgttccagtttagctcaaagcacaaggaactgctggcccgccgctggggccagcaaaagggcaatcggaagaggatgacatatcagaagctcgcacgagctctgcgtaattatgccaaaaccggcgagatccgtaaagttaagagaaaacttacctatcagttcgacagcgcactgctgcccgctgtgagacgcgcctag

SEQ ID NO: 135426 - DNA, 789 bp, Artificial Sequence
  derived and/or modified sequence
atgctggccctggaggccgcccagctggatggcccccacttcagctgcctgtacccagatggagtcttctatgacctggacagctgcaagcacagcagctacccagattctgagggcgccccagacagcctgtgggactggacagtggcccctcctgtgcctgccaccccctatgaggcctttgatcctgctgctgctgccttcagccacccccaggccgcccagctgtgctatgagccccccacctacagccctgctggcaacctggagctggcccccagcctggaggcccctggccctggcctgcctgcctaccccacagagaactttgccagccagaccctggtgcccccagcctatgccccctaccccagccctgtgctgtctgaggaggaggacctgcccctggacagccctgccctggaggtgtctgacagcgagagtgatgaggccctggtggccggccctgagggcaaaggaagtgaagctggcaccaggaagaagctgcggctgtaccagttcctgctgggcctgctgaccaggggggacatgagagaatgtgtgtggtgggtggagcctggagctggggtcttccagttcagcagcaagcacaaggagctgctggcccggcgctggggccagcagaagggcaacaggaagaggatgacctaccagaagctggcccgggccctgaggaactatgccaagacaggagagatcaggaaggtgaagaggaagctgacctaccagtttgattctgccctgctgcctgctgtgcggcgggcctag

SEQ ID NO: 135427 - DNA, 789 bp, Artificial Sequence
  derived and/or modified sequence
atgctggccctggaggccgcccagctggacggcccccacttcagctgtctctatcctgacggggtgttttatgatctagacagttgtaaacactcaagttaccccgatagcgaaggggcccccgactctctgtgggactggaccgtagcccctcccgtccctgctaccccttacgaggcttttgatccggccgcagcggccttctcacatccccaggctgcacagctgtgctatgagcccccaacctacagcccggccggaaatctcgagctcgcaccttccttagaagcacctggccctgggctgccagcttatccgaccgagaatttcgcaagtcagacacttgtcccgcctgcatacgcaccctacccaagtcctgtgctgagtgaggaagaagacctccctttggatagccctgccctcgaagtgtcagattcagagtcagacgaggccctggtggcaggaccggaaggcaagggaagtgaagcggggaccaggaagaagctcagactgtatcagttcttgcttggactgctcacccgcggggacatgagagagtgtgtgtggtgggttgagcctggggcgggagtatttcagttttcttccaagcataaggaactgctagctcggcgctggggccagcaaaaaggaaataggaaaaggatgacttaccagaaactcgcccgggcccttcgcaattacgctaagacgggcgaaatccgaaaggtcaaaaggaagctaacgtatcagttcgactccgccctgctccctgccgtccggcgagcctag

SEQ ID NO: 135428 - DNA, 789 bp, Artificial Sequence
  derived and/or modified sequence
atgctggccctggaggcagcacagttggacggtcctcattttagttgtctttaccctgacggcgtcttttatgatctcgatagttgtaagcacagctcctaccctgattccgaaggcgcacctgattctttgtgggactggaccgtggctccacctgtccctgcgactccatacgaagcatttgaccctgctgcagcagctttctcgcaccctcaagccgcacagttgtgctatgagccccctacctatagtcccgctggtaaccttgaactggcccctagcctagaggccccaggacccggattgccagcatacccaaccgagaacttcgcgagccagactcttgttccaccagcttacgccccataccccagccctgtgctgtctgaggaagaggacctgccgctcgactcccccgctttagaggtaagcgactctgagtctgacgaggccctcgtcgctggccctgagggcaaaggttcggaggcgggaactagaaaaaaattacggctgtaccaattcctcctgggcctcctgactcggggagacatgcgcgagtgcgtatggtgggtcgaaccgggtgccggagtgttccagttctcttccaagcacaaagagctcctggcgcgtagatggggtcagcagaaggggaatcgcaaaaggatgacctatcaaaagttagctcgcgctctacggaactatgcaaagactggtgaaattcgcaaggtaaagcggaaactcacttatcaatttgactccgccctcctccctgctgttcggcgagcctag

SEQ ID NO: 135429 - DNA, 3791 bp, Artificial Sequence
  derived and/or modified sequence
ggcaaacagcccgcccggcaccaccatgctcgccctggaggctgcacagctcgacgggccacacttcagctgtctgtacccagatggcgtcttctatgacctggacagctgcaagcattccagctaccctgattcagagggggctcctgactccctgtgggactggactgtggccccacctgtcccagccaccccctatgaagccttcgacccggcagcagccgcttttagccacccccaggctgcccagctctgctacgaaccccccacctacagccctgcagggaacctcgaactggcccccagcctggaggccccggggcctggcctccctgcataccccacggagaacttcgctagccagaccctggttcccccggcatatgccccgtaccccagccctgtgctatcagaggaggaagacttaccgttggacagccctgccctggaggtctcggacagcgagtcggatgaggccctcgtggctggccccgaggggaagggatccgaggcagggactcgcaagaagctgcgcctgtaccagttcctgctggggctactgacgcgcggggacatgcgtgagtgcgtgtggtgggtggagccaggcgccggcgtcttccagttctcctccaagcacaaggaactcctggcgcgccgctggggccagcagaaggggaaccgcaagcgcatgacctaccagaagctggcgcgcgccctccgaaactacgccaagaccggcgagatccgcaaggtcaagcgcaagctcacctaccagttcgacagcgcgctgctgcctgcagtccgccgggcctgagcacacccgaggctcccacctgcggagccgctgggggacctcacgtcccagccaggatccccctggaagaaaaagggcgtccccacactctaggtgataggacttacgcatccccaccttttggggtaaggggagtgctgccctgccataatccccaagcccagcccgggcctgtctgggattccccacttgtgcctggggtcctctgggatttctttgtcatgtacagactccctgggatcctcatgttttgggtgacaggacctatggaccactatactcggggaggcagggtagcagttcttccagaatcccaagagcttctctgggattttcttgtgatatctgattccccagtgaggcctgggacgtttttaagatcgctgtgtgtctgtaaaccctgaatctcatctggggtgggggccctgctggcaaccctgagccctgtccaaggttccctcttgtcagatctgagatttcctagttatgtctggggccctctgggagctgttatcatctcagatctcttcgcccatctatggctgtgttgtcacatctgtcccctcatttttgagatcccccaattctctggaactattctgctgcccctttttatgtgtctggagttccccaatcacatctagggctcctccaagatccttttgtcatgtctgaaatcactcttgagaggtctggggtggaggatggggagtcagtgaaatgtgtcatgtctgggccctgtcagggacacccttgttatatctgggatcctccaatcacatctgagacctcctaggctctccatctgatatgccctttcagggaccccacaaagactgagttctcatggggatcctacccttcctagtgccactccctatggccatgctgaagaccactctggccacgcgactgattttgggtgatcatggcagctccccacccatgtcatttctaaccagaagtctcaaggtcgtcacccccctgccccccaaccgaggccccggtcgctggtggtggtctctttagtgcactgtagcacttggtggtggaggtgtgagggatccacattaacagcaggccatcagctgggcaatggctcacacctgtaatcccagcactttgggaggcgaggcagggggaatggcttgaacccaggcattcaagaccagcctgggcaacataatgagacctcgtctctacaaaacataacaaaaacaattagccgagcgtgggggtgaacacctgtggtcccagctgctcaggaggctgaggtgggaggatctcttgagcccaggaagtaggaggctgtagtgagctgtaatcgtgccactgcactccagcctgggcgacagagtgagacaccgtcttaaaaacaaaaacaaggccgggcacggtggctcatgcctgttgtcccagcactttgggaggccgaggcaggcggatcacgaggtcgagagatcgagaccatcctggccaacatggtgaaaccctgtctctactaaaaatacagaaattagctgggcgtggtggcacgtgcctgtagtcccagctactcgggaggctgaggcaagagaatcgcttgaacgtgggaggcagaggttgcagtgagcctagattgtgccactgcactccagcctgggggacagagcgagactccgtctgaaaataaaaacaacaaaaacagcagaccattcaaaatagggagactttgcataatccagatttctgccttcacttaaaactttggacggtctggagagagtcggccagttttcggtggggggtggggagctggaacaggacagtagcctttcctaatgaggcatttgttctccaatctgccccagtcgctgccatccctggctatctcaccctagcagcttctcaagcctgttggctttagaccactgtataaacccagctggaactgaagcctgggtggactatggagccctggttgggacccccagggagtcaaaggctgcgggccaagaggccagaggtccttgagcctgggtgggcaggtggatctagggtgcatgacttgctgcttcccaaccttagtttgtcccttctgtgaaaaagggagagaaggaggaggaagatctcaaaaagactttccagcccagtgcggtggctcacgcctgtaatcccagcactttgggaggccgatgcaggtggatcacctgaggtaggagttcaagaccagcctgaccaacatagtgaagccccttctctactaaaaatacaaaattagctgggcgtggtggcatgtgcctgtactcccagctacttgggaggctgaggcaggagaatcgcttgaacctgggaggcggaggttgtagtgagctgagatcacaccactgcacaccagcctgggcgacaagagcgaaactccgtctcaaaaaaaaaaaactgttgcagccccgttgagcctttgacaccgcctgaaatccaccccactcccaggaggaggaggaggaaggaatgccaatgacctagagacacgagaagtccatgtggaggcacacagcagctgatggcagagcccaggctgggacctgcccttaagagaatgagtgggaagggggagggaggaagggcaggtaaaacgtcctccccagggccccctgcaacggggaaggtactttttacaaaagctatcattgtcaccctaaatgtggaataaaataagatgcatcgacgtagacaaacctcctgggaccttttgtcagggactgcaatcctgcccctccactgaggccgctggctctcagagacaccgtgacatcacgggtgatgatgagaggagttcaaagagagaattatatgctggcgcggtggctctgtaatcccaacactttggggggccaaggcaggaggatcgcttgagtacaggagtttgaaaccagcctgggcaagatagtgagatccccttcccacccgtctacaaaaaaaataaaaaattagcggg

SEQ ID NO: 135430 - DNA, 789 bp, Artificial Sequence
  derived and/or modified sequence
atgctggcactcgaggccgctcagcttgacggtcctcacttttcgtgcctctatcccgacggggtcttctacgacctggatagttgtaaacactcctcttaccctgactctgagggggctccggacagcctttgggattggactgtggcccctccagtgcccgcaacaccttacgaggcatttgatcctgctgctgcagccttctcccaccctcaggccgcccagctttgctatgagccgcctacttactccccagccggaaacttagagctcgccccttctctggaggccccaggcccagggttaccggcctatcccaccgagaattttgcatctcaaaccctggtgcctccagcttacgctccctacccttcacctgtactctccgaggaggaagacttgccactcgatagtcccgctctggaggttagcgattctgagagcgacgaggctctggtcgctggccctgagggtaagggctccgaagcaggtaccaggaaaaaactgcggctgtaccagttcctgctcggattgctgacgaggggagacatgcgagaatgtgtctggtgggtcgagccaggagccggggtgttccagtttagctcaaagcacaaagaacttctggcaaggcgctggggtcagcaaaaggggaaccgcaaacgaatgacttaccagaagcttgcacgagccctccgcaactatgcaaagaccggggagattaggaaagtaaaacgaaagctcacttaccagttcgattctgctctgttacccgccgtgcgcagagcctag

SEQ ID NO: 135431 - DNA, 789 bp, Artificial Sequence
  derived and/or modified sequence
atgctggccctggaggccgcccagctggacggcccccacttcagctgcctctatccggacggggtgttctatgatctggattcctgcaagcattccagttaccctgacagtgagggcgctcccgattcactgtgggattggacagtcgctcctcccgttccagcaacaccttatgaggctttcgacccggccgctgcagcattcagccaccctcaggcagctcagttatgttatgagcctccaacctattcacctgctggaaatctggagctggctccttctctagaggccccgggtccagggctgcccgcctaccccacagagaacttcgcgagccagacactggtgccccccgcctacgcaccatatccttcacctgtgctgtctgaagaagaagacttgccactagactctcctgctctggaagtgtccgactcagaatccgacgaggccctcgtggccggaccagaagggaaaggctccgaagccggaacacggaaaaagctgcggctttatcagtttctgctcggcttgttgacgaggggagatatgcgagagtgcgtgtggtgggttgagcccggcgcaggggtcttccagttctcctcaaaacataaggaacttttggctcgccggtggggccaacagaaaggaaatcggaagagaatgacataccaaaagctggcacgcgccctgcgcaactacgccaaaacaggagagattcggaaagtgaagcgaaagttgacatatcagttcgattccgctttactgccagctgtacgccgtgcatag

SEQ ID NO: 135432 - DNA, 789 bp, Artificial Sequence
  derived and/or modified sequence
atgctcgcgctggaggcggctcagctggatggaccccatttctcttgcctataccctgacggagtcttctatgatctggatagttgtaagcattcaagttaccccgattcagagggggctcctgattctttgtgggactggaccgtggctcctccggtcccagctaccccctatgaagccttcgatcctgccgcagccgctttttcccatcctcaagctgctcagctctgctacgagccacccacatactcgcctgctggaaatctggaactcgcaccatctctcgaggcacctggccctggtctcccagcatacccgacagagaattttgctagccagaccctggtgccaccagcttacgccccatacccttcccccgtgctttccgaagaggaagacctcccactggatagtcccgctctggaagtctctgacagcgaatccgatgaggccttggtcgccggacccgaagggaaaggatctgaggctggcacacgcaagaaactccggttataccaatttctgctgggcctgctcactcgcggagatatgcgcgaatgcgtttggtgggtggaacccggtgcgggagttttccagttcagcagtaagcacaaggagctgctcgcaaggagatggggtcagcaaaaggggaacaggaaacggatgacttatcagaagctggccagggctcttcggaattacgctaagacaggggaaatacgcaaagttaagagaaaactcacgtatcagttcgattctgccttacttcctgctgtgcgcagggcttag

SEQ ID NO: 135433 - DNA, 1467 bp, Artificial Sequence
  derived and/or modified sequence
ggcaaacagcccgcccggcaccaccatgctcgccctggaggctgcacagctcgacgggccacacttcagctgtctgtacccagatggcgtcttctatgacctggacagctgcaagcattccagctaccctgattcagagggggctcctgactccctgtgggactggactgtggccccacctgtcccagccaccccctatgaagccttcgacccggcagcagccgcttttagccacccccaggctgcccagctctgctacgaaccccccacctacagccctgcagggaacctcgaactggcccccagcctggaggccccggggcctggcctccctgcataccccacggagaacttcgctagccagaccctggttcccccggcatatgccccgtaccccagccctgtgctatcagaggaggaagacttaccgttggacagccctgccctggaggtctcggacagcgagtcggatgaggccctcgtggctggccccgaggggaagggatccgaggcagggactcgcaagaagctgcgcctgtaccagttcctgctggggctactgacgcgcggggacatgcgtgagtgcgtgtggtgggtggagccaggcgccggcgtcttccagttctcctccaagcacaaggaactcctggcgcgccgctggggccagcagaaggggaaccgcaagcgcatgacctaccagaagctggcgcgcgccctccgaaactacgccaagaccggcgagatccgcaaggtcaagcgcaagctcacctaccagttcgacagcgcgctgctgcctgcagtccgccgggcctgagcacacccgaggctcccacctgcggagccgctgggggacctcacgtcccagccaggatccccctggaagaaaaagggcgtccccacactctaggtgataggacttacgcatccccaccttttggggtaaggggagtgctgccctgccataatccccaagcccagcccgggcctgtctgggattccccacttgtgcctggggtcctctgggatttctttgtcatgtacagactccctgggatcctcatgttttgggtgacaggacctatggaccactatactcggggaggcagggtagcagttcttccagaatcccaagagcttctctgggattttcttgtgatatctgattccccagtgaggcctgggacgtttttaagatcgctgtgtgtctgtaaaccctgaatctcatctggggtgggggccctgctggcaaccctgagccctgtccaaggttccctcttgtcagatctgagatttcctagttatgtctggggccctctgggagctgttatcatctcagatctcttcgcccatctatggctgtgttgtcacatctgtcccctcatttttgagatcccccaattctctggaactattctgctgcccctttttatgtgtctggagttccccaatcacatctagggctcctcc

SEQ ID NO: 135434 - protein, 79 aa, Artificial Sequence
  derived and/or modified sequence
MKVTGIFLLSALALLSLSGNTGADSLGREAKCYNELNGCTKIYDPVCGTDGNTYPNECVLCFENRKRQTSILIQKSGPC

SEQ ID NO: 135435 - DNA, 240 bp, Artificial Sequence
  derived and/or modified sequence
atgaaagtgacaggcatcttcctcctgtctgccctggccctcttgagcctgagtggaaacacgggggctgatagcctagggcgggaggcaaaatgctataacgaactgaatgggtgtacaaaaatttacgaccctgtttgcggaacagacgggaacacatacccaaatgagtgcgttctctgttttgagaatcggaagcgtcaaacttctattctgatacagaagtcgggaccttgttag

SEQ ID NO: 135436 - DNA, 240 bp, Artificial Sequence
  derived and/or modified sequence
atgaaggtgacaggcatcttcctgctgagcgccctggccctgctgagcctgagcggcaacacaggagctgacagcctgggccgggaggccaagtgctacaatgagctgaatggctgcaccaagatctatgaccctgtgtgtggcacagatggcaacacctacccaaatgaatgtgtgctgtgctttgaaaataggaagaggcagaccagcatcctgatccagaagagcggcccctgctag

SEQ ID NO: 135437 - DNA, 240 bp, Artificial Sequence
  derived and/or modified sequence
atgaaggtgaccggcatcttcctgctgagcgccctggccctgctgtctctcagtggtaataccggggctgattctctgggcagagaggccaaatgttacaacgagctcaacgggtgcacgaaaatctatgatcccgtttgcgggaccgatgggaatacttaccctaacgagtgcgtgttatgtttcgagaaccgaaagcggcaaacaagtattctgatccaaaaatccggcccgtgttag

SEQ ID NO: 135438 - DNA, 240 bp, Artificial Sequence
  derived and/or modified sequence
atgaaggtgactggaatttttctgttatccgctctcgccctcctgtccttatctggaaacactggggctgacagtttgggacgggaagccaaatgctacaacgagctgaacggatgtaccaaaatttacgatcccgtgtgtggtacagatggcaatacctaccccaacgaatgtgtactgtgctttgagaatagaaaacgtcagacgtccatattgattcagaagtctggaccttgctag

SEQ ID NO: 135439 - DNA, 542 bp, Artificial Sequence
  derived and/or modified sequence
ttcacctttcttacacaggtgacattcccagaacctggaggccaggctatgacacagagtcaatcaataaccagggagatctgtgatatagcccagtaggtggggccttgctgccatctgccatatgacccttccagtcccaggcttctgaagagacgtggtaagtgcggtgcagttttcaactgacctctggacgcagaacttcagccatgaaggtaacaggcatctttcttctcagtgccttggccctgttgagtctatctggtaacactggagctgactccctgggaagagaggccaaatgttacaatgaacttaatggatgcaccaagatatatgaccctgtctgtgggactgatggaaatacttatcccaatgaatgcgtgttatgttttgaaaatcggaaacgccagacttctatcctcattcaaaaatctgggccttgctgagaaccaaggttttgaaatcccatcaggtcaccgcgaggcctgactggccttattgttgaataaatgtatctgaatatcccctgttgtttccat

SEQ ID NO: 135440 - DNA, 240 bp, Artificial Sequence
  derived and/or modified sequence
atgaaggtgaccggcatcttcctgctgagcgccctggccctgctgagcctgagcggcaacaccggcgccgacagcctgggcagagaggccaagtgctacaacgagctgaacggctgcaccaagatctacgaccccgtgtgcggcaccgacggcaacacctaccccaacgagtgcgtgctgtgcttcgagaacagaaagagacagaccagcatcctgatccagaagagcggcccctgctag

SEQ ID NO: 135441 - protein, 261 aa, Artificial Sequence
  derived and/or modified sequence
MEGGLGRAVCLLTGASRGFGRTLAPLLASLLSPGSVLVLSARNDEALRQLEAELGAERSGLRVVRVPADLGAEAGLQQLLGALRELPRPKGLQRLLLINNAGSLGDVSKGFVDLSDSTQVNNYWALNLTSMLCLTSSVLKAFPDSPGLNRTVVNISSLCALQPFKGWALYCAGKAARDMLFQVLALEEPNVRVLNYAPGPLDTDMQQLARETSVDPDMRKGLQELKAKGKLVDCKVSAQKLLSLLEKDEFKSGAHVDFYDK

SEQ ID NO: 135442 - DNA, 786 bp, Artificial Sequence
  derived and/or modified sequence
atggagggcggcctgggcagagccgtgtgcctgctgaccggcgccagcagaggcttcggcagaaccctggcccccctgctggccagcctgctgagccccggcagcgtgctggtgctgagcgccagaaacgacgaggccctgagacagctggaggccgagctgggcgccgagagaagcggcctgagagtggtgagagtgcccgccgacctgggcgccgaggccggcctgcagcagctgctgggcgccctgagagagctgcccagacccaagggcctgcagagactgctgctgatcaacaacgccggcagcctgggcgacgtgagcaagggcttcgtggacctgagcgacagcacccaggtgaacaactactgggccctgaacctgaccagcatgctgtgcctgaccagcagcgtgctgaaggccttccccgacagccccggcctgaacagaaccgtggtgaacatcagcagcctgtgcgccctgcagcccttcaagggctgggccctgtactgcgccggcaaggccgccagagacatgctgttccaggtgctggccctggaggagcccaacgtgagagtgctgaactacgcccccggccccctggacaccgacatgcagcagctggccagagagaccagcgtggaccccgacatgagaaagggcctgcaggagctgaaggccaagggcaagctggtggactgcaaggtgagcgcccagaagctgctgagcctgctggagaaggacgagttcaagagcggcgcccacgtggacttctacgacaagtag

SEQ ID NO: 135443 - DNA, 786 bp, Artificial Sequence
  derived and/or modified sequence
atggaaggcggtctgggtagagctgtctgcctgctgactggagcatcaagaggatttggaaggacactggctcctcttctcgcctccctgttgtcgcccgggtctgtgctggtgctgtctgcccggaacgatgaggcccttcgccagctcgaagctgagctgggcgctgaaaggtccggactgagagttgtgcgagtgcccgctgacctgggagccgaggccggtttgcagcaactcctgggggctctgagagaactcccgcgtcccaagggccttcaacgcctgctactcatcaataacgctggatcactcggagacgttagtaaagggttcgtcgacctgtcagactctacccaagtgaataactactgggccctcaatttgacctccatgctctgtttgacaagtagcgtgctgaaagcgtttcccgacagtcccggccttaaccggactgtggtaaacatctcttccttgtgtgctcttcagccctttaagggttgggccttatattgcgccgggaaggccgcgcgggacatgttgtttcaggtgcttgctttggaagagcctaatgtgcgggttttaaactatgcgcccggacccctggatacggacatgcagcagctggcaagggaaacatccgtggaccctgatatgcgcaaggggctccaagaactgaaggctaaagggaagttggttgattgtaaggtgtcagctcagaagctgctgtccctgctggagaaagatgagtttaagtccggcgcccacgtcgatttttatgacaaatag

SEQ ID NO: 135444 - DNA, 786 bp, Artificial Sequence
  derived and/or modified sequence
atggagggcggcctgggccgggctgtgtgcctgctgactggagccagccggggctttggaagaaccctggcccccctgctggccagcctgctgagccctggctctgtgctggtgctgagcgccagaaatgatgaggccctgcggcagctggaggccgagctgggcgctgagaggagcggcctgcgggtggtgcgggtgcctgctgacctgggcgctgaggccggcctgcagcagctgctgggcgccctgcgggagctgccccggcccaagggcctgcagaggctgctgctgatcaacaatgccggcagcctgggagatgtgtccaaaggatttgtggacctgagtgacagcacccaggtgaacaactactgggccctgaacctgacctccatgctgtgcctgaccagctctgtgctgaaggccttcccagacagccctggcctgaacagaacagtggtgaacatcagcagcctgtgtgccctgcagcccttcaagggctgggccctgtactgtgccggcaaggccgcccgggacatgctgttccaggtgctggccctggaggagcccaacgtgcgggtgctgaactatgcccctggccccctggacacagacatgcagcagctggcccgggagacctctgtggaccctgacatgaggaagggcctgcaggagctgaaggccaagggcaagctggtggactgcaaggtgtctgcccagaagctgctgagcctgctggagaaggatgagttcaagagcggggcccacgtggacttctatgacaagtag

SEQ ID NO: 135445 - DNA, 786 bp, Artificial Sequence
  derived and/or modified sequence
atggagggcggcctgggccgggccgtgtgcctgctgaccggcgcctcacgcggatttggcaggacactggctcccctgttggcttccttactttcccctggaagcgtacttgtcctttcggccaggaacgatgaagccctccgacagctggaagccgaattgggggctgagagatcaggactgagagtagtgagagtgccggcagatctcggagcagaggccggcctgcagcagttattaggtgcattacgcgagcttccccgccccaagggactacagcgcttgctattgattaacaatgccggcagcctcggagatgtgagcaagggattcgtagacctctccgatagtactcaagtcaataactattgggccctaaatctgaccagcatgttgtgtcttaccagctcagtccttaaggcttttcctgacagccctggcctgaacaggaccgtcgtgaacattagctctctctgcgcattgcagccctttaaaggttgggcactgtactgcgccgggaaagcggcacgggatatgctctttcaggttctcgcactggaagaacccaatgttagggtcctgaattatgcccccggccctctcgacactgatatgcagcaactggcacgggagacctctgtggaccctgatatgcgcaaggggctgcaggagttaaaagcaaaaggcaagcttgtcgactgcaaagtatctgcccaaaagctcctcagtctactggagaaagatgagttcaagtctggcgcccatgtggacttttacgacaagtag

SEQ ID NO: 135446 - DNA, 786 bp, Artificial Sequence
  derived and/or modified sequence
atggagggaggactaggacgcgcagtgtgcctcctgacaggtgcctccagagggttcggcaggactctggcgccactgctcgcctctctgctgagtccagggtccgtcctggtcctgtccgcacggaatgacgaagccctacgtcagttagaggctgaattgggtgccgagcgcagcggtcttcgggttgtcagggtacctgccgacctgggagctgaagctgggctgcagcagctgctaggtgccctgagagaactgcctcgcccaaaaggactccagcgacttctcttgatcaataacgcaggaagtctcggtgatgtaagcaagggatttgtcgacttgagcgactcaacccaggtgaacaactattgggcgctgaatttgactagcatgctgtgccttacatccagcgtgctaaaagcattccctgattctcctgggcttaatcgcaccgtggtgaatatatctagtctctgtgcgctgcagccctttaaagggtgggctctgtactgcgccggaaaagctgccagggatatgctctttcaggtgttagccctggaggagcctaacgttcgcgtgttaaactacgctcccggtccgctggacaccgatatgcagcaactggcaagagagaccagcgtggaccctgatatgaggaagggtctccaggagctgaaagctaaaggcaagctggtggattgcaaggtgagcgctcagaagctcctctcacttctggaaaaagacgaatttaaaagcggggcacatgtcgacttctacgacaaatag

SEQ ID NO: 135447 - DNA, 1480 bp, Artificial Sequence
  derived and/or modified sequence
ggtcccgccccccgcggccgcaccgcctcctgcctggtctcgggtgccagcgccgccggcggagaacaggagcatggagggcgggctggggcgtgctgtgtgcttgctgaccggggcctcccgcggcttcggccggacgctggccccgctcctggcctcgctgctgtcgcccggctccgtgcttgtccttagcgcccgcaacgacgaggcactgcgccagctggaggccgagctgggcgccgagcggtctggcctgcgcgtggtgcgggtgcccgccgacctgggcgccgaggccggcttgcagcagctgctcggcgccctgcgcgagctcccccggcccaaggggctgcagcgactgctgcttatcaacaacgcgggctctcttggggatgtgtccaaaggcttcgtggacctgagtgactccactcaagtgaacaactactgggcactgaacttgacctccatgctctgcctgacttccagcgtcctgaaggccttcccggacagtcctggcctcaacagaaccgtggttaacatctcgtccctctgtgccctgcaacctttcaaaggctgggcgctgtactgtgcaggaaaggctgctcgtgatatgctgttccaggtcctggcgctggaggaacctaatgtgagggtgctgaactatgccccaggtcctctggacacagacatgcagcagttggcccgggagacctccgtggacccagacatgcgaaaagggctgcaggagctgaaggcaaaggggaagctggtggattgcaaggtgtcagcccagaaactgctgagcttactggaaaaggacgagttcaagtctggagcccacgtggacttctatgacaaataagcccatgtttttggcttcctgaacctttttgcccccacttttagacataccccagagccctgtggctccccacaccctgccataggggcagtcctgccttacacatagaagcattcatgcctgctgccctgccctcaggcacagccagctgtgagctcccaggtcattggccttaccagttgtcaggagtctgtgctgtgcaccctgggttataaggaggcttaggagagaggttatgggtattggtgtctctatccccaggaatagaacttaaggggtgggaagaacaggaaaagaagctggaacacagaagagaggaggttgtgtctcttgctcatagcaagcctgtgggtagaggaaagagtgatctggtgtcgaataggaggacccatgtagattcgcagatggcctggatgggaggaagggcagacggtacatgtcccagcccacatagatgccccttgctgagggtagcaggaccttctgttgaactttgtgtcctcactctgatgtctccttccttcagaatctaccacccctcccccaggctgggagaaggggctcctgggtgtctgtatacacgccaaaggcagatacaaataaaatacagattgtcctttc

SEQ ID NO: 135448 - protein, 89 aa, Artificial Sequence
  derived and/or modified sequence
MSSQQQKQPCTPPPQLQQQQVKQPCQPPPQEPCIPKTKEPCHPKVPEPCHPKVPEPCQPKVPEPCHPKVPEPCPSIVTPAPAQQKTKQK

SEQ ID NO: 135449 - protein, 73 aa, Artificial Sequence
  derived and/or modified sequence
MSSQQQKQPCTPPPQLQQQQVKQPCQPPPQEPCIPKTKEPCHPKVPEPCHPKVPEPCPSIVTPAPAQQKTKQK

SEQ ID NO: 135450 - DNA, 270 bp, Artificial Sequence
  derived and/or modified sequence
atgagttcacagcagcaaaagcagccttgtacacccccaccgcagctacagcagcaacaagtcaagcagccatgccagcctccccctcaagaaccatgtatcccgaagacgaaggagccctgccacccaaaggtaccagagccttgtcaccccaaagtgcctgagccatgtcaacctaaggttcctgagccctgccatccaaaggtccccgagccctgcccgtccatagtaacacccgcccctgctcagcagaaaacaaagcagaagtag

SEQ ID NO: 135451 - DNA, 222 bp, Artificial Sequence
  derived and/or modified sequence
atgtcttcccagcagcagaaacagccgtgcaccccacctcctcagttacagcagcagcaggtaaaacagccttgtcagccgcctccccaagagccgtgtataccgaaaaccaaagaaccctgccaccctaaggttccagaaccgtgtcaccctaaagtgcccgaaccctgtccttctatagtaacacctgcacccgctcagcaaaagacaaagcagaagtag

SEQ ID NO: 135452 - DNA, 270 bp, Artificial Sequence
  derived and/or modified sequence
atgagcagccagcagcagaagcagccctgcaccccaccaccccagctgcagcagcagcaggtgaagcagccctgccagcccccaccccaggagccctgcatccccaagaccaaggagccctgccaccccaaggtgcctgagccctgccaccccaaggtgcctgagccctgccagcccaaggtgcctgagccctgccaccccaaggtgcctgagccctgccccagcatcgtgaccccagccccagcccagcagaagaccaagcagaagtag

SEQ ID NO: 135453 - DNA, 222 bp, Artificial Sequence
  derived and/or modified sequence
atgagcagccagcagcagaagcagccctgcaccccaccaccccagctgcagcagcagcaggtgaagcagccctgccagcccccaccccaggagccctgcatccccaagaccaaggagccctgccaccccaaggtgcctgagccctgccaccccaaggtgcctgagccctgccccagcatcgtgaccccagccccagcccagcagaagaccaagcagaagtag

SEQ ID NO: 135454 - DNA, 270 bp, Artificial Sequence
  derived and/or modified sequence
atgagcagccagcagcagaagcagccctgcaccccccccccccagctgcaacagcagcaggtgaaacagccctgtcaacctcctccacaagagccgtgcatccccaagaccaaggagccctgccaccccaaagtgcctgaaccgtgtcacccgaaggtgcctgagccatgtcagcctaaagttccagaaccttgccatccgaaggtccctgagccttgtccatcaatagtgacacctgcccccgcacagcagaaaacgaagcagaaatag

SEQ ID NO: 135455 - DNA, 222 bp, Artificial Sequence
  derived and/or modified sequence
atgagcagccagcagcagaagcagccctgcaccccccccccccagttacagcaacagcaggtaaaacagccctgtcagccaccaccccaggaaccctgtatcccgaaaactaaggagccatgtcatccgaaggtgccagagccctgtcatcccaaagtgcccgaaccatgtccaagtattgtaacgccagcccctgcacagcagaagaccaagcagaagtag

SEQ ID NO: 135456 - DNA, 270 bp, Artificial Sequence
  derived and/or modified sequence
atgtcctcccaacagcagaaacagccttgcacacccccaccccagctgcagcagcagcaagtaaaacagccttgccagccgccaccccaggagccttgcatccccaagacgaaggaaccctgccacccgaaagtgcctgagccgtgtcaccctaaagttccagagccctgtcagcccaaggtccccgagccatgtcatcccaaggtgccagagccatgcccatcaatagtgacccctgccccagcccagcaaaagacaaaacaaaaatag

SEQ ID NO: 135457 - DNA, 222 bp, Artificial Sequence
  derived and/or modified sequence
atgtcctctcagcagcagaaacagccttgtaccccaccgcctcagttgcagcagcaacaggtcaaacagccttgccagcctccgccacaggaaccatgcattccaaagacaaaagagccatgtcaccctaaagtccctgaaccatgccaccctaaagtgcctgaaccatgcccatctattgtgactcccgctccagcccaacaaaagaccaagcagaagtag

SEQ ID NO: 135458 - DNA, 620 bp, Artificial Sequence
  derived and/or modified sequence
caccagttctaagggaccatacagagtattcctctcttcacaccaggaccagtcactgttgcagcatgagttcccagcagcagaagcagccttgcaccccaccccctcagcttcagcagcagcaggtgaaacagccttgccagcctccacctcaggaaccatgcatccccaaaaccaaggagccctgccaccccaaggtgcctgagccctgccaccccaaagtgcccgagccctgccagcccaaggttccagagccatgccaccccaaggtgcctgagccctgcccttcaatagtcactccagcaccagcccagcagaagaccaagcagaagtaatgtggtccacagccatgcccttgaggagccggccaccagatgctgaatcccctatcccattctgcgtatgagtcccatttgccttgcaattagcattctgtctcccccaaaaaagaatgtgctatgaagctttctttcctacacactctgagtctctgaatgaagctgaaggtcttagtaccagagctagttttcagctgctcagaattcatctgaagagagacttaagatgaaagcaaatgattcagctcccttatacccccattaaattcactttcaattcca

SEQ ID NO: 135459 - DNA, 222 bp, Artificial Sequence
  derived and/or modified sequence
atgagttcccagcagcagaagcagccttgcaccccaccccctcagcttcagcagcagcaggtgaaacagccttgccagcctccacctcaggaaccatgcatccccaaaaccaaggagccctgccaccccaaggtgcctgagccctgccaccccaaagtgcctgagccctgcccttcaatagtcactccagcaccagcccagcagaagaccaagcagaagtaa

SEQ ID NO: 135460 - DNA, 270 bp, Artificial Sequence
  derived and/or modified sequence
atgagcagccagcagcagaagcagccctgcaccccccccccccagctgcagcagcagcaggtgaagcagccctgccagccccccccccaggagccctgcatccccaagaccaaggagccctgccaccccaaggtgcccgagccctgccaccccaaggtgcccgagccctgccagcccaaggtgcccgagccctgccaccccaaggtgcccgagccctgccccagcatcgtgacccccgcccccgcccagcagaagaccaagcagaagtag

SEQ ID NO: 135461 - DNA, 222 bp, Artificial Sequence
  derived and/or modified sequence
atgagcagccagcagcagaagcagccctgcaccccccccccccagctgcagcagcagcaggtgaagcagccctgccagccccccccccaggagccctgcatccccaagaccaaggagccctgccaccccaaggtgcccgagccctgccaccccaaggtgcccgagccctgccccagcatcgtgacccccgcccccgcccagcagaagaccaagcagaagtag

SEQ ID NO: 135462 - protein, 574 aa, Artificial Sequence
  derived and/or modified sequence
MWTFLGIATFTYFYKKFGDFITLANREVLLCVLVFLSLGLVLSYRCRHRNGGLLGRQQSGSQFALFSDILSGLPFIGFFWAKSPPESENKEQLEARRRRKGTNISETSLIGTAACTSTSSQNDPEVIIVGAGVLGSALAAVLSRDGRKVTVIERDLKEPDRIVGEFLQPGGYHVLKDLGLGDTVEGLDAQVVNGYMIHDQESKSEVQIPYPLSENNQVQSGRAFHHGRFIMSLRKAAMAEPNAKFIEGVVLQLLEEDDVVMGVQYKDKETGDIKELHAPLTVVADGLFSKFRKSLVSNKVSVSSHFVGFLMKNAPQFKANHAELILANPSPVLIYQISSSETRVLVDIRGEMPRNLREYMVEKIYPQIPDHLKEPFLEATDNSHLRSMPASFLPPSSVKKRGVLLLGDAYNMRHPLTGGGMTVAFKDIKLWRKLLKGIPDLYDDAAIFEAKKSFYWARKTSHSFVVNILAQALYELFSATDDSLHQLRKACFLYFKLGGECVAGPVGLLSVLSPNPLVLIGHFFAVAIYAVYFCFKSEPWITKPRALLSSGAVLYKACSVIFPLIYSEMKYMVH

SEQ ID NO: 135463 - DNA, 1725 bp, Artificial Sequence
  derived and/or modified sequence
atgtggaccttcctgggcatcgccaccttcacctacttctacaagaagttcggcgacttcatcaccctggccaacagagaggtgctgctgtgcgtgctggtgttcctgagcctgggcctggtgctgagctacagatgcagacacagaaacggcggcctgctgggcagacagcagagcggcagccagttcgccctgttcagcgacatcctgagcggcctgcccttcatcggcttcttctgggccaagagcccccccgagagcgagaacaaggagcagctggaggccagaagaagaagaaagggcaccaacatcagcgagaccagcctgatcggcaccgccgcctgcaccagcaccagcagccagaacgaccccgaggtgatcatcgtgggcgccggcgtgctgggcagcgccctggccgccgtgctgagcagagacggcagaaaggtgaccgtgatcgagagagacctgaaggagcccgacagaatcgtgggcgagttcctgcagcccggcggctaccacgtgctgaaggacctgggcctgggcgacaccgtggagggcctggacgcccaggtggtgaacggctacatgatccacgaccaggagagcaagagcgaggtgcagatcccctaccccctgagcgagaacaaccaggtgcagagcggcagagccttccaccacggcagattcatcatgagcctgagaaaggccgccatggccgagcccaacgccaagttcatcgagggcgtggtgctgcagctgctggaggaggacgacgtggtgatgggcgtgcagtacaaggacaaggagaccggcgacatcaaggagctgcacgcccccctgaccgtggtggccgacggcctgttcagcaagttcagaaagagcctggtgagcaacaaggtgagcgtgagcagccacttcgtgggcttcctgatgaagaacgccccccagttcaaggccaaccacgccgagctgatcctggccaaccccagccccgtgctgatctaccagatcagcagcagcgagaccagagtgctggtggacatcagaggcgagatgcccagaaacctgagagagtacatggtggagaagatctacccccagatccccgaccacctgaaggagcccttcctggaggccaccgacaacagccacctgagaagcatgcccgccagcttcctgccccccagcagcgtgaagaagagaggcgtgctgctgctgggcgacgcctacaacatgagacaccccctgaccggcggcggcatgaccgtggccttcaaggacatcaagctgtggagaaagctgctgaagggcatccccgacctgtacgacgacgccgccatcttcgaggccaagaagagcttctactgggccagaaagaccagccacagcttcgtggtgaacatcctggcccaggccctgtacgagctgttcagcgccaccgacgacagcctgcaccagctgagaaaggcctgcttcctgtacttcaagctgggcggcgagtgcgtggccggccccgtgggcctgctgagcgtgctgagccccaaccccctggtgctgatcggccacttcttcgccgtggccatctacgccgtgtacttctgcttcaagagcgagccctggatcaccaagcccagagccctgctgagcagcggcgccgtgctgtacaaggcctgcagcgtgatcttccccctgatctacagcgagatgaagtacatggtgcactag

SEQ ID NO: 135464 - DNA, 1725 bp, Artificial Sequence
  derived and/or modified sequence
atgtggacattcctcggtatcgctacgttcacatatttctacaagaagttcggggacttcattaccttagccaaccgagaggtcctgctgtgcgtcctggtattcctttcgctcggcctcgtcttgagctataggtgtcgccacaggaatgggggactgttggggcgccagcagtctggcagtcagttcgccctgttttcggatatactctctggcctgccattcatcggttttttctgggccaagagtccccccgaatccgagaataaagaacagctggaagctaggaggaggaggaaggggactaacatctcggagacatcactgattggtactgctgcctgtacttctaccagcagccagaatgacccagaggtaattatcgtaggtgccggcgtcctgggatccgccctggctgctgtgttatcccgcgatgggagaaaggtgaccgtgattgagcgggacctgaaagagccagaccgcattgtgggggaattcttgcagcccggagggtaccatgttctcaaagatttgggactcggcgatactgtcgagggccttgacgcacaggtcgttaacggctatatgattcacgatcaggaatcaaagagcgaggtgcaaatcccgtacccactctccgagaacaaccaggtgcagtctgggcgggccttccaccacgggcgattcatcatgagcctgcgtaaggccgcaatggcagagcccaatgctaaattcatcgagggcgtggtcctgcagctgttagaggaagacgacgtggtcatgggagttcagtacaaagacaaggaaacaggggacattaaggagctgcacgctccgcttactgtggtggctgacggtctgttttcaaagttcaggaagagtttagtcagcaacaaggtgtcggtttcttctcacttcgtaggtttcctgatgaaaaatgctccacagtttaaggctaaccacgcagagctgatcctggccaacccttctcccgtgttgatctatcaaattagtagttccgagaccagagtcctggtcgacattagaggcgaaatgccacgtaaccttagggagtatatggttgagaagatttatcctcagattcctgatcacctcaaggagccttttctagaagccaccgacaattcacatttacggagcatgccagcctcttttctgccgccctcaagtgtgaaaaaacggggtgtcctgctgctcggcgacgcctataacatgaggcacccattgacagggggagggatgaccgtcgcattcaaggatatcaagctttggcgtaagttactgaaagggatcccagacctctacgatgacgctgcaatctttgaagccaaaaaatccttttattgggctagaaagactagccattccttcgtggtgaacatactggctcaggccctgtacgaactgttctcagctactgatgattcgctccaccaacttcgtaaagcttgttttctttacttcaaactgggaggggagtgcgttgcaggcccagttggtctgctgtctgtgctgtcccctaaccccctggtgctcattggtcactttttcgccgttgctatctacgctgtatatttctgttttaaatccgagccgtggataactaaacctagggccttactttctagcggagcagtgctgtataaggcgtgcagtgtgatctttcctctgatctattcagagatgaaatacatggtgcattag

SEQ ID NO: 135465 - DNA, 1725 bp, Artificial Sequence
  derived and/or modified sequence
atgtggaccttcctgggcatcgccaccttcacctacttctacaagaagtttggagacttcatcaccctggccaaccgggaggtgctgctgtgtgtgctggtgttcctgagcctgggcctggtgctgagctaccgctgccgccacagaaatggaggcctgctgggccggcagcagagcggcagccagtttgccctcttcagtgacatcctgagcggcctgcccttcatcggcttcttctgggccaagagccccccagagagcgagaacaaggagcagctggaggccaggagaagaaggaagggcaccaacatcagcgagaccagcctcatcggcacagctgcctgcaccagcaccagcagccagaatgaccctgaggtgatcatcgtgggcgccggcgtgctgggcagcgccctggccgctgtgctgagcagagatggcaggaaggtgaccgtcatcgagcgggacctgaaggagccagaccgcatcgtgggggagttcctgcagcccggcggctaccacgtgctgaaggacctgggcctgggggacacagtggagggcctggatgcccaggtggtgaatggctacatgattcatgaccaggagagcaagtctgaggtgcagatcccctaccccctgtctgagaacaaccaggtgcagagcggccgggccttccaccacggccgcttcatcatgagcctgaggaaggccgccatggccgagcccaatgccaagttcatcgagggcgtggtgctgcagctgctggaggaggatgatgtggtgatgggcgtgcagtacaaggacaaggagaccggggacatcaaggagctgcacgcccccctgactgtggtggctgatggcctcttcagcaagttcaggaagagcctggtgagcaacaaggtgtctgtgagcagccactttgtgggcttcctgatgaagaatgccccccagttcaaggccaaccacgccgagctgatcctggccaaccccagccctgtgctgatctaccagatcagcagcagcgagaccagggtgctggtggacatccggggggagatgcccaggaacctgcgggagtacatggtggagaagatctacccccagatcccagaccacctgaaggagcccttcctggaggccacagacaacagccacctgcgctccatgcctgccagcttcctgccccccagctctgtgaagaagaggggcgtgctgctgctgggagatgcctacaacatgaggcaccccctgactggaggcggcatgacagtggccttcaaggacatcaagctgtggaggaagctgctgaagggcatcccagacctgtatgatgatgctgccatctttgaggccaagaagagcttctactgggccaggaagaccagccacagctttgtggtgaacatcctggcccaggccctgtatgagctgttcagcgccacagatgacagcctgcaccagctgaggaaggcctgcttcctgtacttcaagctgggcggggagtgtgtggccggccctgtgggcctgctgtctgtgctgagccccaaccccctggtgctgattggccacttctttgctgtggccatctatgctgtgtacttctgcttcaagtctgagccctggatcaccaagccccgggccctgctgagcagcggggctgtgctgtacaaggcctgcagcgtcatcttccccctcatctacagcgagatgaagtacatggtgcactag

SEQ ID NO: 135466 - DNA, 1725 bp, Artificial Sequence
  derived and/or modified sequence
atgtggaccttcctgggcatcgccaccttcacctacttctacaagaagttcggcgactttatcacgctagcaaaccgggaggtgttactatgtgtcctcgtcttcttgtctttagggcttgtgctttcttacaggtgtagacaccgaaatggtggcctgctgggaaggcagcaatcagggagtcaattcgccctgttttctgatattttgtccgggctccccttcatcgggtttttttgggcgaaatcacctccagagagcgaaaacaaggagcagctggaagctaggagacggaggaaaggtactaacatttcagaaactagtctgatcggcaccgcagcttgcacctccacctctagccagaatgaccccgaggtgattattgtcggagccggtgtgctcgggtccgccctggctgctgtgctgagtcgcgatggccggaaggttactgttatcgagagagacttgaaggagccagaccgcatcgtcggggagtttctgcagccaggcgggtatcacgtcctgaaggacctcggcctgggcgatactgtggagggtctagatgcccaggtggttaatgggtatatgattcatgatcaggaaagtaagtcggaggtccagatcccctatcctctgagcgagaacaatcaggtgcagagcggccgcgcctttcaccacggaagatttatcatgtcactgagaaaagctgcgatggcagaacccaacgccaagttcattgagggggttgttctacagctgctcgaggaggatgacgtggttatgggcgtacagtataaggacaaggagactggcgacatcaaggagttgcacgcacccctgacagtagtggctgatggactctttagtaagttcagaaagagcttagtgtcaaataaggtgagtgtatccagccatttcgtcggcttcttgatgaagaacgccccgcagttcaaggccaatcatgcagagctgattctggccaatccttcaccagtcctgatttatcagatttcttcctccgagacaagggttctagttgacatccgaggagaaatgcctcgcaaccttcgggaatatatggtggaaaaaatctaccctcaaatccccgatcacctgaaggaaccatttctggaagctaccgataacagccacctacggtcaatgcccgcctcttttctgcctccaagttcagtgaaaaagcgcggcgtactcctgctgggagatgcgtacaacatgcggcacccactcaccggcgggggtatgacagtggctttcaaagacattaaactctggcggaagctgctcaagggaattcccgacctctatgacgacgcggccattttcgaggccaagaagtctttttactgggctaggaaaacatctcactccttcgttgtgaatatcttggctcaagctttgtacgaactgtttagcgcgacagatgacagcctgcaccaactccgaaaagcgtgttttctgtattttaagctgggaggcgagtgtgttgccggcccagtgggtctgctgtctgttctctctcctaatcctctggtactgatcggacattttttcgccgtcgctatctacgccgtgtacttttgcttcaagtccgagccatggatcaccaaaccgcgggccctgctgtcctctggcgcagtgctgtacaaagcctgttccgtgatctttcctctaatctactctgagatgaaatacatggtccactag

SEQ ID NO: 135467 - DNA, 1725 bp, Artificial Sequence
  derived and/or modified sequence
atgtggacatttctcggaatcgcaacatttacctatttctacaagaagtttggtgacttcatcacattggccaaccgcgaggtgctgctttgtgtgctggtgttcctcagcctgggactggtgttgtcatacagatgccggcacagaaacggtggtttgctgggcaggcagcagtcagggtcacaattcgccttatttagcgatattctgagtggactgcccttcatcggctttttttgggccaaaagccctcctgaatctgagaacaaggaacaactggaagcacgccgtcggagaaaaggcactaacatcagtgaaacatcattaattggtactgctgcttgcacaagcacaagtagccagaacgaccccgaggttatcattgtgggcgcaggcgtgttggggtcagctttagctgctgtactctcgagggatggcaggaaggtgacagttatcgagcgggacctgaaggagccggatagaatagttggtgaattcttgcaaccagggggttaccatgtgctgaaagatctcgggttaggggacacagttgagggcctggacgctcaggtcgtaaacggctacatgatacacgatcaggagagcaaatccgaagtgcagataccgtatcctctgtcagaaaacaaccaggtgcaatccggcagagcctttcaccacgggagatttatcatgagcctccgaaaggccgcaatggcggagcctaatgccaaattcatcgagggcgtcgtgctacaactgctggaggaagacgacgtggtgatgggcgtacagtataaggataaggagaccggcgacatcaaagagctccacgcccctttgacagtagtcgccgacgggctgttcagcaaatttcgcaagtcattagtttcaaataaggtgagcgtgtcttcgcacttcgtcggttttctcatgaaaaacgctccacagttcaaggcgaaccacgccgaactgatcctggcaaatcctagccccgtgctaatttatcagatcagcagcagtgagactcgagtgctcgtcgatataaggggagagatgccaaggaacctgagggagtatatggtggaaaaaatctacccacaaatacctgaccatctgaaggagccatttttggaggctaccgataattcccatctaagaagcatgcccgcttctttcctaccacctagctctgtaaagaagaggggcgtgctgctacttggggacgcttacaacatgcgacaccctcttacaggtggaggaatgactgtggcctttaaagatatcaagctgtggcgcaaattgcttaagggcatccctgatctttatgacgacgccgctatcttcgaggccaagaaatctttctactgggctcgcaagacttcccacagctttgtcgtcaatattctggcccaggccctgtacgaactattttccgcaactgacgactcgctccaccagctccggaaggcgtgttttttgtactttaagctcggtggggaatgtgtcgcgggtccagtcggcctgctttccgtactctcaccgaatcctctggtgctcattggtcatttctttgcagtggcgatttacgcagtgtacttctgcttcaagtctgaaccttggatcaccaagccacgggctctgctgtcctccggcgctgtgctttacaaagcctgctcagtgattttcccactcatctactcggagatgaaatatatggtccactag

SEQ ID NO: 135468 - DNA, 2961 bp, Artificial Sequence
  derived and/or modified sequence
agacgcgtggagcctggcggcgagtgggggcgtgcgacggttactctggttactggggccgcgccgcgctggcgagagccgccgcccgcgagggatgctggtgaggaagccgtcgggagccgccgccgccatctgagggaggtaccctggaaaccaccttttatcggtggggaagtgcagtcgcggtgggcggctctgggggccagcgaaacgggaggcctctaaatctttaggttggggctgcattgccctggagccgcactcttgagtccgaggccatcttttgttggagaaggcgtcggcgttggcgttttcccgaggttgggctgtacagtgtctccgtccgcggaaaaagaagcctctgaacccgcgccggcccgcagcccccgtgccttccggccgctgctcgccgtcgccagaggctaggccacgtttcccccagtgccgaggtgtttctgtgaccctccctccactcccattcccttctgaaagggcacctgctcttggtgagaaaagaaattatagcacgaagagccagtatcagaagagtatccatcacccgcagcaaccgctcagggaacaccatcaaaaaagaaaaaaagggaatatctggatttcctgggcgaggaggagcgagtctgctcgggagctgttccagcaggcgatttttaaatactgctttctacgccctatacaacttggcttcacatacttttacactaactttatatgatttttaaaaactggtctgatcggacttctcgtcctgggacactgtttactggagtctggccggctctccgtgctcctcttggtacctcattttggggagaaccttaaacccactcgagcagataatctccgccttgaccggtgccaccaaagaagccttggaaccatgtggacttttctgggcattgccactttcacctatttttataagaagttcggggacttcatcactttggccaacagggaggtcctgttgtgcgtgctggtgttcctctcgctgggcctggtgctctcctaccgctgtcgccaccgaaacgggggtctcctcgggcgccagcagagcggctcccagttcgccctcttctcggatattctctcaggcctgcctttcattggcttcttctgggccaaatccccccctgaatcagaaaataaggagcagctcgaggccaggaggcgcagaaaaggaaccaatatttcagaaacaagcttaataggaacagctgcctgtacatcaacatcttctcagaatgacccagaagttatcatcgtgggagctggcgtgcttggctctgctttggcagctgtgctttccagagatggaagaaaggtgacagtcattgagagagacttaaaagagcctgacagaatagttggagaattcctgcagccgggtggttatcatgttctcaaagaccttggtcttggagatacagtggaaggtcttgatgcccaggttgtaaatggttacatgattcatgatcaggaaagcaaatcagaggttcagattccttaccctctgtcagaaaacaatcaagtgcagagtggaagagctttccatcacggaagattcatcatgagtctccggaaagcagctatggcagagcccaatgcaaagtttattgaaggtgttgtgttacagttattagaggaagatgatgttgtgatgggagttcagtacaaggataaagagactggagatatcaaggaactccatgctccactgactgttgttgcagatgggcttttctccaagttcaggaaaagcctggtctccaataaagtttctgtatcatctcattttgttggctttcttatgaagaatgcaccacagtttaaagcaaatcatgctgaacttattttagctaacccgagtccagttctcatctaccagatttcatccagtgaaactcgagtacttgttgacattagaggagaaatgccaaggaatttaagagaatacatggttgaaaaaatttacccacaaatacctgatcacctgaaagaaccattcttagaagccactgacaattctcatctgaggtccatgccagcaagcttccttcctccttcatcagtgaagaaacgaggtgttcttcttttgggagacgcatataatatgaggcatccacttactggtggaggaatgactgttgcttttaaagatataaaactatggagaaaactgctaaagggtatccctgacctttatgatgatgcagctattttcgaggccaaaaaatcattttactgggcaagaaaaacatctcattcctttgtcgtgaatatccttgctcaggctctttatgaattattttctgccacagatgattccctgcatcaactaagaaaagcctgttttctttatttcaaacttggtggcgaatgtgttgcgggtcctgttgggctgctttctgtattgtctcctaaccctctagttttaattggacacttctttgctgttgcaatctatgccgtgtatttttgctttaagtcagaaccttggattacaaaacctcgagcccttctcagtagtggtgctgtattgtacaaagcgtgttctgtaatatttcctctaatttactcagaaatgaagtatatggttcattaagcttaaaggggaaccatttgtgaatgaatatttggaacttaccaagtcctaagagacttttggaagaggatatatatagcatagtaccataccacttataaagtggaaactcttggaccaagatttggattaatttgtttttgaagttttttgtatataaatatgtaaatacatgctttaatttgcaatttaaaatgaaggggttaaataagttagacatttaaaagaaatgattgttaccataaattagtgctaatgctgaggagaactacagtttttcttttgaatttagtatttgagatgagttgttgggacatgcaaataaaatgaagaatgaa

SEQ ID NO: 135469 - DNA, 1879 bp, Artificial Sequence
  derived and/or modified sequence
agctggctgagacgcgtggagcctggcggcgagtgggggcgtgcgacggttactctggttactggggccgcgccgcgctggcgagagccgccgcccgcgagggatgctgcgcagaaaaggaaccaatatttcagaaacaagcttaataggaacagctgcctgtacatcaacatcttctcagaatgacccagaagttatcatcgtgggagctggcgtgcttggctctgctttggcagctgtgctttccagagatggaagaaaggtgacagtcattgagagagacttaaaagagcctgacagaatagttggagaattcctgcagccgggtggttatcatgttctcaaagaccttggtcttggagatacagtggaaggtcttgatgcccaggttgtaaatggttacatgattcatgatcaggaaagcaaatcagaggttcagattccttaccctctgtcagaaaacaatcaagtgcagagtggaagagctttccatcacggaagattcatcatgagtctccggaaagcagctatggcagagcccaatgcaaagtttattgaaggtgttgtgttacagttattagaggaagatgatgttgtgatgggagttcagtacaaggataaagagactggagatatcaaggaactccatgctccactgactgttgttgcagatgggcttttctccaagttcaggaaaagcctggtctccaataaagtttctgtatcatctcattttgttggctttcttatgaagaatgcaccacagtttaaagcaaatcatgctgaacttattttagctaacccgagtccagttctcatctaccagatttcatccagtgaaactcgagtacttgttgacattagaggagaaatgccaaggaatttaagagaatacatggttgaaaaaatttacccacaaatacctgatcacctgaaagaaccattcttagaagccactgacaattctcatctgaggtccatgccagcaagcttccttcctccttcatcagtgaagaaacgaggtgttcttcttttgggagacgcatataatatgaggcatccacttactggtggaggaatgactgttgcttttaaagatataaaactatggagaaaactgctaaagggtatccctgacctttatgatgatgcagctattttcgaggccaaaaaatcattttactgggcaagaaaaacatctcattcctttgtcgtgaatatccttgctcaggctctttatgaattattttctgccacagatgattccctgcatcaactaagaaaagcctgttttctttatttcaaacttggtggcgaatgtgttgcgggtcctgttgggctgctttctgtattgtctcctaaccctctagttttaattggacacttctttgctgttgcaatctatgccgtgtatttttgctttaagtcagaaccttggattacaaaacctcgagcccttctcagtagtggtgctgtattgtacaaagcgtgttctgtaatatttcctctaatttactcagaaatgaagtatatggttcattaagcttaaaggggaaccatttgtgaatgaatatttggaacttaccaagtcctaagagacttttggaagaggatatatatagcatagtaccataccacttataaagtggaaactcttggaccaagatttggattaatttgtttttgaagttttttgtatataaatatgtaaatacatgctttaatttgcaatttaaaatgaaggggttaaataagttagacatttaaaagaaatgattgttaccataaattagtgctaatgctgaggagaactacagtttttcttttgaatttagtatttgagatgagttgttgggacatgcaaataaaatgaagaatg

SEQ ID NO: 135470 - protein, 198 aa, Artificial Sequence
  derived and/or modified sequence
MAYPGHPGAGGGYYPGGYGGAPGGPAFPGQTQDPLYGYFAAVAGQDGQIDADELQRCLTQSGIAGGYKPFNLETCRLMVSMLDRDMSGTMGFNEFKELWAVLNGWRQHFISFDTDRSGTVDPQELQKALTTMGFRLSPQAVNSIAKRYSTNGKITFDDYIACCVKLRALTDSFRRRDTAQQGVVNFPYDDFIQCVMSV

SEQ ID NO: 135471 - protein, 508 aa, Artificial Sequence
  derived and/or modified sequence
MLPTQAGAAAALGRGSALGGSLNRTPTGRPGGGGGTRGANGGRVPGNGAGLGPGRLEREAAAAAATTPAPTAGALYSGSEGDSESGEEEELGAERRGLKRSLSEMEIGMVVGGPEASAAATGGYGPVSGAVSGAKPGKKTRGRVKIKMEFIDNKLRRYTTFSKRKTGIMKKAYELSTLTGTQVLLLVASETGHVYTFATRKLQPMITSETGKALIQTCLNSPDSPPRSDPTTDQRMSATGFEETDLTYQVSESDSSGETKDTLKPAFTVTNLPGTTSTIQTAPSTSTTMQVSSGPSFPITNYLAPVSASVSPSAVSSANGTVLKSTGSGPVSSGGLMQLPTSFTLMPGGAVAQQVPVQAIQVHQAPQQASPSRDSSTDLTQTSSSGTVTLPATIMTSSVPTTVGGHMMYPSPHAVMYAPTSGLGDGSLTVLNAFSQAPSTMQVSHSQVQEPGGVPQVFLTASSGTVQIPVSAVQLHQMAVIGQQAGSSSNLTELQVVNLDTAHSTKSE

SEQ ID NO: 135472 - protein, 304 aa, Artificial Sequence
  derived and/or modified sequence
MITSETGKALIQTCLNSPDSPPRSDPTTDQRMSATGFEETDLTYQVSESDSSGETKDTLKPAFTVTNLPGTTSTIQTAPSTSTTMQVSSGPSFPITNYLAPVSASVSPSAVSSANGTVLKSTGSGPVSSGGLMQLPTSFTLMPGGAVAQQVPVQAIQVHQAPQQASPSRDSSTDLTQTSSSGTVTLPATIMTSSVPTTVGGHMMYPSPHAVMYAPTSGLGDGSLTVLNAFSQAPSTMQVSHSQVQEPGGVPQVFLTASSGTVQIPVSAVQLHQMAVIGQQAGSSSNLTELQVVNLDTAHSTKSE

SEQ ID NO: 135473 - DNA, 4343 bp, Artificial Sequence
  derived and/or modified sequence
aatggggagcggaggtgccggaaccacggaccaatggggcgggggcgctggggctcaccatataaggagcggcctcgccataaaaggaaacattgtatctctttatatggggggaagggtcgggggatccctccgccgccagcgcgtggtcccggccccctccacccgccgtctcggccgcggccagcagcccctgccccccgggggacgctgacggccgcccggcgcgccgccctagcagacggacagggggcgctgcgcgcggcctggggcaacccgggccacaggggcaggaaagtgagggcccaggtcggcccgggcgtgcaggggccccgggttcgcagcggcggccgcggcagcgatagcggcactagcagcagcgggagtgccgggttgagccgggaagccgatggcggcggctgcggcggctccgattcctcgctgactgcccgtccgccctcctgcatcgagcgccatgttaccgacccaagctggggccgcggcggctctgggccggggctcggccctggggggcagcctgaaccggaccccgacggggcggccgggcggcggcggcgggacacgcggggctaacgggggccgggtccccgggaatggcgcggggctcgggcccggccgcctggagcgggaggctgcggcagcggcggcaaccaccccggcgcccaccgcgggggccctctacagcggcagcgagggcgactcggagtcgggcgaggaggaggagctgggcgccgagcggcgcggcctgaagcggagcctgagcgagatggagatcggtatggtggtcggtgggcccgaggcgtcggcagcggccaccgggggctacgggccggtgagcggcgcggtgagcggggccaagccgggtaagaagacccggggccgcgtgaagatcaagatggagttcatcgacaacaagctgcggcgctacacgaccttcagcaagaggaagacgggcatcatgaagaaggcctatgagctgtccacgctgacagggacacaggtgctgttgctggtggccagtgagacaggccatgtgtatacctttgccacccgaaaactgcagcccatgatcaccagtgagaccggcaaggcactgattcagacctgcctcaactcgccagactctccaccccgttcagaccccacaacagaccagagaatgagtgccactggctttgaagagacagatctcacctaccaggtgtcggagtctgacagcagtggggagaccaaggacacactgaagccggcgttcacagtcaccaacctgccgggtacaacctccaccatccaaacagcacctagcacctctaccaccatgcaagtcagcagcggcccctcctttcccatcaccaactacctggcaccagtgtctgctagtgtcagccccagtgctgtcagcagtgccaatgggactgtgctgaagagtacaggcagcggccctgtctcctctgggggccttatgcagctgcctaccagcttcaccctcatgcctggtggggcagtggcccagcaggtcccagtgcaggccattcaagtgcaccaggccccacagcaagcgtctccctcccgtgacagcagcacagacctcacgcagacctcctccagcgggacagtgacgctgcccgccaccatcatgacgtcatccgtgcccacaactgtgggtggccacatgatgtaccctagcccgcatgcggtgatgtatgcccccacctcgggcctgggtgatggcagcctcaccgtgctgaatgccttctcccaggcaccatccaccatgcaggtgtcacacagccaggtccaggagccaggtggcgtcccccaggtgttcctgacagcatcatctgggacagtgcagatccctgtttcagcagttcagctccaccagatggctgtgatagggcagcaggccgggagcagcagcaacctcaccgagctacaggtggtgaacctggacaccgcccacagcaccaagagtgaatgatccgcccgccgccctggacagatggcccaagggatggcaccacttatttattgttgccttttcacgttttctttacacacacgttgacgggccgcaggagggaggcggggaggaggaacgggcagccacaggactgagccctctcactccagccaaagaaatgggcctgcctgcctccacccgtcctccctcagcctccccttcttcccgccccacctcccatttctgttgctggaggggctgtcctccttcctgggaccccctcgccagcttggctcgatgtttgccatgagtattagcttacccaatgggaccgtgccccacctccccacacacaggccttctgtggggctgggcaccgtgtcctcctctgaggaagcagttggggccctcttgccagcctccttgctgaccccaggtcagccctgtgtctgtcacaggctgggtcaaaagagccctggctctgcccctcagggggccagctggggagatgggggcttcttcctcacactgctgtcctctcccccttcagctcctgagtagctgggcctgtgcactgggcaggttcctggggccgcctgccctgccttgccgctccccttggacctccaggggctcctgggttggagggaaccaccagcgttcccttctcccccttgtcttcccccctctcctcccagctgctttacttaaagttgattttgaactttttatttgaggagacgaagtgaaaacaaatctataaatatatatttttaaaatatttaacttttttttatggcgtttttctcgtccccctccctgcccaaactccccttccctggggagccctcaggctccccagaactggctgggcccctggggacagagccaccccatgagctcggggtccaccagtgtgtgggggagattctgggtttgcccagtcctgggttgtttccaggagaaagccgggggaggggccctcaggccattccccaacggggtggggagggtgacccacagctctgggcctctttttgccctttagggctgttgctagggagagggaagagggagaccaaatgtcggggttggggtgggagggcgtcaggcagaggcaactgacttcatttgtgccacacgcatgggcattgcagccttgcgctgtcccaggcatgcagctgcctggggcccaagttgcagtgagcagggtggggtctgggagggggtgagaggcaggaatgggggtcagaagaagtgggagcagcttcttgggctgagtgcagccaaaggggagccagaaatgggcagttctcccagggagtgagcagctactgtaacttttttaaattaagacaaaaagccttgaagaaaatgactttatttttctaagtgtaacctcagtatttatgtaatttgtacaggggccatgccccacccccctcctccccctttggggtagaccttgagggtgggccagcataggggggagggtcttttaccctgtgtcagagcctaccttcaccacctatatccagaaggggagctttttcagaaacagggcagcagtggggtgaaattttcttaacccctaagactgccttcagtaggaacaagctggcttctgtgattaggtgaagggatgggggaagattttatgcacagcctagttatcaaggggatgatttgccgacatgtttgagaaccccctaacctctaaccctcattgctgtcttgccccagtttggggtgccaagatggaagtcacctttctgggctttctcctggagatagctggggcttatgggtggctttcaaggctggggcatggcaaatcaggggccagagagcaggggagcttgggactcaggtctgtaactgcccagccccttttctctgctcttgtttcactccaccatcactcactcactccccactcccccacccatggggaggagacctttgatgaattcttcctctccttcccacaaaagacagacccagtgagtgaatcaggcaaagtgcttataatgtgtgttgtgtgagcgtggccttgggaggacatgcgtgtgtcagggatgagttgaggtgatatttttatgtgcagcgacccttggtgtttcccttcctcggtggctctggggtatgtgtgtgtgggtgtgtgcgcctgagtgagtgtgtgtgcttgaatgtgagtgtgtatgtcagtggtttctacttcccctgggatgctgacccaggaatagtggacatggtcacagtcctatgtacagagctttcttttgtattaaaaaaaaatactctttcaataaatgtatcatttttgtgcacagaaaaaaaaaaaaaaaaaaaaaaaaaa

SEQ ID NO: 135474 - DNA, 1527 bp, Artificial Sequence
  derived and/or modified sequence
atgctgcccacccaggccggcgccgccgccgccctgggcagaggcagcgccctgggcggcagcctgaacagaacccccaccggcagacccggcggcggcggcggcaccagaggcgccaacggcggcagagtgcccggcaacggcgccggcctgggccccggcagactggagagagaggccgccgccgccgccgccaccacccccgcccccaccgccggcgccctgtacagcggcagcgagggcgacagcgagagcggcgaggaggaggagctgggcgccgagagaagaggcctgaagagaagcctgagcgagatggagatcggcatggtggtgggcggccccgaggccagcgccgccgccaccggcggctacggccccgtgagcggcgccgtgagcggcgccaagcccggcaagaagaccagaggcagagtgaagatcaagatggagttcatcgacaacaagctgagaagatacaccaccttcagcaagagaaagaccggcatcatgaagaaggcctacgagctgagcaccctgaccggcacccaggtgctgctgctggtggccagcgagaccggccacgtgtacaccttcgccaccagaaagctgcagcccatgatcaccagcgagaccggcaaggccctgatccagacctgcctgaacagccccgacagcccccccagaagcgaccccaccaccgaccagagaatgagcgccaccggcttcgaggagaccgacctgacctaccaggtgagcgagagcgacagcagcggcgagaccaaggacaccctgaagcccgccttcaccgtgaccaacctgcccggcaccaccagcaccatccagaccgcccccagcaccagcaccaccatgcaggtgagcagcggccccagcttccccatcaccaactacctggcccccgtgagcgccagcgtgagccccagcgccgtgagcagcgccaacggcaccgtgctgaagagcaccggcagcggccccgtgagcagcggcggcctgatgcagctgcccaccagcttcaccctgatgcccggcggcgccgtggcccagcaggtgcccgtgcaggccatccaggtgcaccaggccccccagcaggccagccccagcagagacagcagcaccgacctgacccagaccagcagcagcggcaccgtgaccctgcccgccaccatcatgaccagcagcgtgcccaccaccgtgggcggccacatgatgtaccccagcccccacgccgtgatgtacgcccccaccagcggcctgggcgacggcagcctgaccgtgctgaacgccttcagccaggcccccagcaccatgcaggtgagccacagccaggtgcaggagcccggcggcgtgccccaggtgttcctgaccgccagcagcggcaccgtgcagatccccgtgagcgccgtgcagctgcaccagatggccgtgatcggccagcaggccggcagcagcagcaacctgaccgagctgcaggtggtgaacctggacaccgcccacagcaccaagagcgagtag

SEQ ID NO: 135475 - DNA, 1527 bp, Artificial Sequence
  derived and/or modified sequence
atgttacccacccaggcaggagccgcggctgcactcggtaggggctccgctctaggtggcagcctgaaccggacacccaccgggaggcctggaggcggcggaggcacgcggggcgcgaatggggggcgcgtgccaggaaacggggcagggctcggaccaggaagattggagagagaggcagcagccgccgctgcaaccacaccagcgcctactgcaggcgctctttacagtggcagcgagggcgactctgaatcgggagaggaggaggagctcggcgcggagcgccgcgggttgaagcggtctctttcagagatggagatcggaatggtggtgggaggccctgaggctagcgcagctgccaccgggggctatggcccagtttccggggccgttagcggggcaaagccagggaaaaagacccgggggagagtgaaaatcaagatggagttcatcgataataagctacgccggtacacaactttctctaagcggaagactggtatcatgaagaaggcgtatgagctgtctaccctcaccgggactcaagtgctgctcttggtagcatccgagacgggtcacgtgtacacattcgccactagaaaattgcagccaatgattacaagcgaaacgggaaaagcactgattcaaacctgtctgaattccccagattctccgcctcggtcagatcccacaacagaccaacggatgtccgcgaccggatttgaggaaactgacctgacatatcaagtaagcgaatcagattcatccggggaaactaaagacactctgaaacccgccttcaccgtgaccaatctcccagggacgacctcaactatccagaccgcaccgtctacttcaacaacaatgcaggtttcaagcgggccctcttttcccataacaaattatctcgcaccggtgtctgcatctgtgagtcccagtgctgtctctagcgcgaacggtaccgtgcttaagtctactggatccggaccagtttcctcaggaggactcatgcagcttccaacatctttcacgctcatgccgggcggggccgtcgcacagcaggtgcccgtccaggccatccaagtccatcaggctccccagcaggcttcaccgtctagggactcatcaaccgatctaacccaaacttcaagtagcgggaccgtaacattaccagccacaattatgacctcctccgtgccaacgaccgtcggtggtcatatgatgtacccttccccacacgctgtcatgtacgcccctactagcggcctcggagacgggagtttgacggtgttgaacgccttctcccaggccccatcaacgatgcaggtgagtcattctcaggtacaggaacccggtggcgtacctcaggtatttctcaccgctagtagtgggacggtccagattcctgtgagcgcagtgcagctccaccagatggctgtgattggtcaacaggctgggtctagttcaaacctgactgaattacaagtcgtgaaccttgacactgctcacagtactaagtcagaatag

SEQ ID NO: 135476 - DNA, 1527 bp, Artificial Sequence
  derived and/or modified sequence
atgctgcccacccaggccggggctgctgctgccctgggccggggcagcgccctgggcggcagcctgaacagaacacccaccggccggcctgggggcggcggcggcaccaggggggccaacggcggccgggtgcctggaaatggagctggcctgggccctggccgcctggagcgggaggccgctgctgctgctgccaccaccccagcccccacagctggggccctgtacagcggcagcgagggggacagcgagagcggggaggaggaggagctgggcgctgagcggcggggcctgaagaggagcctgtctgagatggagatcggcatggtggtgggcggccctgaggccagcgctgctgccactggaggctacggccctgtgtctggagctgtgtctggggccaagccaggcaagaagacccggggccgggtgaagatcaagatggagttcatcgacaacaagctgcggcgctacaccaccttcagcaagaggaagacaggcatcatgaagaaggcctatgagctgagcaccctgaccggcacccaggtgctgctgctggtggccagcgagactggacatgtgtacacctttgccaccaggaagctgcagcccatgatcaccagcgagaccgggaaggccctgatccagacctgcctgaacagcccagacagccccccaagaagtgaccccaccacagaccagaggatgtctgccactggatttgaggagacagacctgacctaccaggtgtctgagagtgacagcagcggggagaccaaggacaccctgaagccagccttcaccgtgaccaacctgcccggcaccaccagcaccatccagacagcccccagcaccagcaccaccatgcaggtgagcagcggccccagcttccccatcaccaactacctggcccctgtgtctgcctctgtgagccccagcgctgtgtcctctgccaatggaacagtgctgaagagcacaggcagcggccctgtgtcctctgggggcctgatgcagctgcccaccagcttcaccctgatgcctggaggagctgtggcccagcaggtgcctgtgcaggccatccaggtgcaccaggccccccagcaggccagccccagccgggacagcagcacagacctgacccagaccagcagcagcggcaccgtgaccctgcctgccaccatcatgaccagctctgtgcccaccaccgtgggcggccacatgatgtaccccagcccccatgctgtgatgtatgcccccaccagcggcctgggagatggcagcctgactgtgctgaatgccttcagccaggcccccagcaccatgcaggtgagccacagccaggtgcaggagcctggaggagtgccccaggtgttcctgacagccagcagcggcaccgtgcagatccctgtgtctgctgtgcagctgcaccagatggctgtgattggccagcaggccggcagcagcagcaacctgacagagctgcaggtggtgaacctggacacagcccacagcaccaagtctgagtag

SEQ ID NO: 135477 - DNA, 1527 bp, Artificial Sequence
  derived and/or modified sequence
atgctgcccacccaggccggcgccgccgccgccctgggccggggcagcgcactcggcggtagccttaatcgtactcctaccggacgcccaggcggaggtggagggacgcgaggtgcaaatgggggtagagtgcctggtaacggtgcaggcctcggccctgggcgcctggagcgtgaggccgcagccgctgctgcaacaactccggctcccaccgcaggcgctctgtactccggtagcgaaggtgactccgagtcaggagaagaggaggaactgggtgctgagagaaggggcctgaagcgaagtctctccgagatggagattggcatggtcgtgggtggtcccgaagccagtgcagctgccaccgggggttatgggccagttagtggcgctgtatcgggggccaaaccgggaaagaagactcgtgggcgtgtcaaaattaagatggagttcatcgacaacaaactgagacggtataccacctttagcaagcgaaagactgggatcatgaaaaaagcctatgagcttagtactctgacagggacacaggtgcttctgctagtcgctagcgagacaggccacgtatacacttttgccactcggaaactgcagccaatgataacttccgaaaccgggaaagccctcatccaaacctgcctgaacagccccgattcaccgcctcgatcagatcccaccactgatcaaaggatgtccgcaactggattcgaggaaacagacttaacataccaggtatccgagtcagactctagtggcgaaaccaaggacacactcaagcctgcattcacagtgacaaatttaccagggactacaagcacgatccagacagccccctctacctcaacaaccatgcaggtgtcctcaggtccttcatttcccatcaccaactatctcgctcctgtctccgcttcagtgagccccagtgcggtatcttccgcaaacggaactgtccttaaatcaaccggctcgggacccgtgtccagcggtggattaatgcagctcccaacttcttttacactgatgcccgggggtgctgtggcacaacaagtgccggtccaagctatacaggtacaccaagccccacagcaagcgagcccctctagggactcatctactgacctgacacaaacttcctcaagcggaacggtgaccctacccgctactatcatgacatcgagcgttcccacgactgtcgggggtcacatgatgtatccatccccacacgcggtcatgtatgcgcctacctcaggtttgggagacggatcactgacagttctcaatgcgtttagtcaggctccttctacaatgcaagtgtcacactcccaagttcaggagccggggggggttcctcaggtgtttctcacagcttcatctggcacagttcagatacccgtctccgccgtgcaattacatcaaatggcagtcataggccaacaggcgggcagcagcagtaacttgaccgagctgcaggtggttaacctggatacagcacattctacaaaaagtgagtag

SEQ ID NO: 135478 - DNA, 1527 bp, Artificial Sequence
  derived and/or modified sequence
atgttgccgactcaggccggtgctgccgctgcacttgggagagggtccgcattgggaggttctctcaacaggacgcctaccggaaggcccggagggggaggcggaactagaggcgcaaacggaggacgagtgcctggcaatggggcagggttgggtccaggcaggctggagagggaagctgccgctgccgcagcgacaacaccagcccctacagctggagccctgtattcagggtcagagggcgattcggagtcaggtgaggaggaagagcttggggctgagcgtaggggcctaaagcgctcactcagtgaaatggaaattggcatggtggttggagggcctgaagcatcggcggcagctacaggtggatacggccctgtgtctggggctgtgtccggtgccaaaccaggcaagaagacacggggtagagttaaaatcaagatggaattcattgataacaaactccgaaggtacactacctttagtaaaagaaaaaccgggatcatgaaaaaagcctatgagctgagtacccttacgggcacacaggttcttctgctcgtcgcctctgagaccggacatgtttacaccttcgccacacgaaaactgcagccaatgatcaccagcgagaccggtaaggcccttattcagacatgtctcaattctccagatagcccacccaggagcgacccgacaactgatcaaaggatgagcgccaccggcttcgaggaaacggatctgacctatcaagtctccgagtcagactcctctggcgaaacgaaagacacacttaagcctgcgttcaccgttaccaatttgcccggtacaacctccaccattcagaccgcaccctctacatccacgaccatgcaagtgtcatctggcccttcatttcctatcacgaattacctggcccctgtgtccgcatctgtttctccctcagctgttagttccgcaaatggaactgtgcttaaaagcaccggatctggaccagtcagttcaggcggtctaatgcaacttcccaccagcttcacgctgatgcctgggggagcagtggcccaacaggttccggtccaggccatccaggtgcatcaagccccacagcaggctagcccctctcgggattctagcacagatctaacacagactagctctagcggcactgtaactctgccagcgaccatcatgacctccagcgtgccaaccacagtgggcggacatatgatgtacccgtccccccatgcagtaatgtatgccccaacctcgggactcggcgatgggtctcttactgttctgaacgctttcagccaggcaccctctactatgcaggtgtcccactcgcaggtgcaggaaccaggtggcgtcccgcaggtctttctgaccgcctcgagcggtacagtccagatccctgtctcagctgtccagctacatcagatggcagtaattggccagcaggcaggctctagtagcaatctgacagagttgcaggtggttaaccttgacacagcgcattccacgaagtcagagtag

SEQ ID NO: 135479 - DNA, 4200 bp, Artificial Sequence
  derived and/or modified sequence
ggtcgggggatccctccgccgccagcgcgtggtcccggccccctccacccgccgtctcggccgcggccagcagcccctgccccccgggggacgctgacggccgcccggcgcgccgccctagcagacggacagggggcgctgcgcgcggcctggggcaacccgggccacaggggcaggaaagtgagggcccaggtcggcccgggcgtgcaggggccccgggttcgcagcggcggccgcggcagcgatagcggcactagcagcagcgggagtgccgggttgagccgggaagccgatggcggcggctgcggcggctccgattcctcgctgactgcccgtccgccctcctgcatcgagcgccatgttaccgacccaagctggggccgcggcggctctgggccggggctcggccctggggggcagcctgaaccggaccccgacggggcggccgggcggcggcggcgggacacgcggggctaacgggggccgggtccccgggaatggcgcggggctcgggcccggccgcctggagcgggaggctgcggcagcggcggcaaccaccccggcgcccaccgcgggggccctctacagcggcagcgagggcgactcggagtcgggcgaggaggaggagctgggcgccgagcggcgcggcctgaagcggagcctgagcgagatggagatcggtatggtggtcggtgggcccgaggcgtcggcagcggccaccgggggctacgggccggtgagcggcgcggtgagcggggccaagccgggtaagaagacccggggccgcgtgaagatcaagatggagttcatcgacaacaagctgcggcgctacacgaccttcagcaagaggaagacgggcatcatgaagaaggcctatgagctgtccacgctgacagggacacaggtgctgttgctggtggccagtgagacaggccatgtgtatacctttgccacccgaaaactgcagcccatgatcaccagtgagaccggcaaggcactgattcagacctgcctcaactcgccagactctccaccccgttcagaccccacaacagaccagagaatgagtgccactggctttgaagagacagatctcacctaccaggtgtcggagtctgacagcagtggggagaccaaggacacactgaagccggcgttcacagtcaccaacctgccgggtacaacctccaccatccaaacagcacctagcacctctaccaccatgcaagtcagcagcggcccctcctttcccatcaccaactacctggcaccagtgtctgctagtgtcagccccagtgctgtcagcagtgccaatgggactgtgctgaagagtacaggcagcggccctgtctcctctgggggccttatgcagctgcctaccagcttcaccctcatgcctggtggggcagtggcccagcaggtcccagtgcaggccattcaagtgcaccaggccccacagcaagcgtctccctcccgtgacagcagcacagacctcacgcagacctcctccagcgggacagtgacgctgcccgccaccatcatgacgtcatccgtgcccacaactgtgggtggccacatgatgtaccctagcccgcatgcggtgatgtatgcccccacctcgggcctgggtgatggcagcctcaccgtgctgaatgccttctcccaggcaccatccaccatgcaggtgtcacacagccaggtccaggagccaggtggcgtcccccaggtgttcctgacagcatcatctgggacagtgcagatccctgtttcagcagttcagctccaccagatggctgtgatagggcagcaggccgggagcagcagcaacctcaccgagctacaggtggtgaacctggacaccgcccacagcaccaagagtgaatgatccgcccgccgccctggacagatggcccaagggatggcaccacttatttattgttgccttttcacgttttctttacacacacgttgacgggccgcaggagggaggcggggaggaggaacgggcagccacaggactgagccctctcactccagccaaagaaatgggcctgcctgcctccacccgtcctccctcagcctccccttcttcccgccccacctcccatttctgttgctggaggggctgtcctccttcctgggaccccctcgccagcttggctcgatgtttgccatgagtattagcttacccaatgggaccgtgccccacctccccacacacaggccttctgtggggctgggcaccgtgtcctcctctgaggaagcagttggggccctcttgccagcctccttgctgaccccaggtcagccctgtgtctgtcacaggctgggtcaaaagagccctggctctgcccctcagggggccagctggggagatgggggcttcttcctcacactgctgtcctctcccccttcagctcctgagtagctgggcctgtgcactgggcaggttcctggggccgcctgccctgccttgccgctccccttggacctccaggggctcctgggttggagggaaccaccagcgttcccttctcccccttgtcttcccccctctcctcccagctgctttacttaaagttgattttgaactttttatttgaggagacgaagtgaaaacaaatctataaatatatatttttaaaatatttaacttttttttatggcgtttttctcgtccccctccctgcccaaactccccttccctggggagccctcaggctccccagaactggctgggcccctggggacagagccaccccatgagctcggggtccaccagtgtgtgggggagattctgggtttgcccagtcctgggttgtttccaggagaaagccgggggaggggccctcaggccattccccaacggggtggggagggtgacccacagctctgggcctctttttgccctttagggctgttgctagggagagggaagagggagaccaaatgtcggggttggggtgggagggcgtcaggcagaggcaactgacttcatttgtgccacacgcatgggcattgcagccttgcgctgtcccaggcatgcagctgcctggggcccaagttgcagtgagcagggtggggtctgggagggggtgagaggcaggaatgggggtcagaagaagtgggagcagcttcttgggctgagtgcagccaaaggggagccagaaatgggcagttctcccagggagtgagcagctactgtaacttttttaaattaagacaaaaagccttgaagaaaatgactttatttttctaagtgtaacctcagtatttatgtaatttgtacaggggccatgccccacccccctcctccccctttggggtagaccttgagggtgggccagcataggggggagggtcttttaccctgtgtcagagcctaccttcaccacctatatccagaaggggagctttttcagaaacagggcagcagtggggtgaaattttcttaacccctaagactgccttcagtaggaacaagctggcttctgtgattaggtgaagggatgggggaagattttatgcacagcctagttatcaaggggatgatttgccgacatgtttgagaaccccctaacctctaaccctcattgctgtcttgccccagtttggggtgccaagatggaagtcacctttctgggctttctcctggagatagctggggcttatgggtggctttcaaggctggggcatggcaaatcaggggccagagagcaggggagcttgggactcaggtctgtaactgcccagccccttttctctgctcttgtttcactccaccatcactcactcactccccactcccccacccatggggaggagacctttgatgaattcttcctctccttcccacaaaagacagacccagtgagtgaatcaggcaaagtgcttataatgtgtgttgtgtgagcgtggccttgggaggacatgcgtgtgtcagggatgagttgaggtgatatttttatgtgcagcgacccttggtgtttcccttcctcggtggctctggggtatgtgtgtgtgggtgtgtgcgcctgagtgagtgtgtgtgcttgaatgtgagtgtgtatgtcagtggtttctacttcccctgggatgctgacccaggaatagtggacatggtcacagtcctatgtacagagctttcttttgtattaaaaaaaaatactctttcaataaatgtatcatttttgtgcacag

SEQ ID NO: 135480 - DNA, 1312 bp, Artificial Sequence
  derived and/or modified sequence
aaaggcgcagaggtgggagtgaccggcgccagagaggaagagggcccttgctgagtgaaggggcctatgagctgtccacgctgacagggacacaggtgctgttgctggtggccagtgagacaggccatgtgtatacctttgccacccgaaaactgcagcccatgatcaccagtgagaccggcaaggcactgattcagacctgcctcaactcgccagactctccaccccgttcagaccccacaacagaccagagaatgagtgccactggctttgaagagacagatctcacctaccaggtgtcggagtctgacagcagtggggagaccaaggacacactgaagccggcgttcacagtcaccaacctgccgggtacaacctccaccatccaaacagcacctagcacctctaccaccatgcaagtcagcagcggcccctcctttcccatcaccaactacctggcaccagtgtctgctagtgtcagccccagtgctgtcagcagtgccaatgggactgtgctgaagagtacaggcagcggccctgtctcctctgggggccttatgcagctgcctaccagcttcaccctcatgcctggtggggcagtggcccagcaggtcccagtgcaggccattcaagtgcaccaggccccacagcaagcgtctccctcccgtgacagcagcacagacctcacgcagacctcctccagcgggacagtgacgctgcccgccaccatcatgacgtcatccgtgcccacaactgtgggtggccacatgatgtaccctagcccgcatgcggtgatgtatgcccccacctcgggcctgggtgatggcagcctcaccgtgctgaatgccttctcccaggcaccatccaccatgcaggtgtcacacagccaggtccaggagccaggtggcgtcccccaggtgttcctgacagcatcatctgggacagtgcagatccctgtttcagcagttcagctccaccagatggctgtgatagggcagcaggccgggagcagcagcaacctcaccgagctacaggtggtgaacctggacaccgcccacagcaccaagagtgaatgatccgcccgccgccctggacagatggcccaagggatggcaccacttatttattgttgccttttcacgttttctttacacacacgttgacgggccgcaggagggaggcggggaggaggaacgggcagccacaggactgagccctctcactccagccaaagaaatgggcctgcctgcctccacccgtcctccctcagcctccccttcttcccgccccacctcccatttctgttgctgga

SEQ ID NO: 135481 - protein, 86 aa, Artificial Sequence
  derived and/or modified sequence
MPQYQTWEEFSRAAEKLYLADPMKARVVLKYRHSDGNLCVKVTDDLVCLVYKTDQAQDVKKIEKFHSQLMRLMVAKEARNVTMETE

SEQ ID NO: 135482 - protein, 66 aa, Artificial Sequence
  derived and/or modified sequence
MPQYQTWEEFSRAAEKLYLADPMKARVVLKYRHSDGNLCVKVTDDLVQWHLNYCTLRHGIAGGLET

SEQ ID NO: 135483 - DNA, 261 bp, Artificial Sequence
  derived and/or modified sequence
atgccccagtatcagacatgggaagagttctcacgggctgccgaaaagctgtacctggctgacccaatgaaagcgcgggtggtcctgaagtacaggcactcagacggcaatttgtgtgtgaaggtgaccgacgatctggtatgcctggtctataagactgaccaagcccaggatgttaagaaaattgaaaaattccacagtcaattgatgcgcctgatggttgctaaggaggctcggaacgtgacaatggagaccgagtag

SEQ ID NO: 135484 - DNA, 540 bp, Artificial Sequence
  derived and/or modified sequence
gccacgatgccgcagtaccagacctgggaggagttcagccgcgctgccgagaagctttacctcgctgaccctatgaaggcacgtgtggttctcaaatataggcattctgatgggaacttgtgtgttaaagtaacagatgatttagttcagtggcatttaaattactgtactttaagacatggaattgctggaggcttggaaacttgagtgcaatttccctagtacgacctccaaggagaatagagcaaaacagtgtgtttggtgtataaaacagaccaagctcaagatgtaaagaagattgagaaattccacagtcaactaatgcgacttatggtagccaaggaagcccgcaatgttaccatggaaactgagtgaatggtttgaaatgaagactttgtcgtgtacttaggaagtaaatatcttttgaattagagaaagtgttgggacagaaagtactttatgtaactaagtgggctgttcagaagcttagaggtcattttttgtaattttctttttaattactttagagagctagggatg

SEQ ID NO: 135485 - DNA, 261 bp, Artificial Sequence
  derived and/or modified sequence
atgccccagtaccagacctgggaggagttcagcagagctgctgagaagctgtacctggccgaccccatgaaggcccgggtggtgctgaagtaccgccacagtgatggcaacctgtgtgtgaaggtgacagatgacctggtgtgcctggtgtacaagacagaccaggcccaggatgtgaagaagattgagaagttccacagccagctgatgaggctgatggtggccaaggaggccagaaatgtgaccatggagacagaatag

SEQ ID NO: 135486 - DNA, 261 bp, Artificial Sequence
  derived and/or modified sequence
atgccccagtaccagacctgggaggagttcagccgggccgccgagaaattgtatcttgctgaccctatgaaagcacgggtggtactcaagtatcgacacagcgacgggaatctgtgtgtaaaggtcaccgacgatctggtgtgcctcgtatacaagaccgatcaggcacaggatgtgaaaaaaattgaaaagtttcactcccaactgatgcggctgatggtcgcgaaggaggctagaaacgttactatggagaccgaatag

SEQ ID NO: 135487 - DNA, 261 bp, Artificial Sequence
  derived and/or modified sequence
atgccacagtaccagacatgggaggagttcagcagagcagcagagaagttatatctggcggatccaatgaaagcgagagtggtgcttaaataccgccactcagatggtaacctctgtgtgaaggtgacggatgatcttgtctgcctggtttacaaaactgatcaggctcaggacgttaaaaagattgagaagtttcattcacagctgatgaggttgatggtcgccaaggaggcaaggaacgttaccatggaaaccgaatag

SEQ ID NO: 135488 - DNA, 1480 bp, Artificial Sequence
  derived and/or modified sequence
gccatcttggggctgctgggactcgcgtcggttggcgactcccggacgtaggtagtttgttgggccgggttctgaggccttgcttctctttacttttccactctaggccacgatgccgcagtaccagacctgggaggagttcagccgcgctgccgagaagctttacctcgctgaccctatgaaggcacgtgtggttctcaaatataggcattctgatgggaacttgtgtgttaaagtaacagatgatttagtttgtttggtgtataaaacagaccaagctcaagatgtaaagaagattgagaaattccacagtcaactaatgcgacttatggtagccaaggaagcccgcaatgttaccatggaaactgagtgaatggtttgaaatgaagactttgtcgtgtacttaggaagtaaatatcttttgaattagagaaagtgttgggacagaaagtactttatgtaactaagtgggctgttcagaagcttagaggtcattttttgtaattttctttttaattactttagagagctagggatgcaaatgttttcagttagaaagcctttatttacttttggaaattgaacaagaaatgcatctgtcttagaaactggagattatttgatgttaggtaaaacatgtaattgtttctctggcaaatttgtatcagtaatttgaaaatgagatattaggaaaaaccaattcttcttaaatttagttcatctttctttaaaagaacattaaatgtaaccattttgtcagatccatgtattttggagcataaaatgtatgctgttgtgaccaataaatataaaatatggtaattggaattaactccacaccatagtatgcattgttatacatactgtgtacctaattatgtatagcagtgtagtctcaattatatctgaaagtaattgtgactaacaagtatgctttgccttatttccacatttaaactacctgttaatataagggatttgtagtatcagcttgttgagcaatgactttgaatctagttttcagtgatcagaagcagcagttatttgagtgtatgaatggaatgatgatcactgtgctataatgtactgaaaccaccatattacagaaatatttactacatattttccatctgtagtttctcagaagggctatggattagtttgaactgtcaaatccttgcatacttctgtgacacccctgcccattttctgtctttaattaaccaaggtgttaggtgtgactgtcacaactgttatgttttccagtaaactagaagtacgatatttgataattatatttgtatttcaccacctaaatgtaatgttgattcctcaagaatgaaatgaaggcactacattgaaatatgttttgtataaatttgtcatgttgaacagcattttagcatggtaagttcccttagctatatgaattttggcatgtttcagagagatcagtaaataaaatattagataaaatata

SEQ ID NO: 135489 - DNA, 261 bp, Artificial Sequence
  derived and/or modified sequence
atgccccagtaccagacctgggaggagttcagcagagccgccgagaagctgtacctggccgaccccatgaaggccagagtggtgctgaagtacagacacagcgacggcaacctgtgcgtgaaggtgaccgacgacctggtgtgcctggtgtacaagaccgaccaggcccaggacgtgaagaagatcgagaagttccacagccagctgatgagactgatggtggccaaggaggccagaaacgtgaccatggagaccgagtag

SEQ ID NO: 135490 - protein, 136 aa, Artificial Sequence
  derived and/or modified sequence
MVLLESEQFLTELTRLFQKCRTSGSVYITLKKYDGRTKPIPKKGTVEGFEPADNKCLLRATDGKKKISTVVSSKEVNKFQMAYSNLLRANMDGLKKRDKKNKTKKTKAAAAAAAAAPAAAATAPTTAATTAATAAQ

SEQ ID NO: 135491 - DNA, 1077 bp, Artificial Sequence
  derived and/or modified sequence
ccagcctaggccgaacttccggctctcactgctaggggcttaagcggagggagtcgagccagcgtcgccgcgatggtgttgttggagagcgagcagttcctgacggagctgaccagacttttccagaagtgccggacgtcgggcagcgtctatatcaccttgaagaagtatgacggtcgaaccaaacccattccaaagaagggtactgtggagggctttgagcccgcagacaacaagtgtctgttaagagctaccgatgggaagaagaagatcagcactgtggtgagctccaaggaagtgaataagtttcagatggcttattcaaacctccttagagctaacatggatgggctgaagaagagagacaaaaagaacaaaactaagaagaccaaagcagcagcagcagcagcagcagcagcacctgccgcagcagcaacagcaccaacaacagcagcaacaacagcagcaacagcagcacagtaaagggcatacatttcctgctttcaccaattaaccactgaattgctattttttccttttggccagatagctaggtttctggttcccccacagtaggtgttttcacataagattagggtccttttggaaagaatagttgcagtgtttataggatagttgtggtaagaatctagtttattttgcatttggctaattggtctgtgctgcatggttatatactcctggattatagattaaaagtctctgtagacatctctgtgaagagcaagctatcattaaacatgtctgtttatcagcactgtctctttattcctttcccaacccattttaatagttctggcaataactactaaatctagaatgatgtgattaatgaataggctttagctctataatatcttctaggttattagaattgaaacctgacagttttataaaaagtcatgttatctcatgagctgcttcccacctggctgtataattttatcatcatggttccccagtttcgatgagttctcacagtcaaatgagagtttgtttaaccaccttaggagaaacatactacaaagtcatcaagaataaaggttccaaagtaat

SEQ ID NO: 135492 - DNA, 411 bp, Artificial Sequence
  derived and/or modified sequence
atggtcctcctggaatccgagcagtttctcacagagttaacaagactctttcaaaaatgccgcacgagtggctcagtgtatattaccctcaagaaatacgacggacgaaccaaaccaatacctaagaagggaactgtggaaggattcgagcctgccgataacaaatgcctgctgcgcgctacagatggcaaaaaaaaaatctccacagtagtgagttcaaaggaggtaaataaattccagatggcttattccaacctgctgagagctaacatggatggcttgaagaagagggacaaaaagaacaagacgaagaagaccaaggcggctgcagctgccgcggcagcggctcctgccgccgcagccaccgcgcctacaacagccgctactaccgcggccaccgctgcccagtag

SEQ ID NO: 135493 - DNA, 411 bp, Artificial Sequence
  derived and/or modified sequence
atggtgctgctggagagcgagcagttcctgacagagctgaccaggctcttccagaagtgcaggaccagcggctctgtgtacatcaccctgaagaagtatgatggccgcaccaagcccatccccaagaagggcaccgtggagggctttgagcctgctgacaacaagtgcctgctgcgggccacagatggcaagaagaagatcagcacagtggtgagcagcaaggaggtgaacaagttccagatggcctacagcaacctgctgcgggccaacatggatggcctgaagaagagggacaagaagaacaagaccaagaagaccaaggctgctgctgctgctgctgctgctgccccagctgctgctgccacagcccccaccacagctgccaccacagctgccacagctgcccagtag

SEQ ID NO: 135494 - DNA, 411 bp, Artificial Sequence
  derived and/or modified sequence
atggtgctgctggagagcgagcagttcctgaccgagctgacccggcttttccagaagtgccggacaagcggcagtgtatacataacactcaaaaagtacgacggaagaactaagcccattccgaaaaagggcacagttgaggggttcgagccggcagacaacaaatgcctcctgagggcgaccgatggcaaaaaaaaaatcagtactgtcgtttcctccaaggaggtgaacaagttccaaatggcttattctaacctgttaagagcgaatatggatgggctcaaaaaaagagataaaaagaacaaaactaaaaagactaaggcagcagctgccgcagccgccgcagctccggccgctgccgccactgccccaacaaccgctgctacaactgcagcgaccgccgcacagtag

SEQ ID NO: 135495 - DNA, 411 bp, Artificial Sequence
  derived and/or modified sequence
atggtcctgctggagagcgagcagttcctgacagaactaacgcggctgttccaaaagtgtcgtacgtccggcagcgtgtatatcacactaaagaaatacgacggcaggaccaaaccaatcccgaagaaaggcactgtagagggctttgagcccgcagataataagtgcctgctgcgggctaccgatggaaagaaaaagatcagtacagtggtgtcttctaaggaggtaaataagtttcagatggcttactccaacctcctcagggctaatatggatggccttaaaaaacgggataaaaaaaataaaactaagaaaacaaaggccgctgctgctgcagccgctgccgctcctgccgctgccgcaaccgcccctacaaccgctgcaacgacagccgctaccgcagcccaatag

SEQ ID NO: 135496 - DNA, 411 bp, Artificial Sequence
  derived and/or modified sequence
atggtgctgctggagagcgagcagttcctgaccgagctgaccagactgttccagaagtgcagaaccagcggcagcgtgtacatcaccctgaagaagtacgacggcagaaccaagcccatccccaagaagggcaccgtggagggcttcgagcccgccgacaacaagtgcctgctgagagccaccgacggcaagaagaagatcagcaccgtggtgagcagcaaggaggtgaacaagttccagatggcctacagcaacctgctgagagccaacatggacggcctgaagaagagagacaagaagaacaagaccaagaagaccaaggccgccgccgccgccgccgccgccgcccccgccgccgccgccaccgcccccaccaccgccgccaccaccgccgccaccgccgcccagtag

SEQ ID NO: 135497 - protein, 144 aa, Artificial Sequence
  derived and/or modified sequence
MACAAARSPADQDRFICIYPAYLNNKKTIAEGRRIPISKAVENPTATEIQDVCSAVGLNVFLEKNKMYSREWNRDVQYRGRVRVQLKQEDGSLCLVQFPSRKSVMLYAAEMIPKLKTRTQKTGGADQSLQQGEGSKKGKGKKKK

SEQ ID NO: 135498 - DNA, 435 bp, Artificial Sequence
  derived and/or modified sequence
atggcttgcgccgcagcacgcagtcccgcagaccaagacagattcatctgtatttaccctgcttacttgaataataaaaaaacaatcgctgagggccggagaatcccgatctcaaaagccgtggagaatccaacggcgaccgaaatacaagacgtgtgctctgccgtagggttaaatgtatttctggaaaaaaacaaaatgtattcacgcgagtggaatcgcgatgtgcaatatcgtgggagggtgcgcgtgcaacttaaacaggaggacgggtccctttgtctcgtgcagtttccaagcaggaaaagcgtgatgctctacgccgccgaaatgatacccaagctgaaaacacgcacacagaagactggcggcgccgatcagtcactgcagcagggtgaggggtctaagaaggggaaggggaagaagaagaaatag

SEQ ID NO: 135499 - DNA, 435 bp, Artificial Sequence
  derived and/or modified sequence
atggcctgtgccgccgcccggagccctgctgaccaggaccgcttcatctgcatctacccagcctacctgaacaacaagaagaccatcgccgagggccgccgcatccccatcagcaaggctgtggagaaccccacagccacagagatccaggatgtgtgcagcgctgtgggcctgaatgtgttcctggagaagaacaagatgtacagccgggagtggaacagagatgtgcagtaccggggccgggtgcgggtgcagctgaagcaggaggatggcagcctgtgcctggtgcagttccccagcaggaagtctgtgatgctgtatgctgctgagatgatccccaagctgaagaccaggacccagaagacaggaggagctgaccagagcctgcagcagggcgagggcagcaagaagggcaagggcaagaagaagaagtag

SEQ ID NO: 135500 - DNA, 435 bp, Artificial Sequence
  derived and/or modified sequence
atggcctgcgccgccgcccggagccccgccgaccaggaccggttcatctgcatatatccagcctacctcaataacaaaaaaactattgcagagggtcgccgaatccctatctcaaaggcagtcgagaaccccaccgccaccgaaatccaggacgtatgttctgctgtcggactgaacgtctttttggaaaaaaacaaaatgtacagccgcgagtggaaccgggacgtccagtaccggggtagggtcagggtgcagctgaagcaggaggatggcagtctatgccttgtacagtttccctcaagaaaaagtgtcatgttatatgccgccgaaatgatcccgaagctgaagacgaggactcagaagactggcggcgccgaccaatcactccaacaaggagagggttctaagaaaggcaagggtaaaaagaagaagtag

SEQ ID NO: 135501 - DNA, 435 bp, Artificial Sequence
  derived and/or modified sequence
atggcatgtgccgctgccaggtcccccgcagaccaggacagatttatatgcatctatcccgcatatctcaacaacaagaaaaccattgctgaggggagaagaatccccatctcaaaggctgtggagaaccctaccgccaccgaaatccaggacgtgtgcagtgccgtgggcttaaacgtctttctagaaaagaacaagatgtactcccgtgaatggaaccgagacgtccagtatcgcggaagggtgagggttcaactgaagcaagaagacggaagtctgtgcttggtgcagttcccttccaggaagtctgtaatgctatatgctgcagaaatgattccgaagctgaagacgagaacccagaaaacaggcggagccgatcaaagtctgcagcaaggagaaggctccaaaaagggtaaaggaaaaaagaaaaagtag

SEQ ID NO: 135502 - DNA, 2841 bp, Artificial Sequence
  derived and/or modified sequence
caaacaggcgatgagaaatcgcggacgcggaaccatttcttgggcaggacttccggcggaaaagcgggctgtctcggaaactcagagccgggttcctcccgggtttctgccgggtttctccctgcggctcctgggttgttgagactcttgtgaagatggcttgcgctgccgcgcggtccccggccgaccaggacaggtttatttgtatctatcctgcttatttaaataataagaagaccatcgcagagggaaggcgaatccccataagtaaggctgttgaaaatcctacagctacagagattcaagatgtatgttcagcagttggacttaacgtatttcttgagaaaaataaaatgtactctagagaatggaatcgtgatgtccaatacagaggcagagtccgggtccagctcaaacaggaagatgggagcctctgccttgtacagttcccatcacgtaagtcagtaatgttgtatgcagcagaaatgatacctaaactaaaaacaaggacacaaaaaacaggaggtgctgaccaaagtcttcaacaaggagagggaagtaaaaaagggaaaggaaagaaaaagaagtaacctagtatcagcatcaagtatgtggtactactgtaagagacatgaatggagacttctaatttgtatcggagggaaacagaagctttttgtttgcatcatttaactgaactgtgaacccttgtgcctctcatctttatcatcggagttgacagtgaaacaaatttacatcagaagtttgcatctcgcgtatatgccgtataaaagaatttttttgtctttcaatgcagttttttggaagaaaatatttttaaatggacaatggactgtacaataagttacttgaaataagttgtttcagataaatttcaattagatttaaaataaacattttgtccaccttttaagttaatgaaataaaatttgaaactgacttttgcagcttttgcttatatactaatgctaggagaggagggataattaagaataaaatatgtagtgaaagtttccatagtgtgaggctaaaactagaagaaactgtggtaggtccttttgtgggtgggggacaggggagtctgtaaaaagccagtctgtagatgatattttaatatattattgtaatcgaatcgttcagttgttttttgacatggaaagtcctggattttaagctttaaatttgcttattttgtaggtttaagaacatgattttcatgggagttgtaaaattaactgtgctttagcaccttgaggtacactttccttcaacaaatgaaattggattggtgctccagaatttcagagcggtttctgaaagtagtgattttgagctatcccaattcctgttcttcctgaggcctggtttagctcttccttgaattctgcaagctatctcatattttcagtaaattccattttttttaagtttgtttgtttgtttgtttttgagatggagtttcactcttgttgcctaggctggagtgcaatggcacgatatcggcgtaccacaacctctgcatcccaggttcaagagattctcctgcctcagcctccctaggagctgggattacaggcatgtgccaccacacccggctaattttgtatttttagtagagacagggtttttccatgttggtcaggctggtctcgaactcccgacctcaggtgatctgcccacctcagcctcccaaagtgctgggattacaggcatgagccaccgtgcccggccttctttacatttttattgctcacagtcaaacattcctattgattgtaaaataagcaaacctagagttgtggagatttatatgtatttatttatttgaattgagacagggtcttaaactcccaggctcaagtgatcctcctgcctcaacctcccaaagtgctgggattacaggcatgagctagctggcctgttgactttttttttttaactctaacaatttctgttttatagtgaacataatagtataagacttagtttatatatttgacttacaaataaatcctggggagaggggagtatgtgtaaaacataattcagagcagccttctttgagaaagtgggtgtgtttggctgtgtaacaaaacaataaggggatgtgtttgctgtgtaacaaaacaatgaaggatttaagcaggatatttttgcctcatatgttaaatccaagtgaggttgctgtggtggttggtttagctctcagtgatgccttttttgtatttttccgctctgctgtccatgacatatttctaacacctttatgattattgttcctgcttgtaaaagggctgatatttacatgagtgcaaggcaggaagaaaaggtagctgtgccagccacttctggcaagcagttctcccaccttagcctcccaagtagctgagaccataggcatgagatttctcaaaattcctcccagcaggctttcacttagtttcattgttgagaactgtgacaggtccatctctagctgcaaaggaggctgagaaagtgaacacagcagtcctccttatccttggggaatacattccaagagtggatccctgaaacagcagatagtactgaaccctatatatactatgtttttgcctatgtatatatacttgatatggtttggctgctacccaacccaaaatctcatcttgaattataatccccaaatccctatgtgttaagggtgggaccaggtggagataattggatcatgggggcaatttcccctgtgctgttcttgagataatgagtgactctcaggagatctgttggttttataagtgcctggcgtttcccctgcttgcagtcactccatcttgc

SEQ ID NO: 135503 - DNA, 660 bp, Artificial Sequence
  derived and/or modified sequence
cgggttcctcccgggtttctgccgggtttctccctgcggctcctgggttgttgagactcttgtgaagatggcttgcgctgccgcgcggtccccggccgaccaggacaggctgttgaaaatcctacagctacagagattcaagatgtatgttcagcagttggacttaacgtatttcttgagaaaaataaaatgtactctagagaatggaatcgtgatgtccaatacagaggcagagtccgggtccagctcaaacaggaagatgggagcctctgccttgtacagttcccatcacgtaagtcagtaatgttgtatgcagcagaaatgatacctaaactaaaaacaaggacacaaaaaacaggaggtgctgaccaaagtcttcaacaaggagagggaagtaaaaaagggaaaggaaagaaaaagaagtaacctagtatcagcatcaagtatgtggtactactgtaagagacatgaatggagacttctaatttgtatcggagggaaacagaagctttttgtttgcatcatttaactgaactgtgaacccttgtgcctctcatctttatcatcggagttgacagtgaaacaaatttacatcagaagtttgcatctcgcgtatatgccgtataaaagaatttttttgtctttcaatgcagttttttg

SEQ ID NO: 135504 - DNA, 435 bp, Artificial Sequence
  derived and/or modified sequence
atggcctgcgccgccgccagaagccccgccgaccaggacagattcatctgcatctaccccgcctacctgaacaacaagaagaccatcgccgagggcagaagaatccccatcagcaaggccgtggagaaccccaccgccaccgagatccaggacgtgtgcagcgccgtgggcctgaacgtgttcctggagaagaacaagatgtacagcagagagtggaacagagacgtgcagtacagaggcagagtgagagtgcagctgaagcaggaggacggcagcctgtgcctggtgcagttccccagcagaaagagcgtgatgctgtacgccgccgagatgatccccaagctgaagaccagaacccagaagaccggcggcgccgaccagagcctgcagcagggcgagggcagcaagaagggcaagggcaagaagaagaagtag

SEQ ID NO: 135505 - protein, 547 aa, Artificial Sequence
  derived and/or modified sequence
MKVVKSAEHYTETALDEIRLLKSVRNSDPNDPNREMVVQLLDDFKISGVNGTHICMVFEVLGHHLLKWIIKSNYQGLPLPCVKKIIQQVLQGLDYLHTKCRIIHTDIKPENILLSVNEQYIRRLAAEATEWQRSGAPPPSGSAVSTAPQPKPADKMSKNKKKKLKKKQKRQAELLEKRMQEIEEMEKESGPGQKRPNKQEESESPVERPLKENPPNKMTQEKLEESSTIGQDQTLMERDTEGGAAEINCNGVIEVINYTQNSNNETLRHKEDLHNANDCDVQNLNQESSFLSSQNGDSSTSQETDSCTPITSEVSDTMVCQSSSTVGQSFSEQHISQLQESIRAEIPCEDEQEQEHNGPLDNKGKSTAGNFLVNPLEPKNAEKLKVKIADLGNACWHKHFTEDIQTRQYRSLEVLIGSGYNTPADIWSTACMAFELATGDYLFEPHSGEEYTRDEDHIVHIIELIGRIPRRFSLSGKYSQDFFSHRGDLKHITKLKPWGLFEVLVEKYEWSQEEAAGFTDFLLPMLELIPEKRATAAECLRHPWLNS

SEQ ID NO: 135506 - protein, 655 aa, Artificial Sequence
  derived and/or modified sequence
MERKVLALQARKKRTKAKKDKAQRKSETQHRGSAPHSESDLPEQEEEILGSDDDEQEDPNDYCKGGYHLVKIGDLFNGRYHVIRKLGWGHFSTVWLSWDIQGKKFVAMKVVKSAEHYTETALDEIRLLKSVRNSDPNDPNREMVVQLLDDFKISGVNGTHICMVFEVLGHHLLKWIIKSNYQGLPLPCVKKIIQQVLQGLDYLHTKCRIIHTDIKPENILLSVNEQYIRRLAAEATEWQRSGAPPPSGSAVSTAPQPKPADKMSKNKKKKLKKKQKRQAELLEKRMQEIEEMEKESGPGQKRPNKQEESESPVERPLKENPPNKMTQEKLEESSTIGQDQTLMERDTEGGAAEINCNGVIEVINYTQNSNNETLRHKEDLHNANDCDVQNLNQESSFLSSQNGDSSTSQETDSCTPITSEVSDTMVCQSSSTVGQSFSEQHISQLQESIRAEIPCEDEQEQEHNGPLDNKGKSTAGNFLVNPLEPKNAEKLKVKIADLGNACWVHKHFTEDIQTRQYRSLEVLIGSGYNTPADIWSTACMAFELATGDYLFEPHSGEEYTRDEDHIALIIELLGKVPRKLIVAGKYSKEFFTKKGDLKHITKLKPWGLFEVLVEKYEWSQEEAAGFTDFLLPMLELIPEKRATAAECLRHPWLNS

SEQ ID NO: 135507 - DNA, 1644 bp, Artificial Sequence
  derived and/or modified sequence
atgaaggtggtgaagagcgccgagcactacaccgagaccgccctggacgagatcagactgctgaagagcgtgagaaacagcgaccccaacgaccccaacagagagatggtggtgcagctgctggacgacttcaagatcagcggcgtgaacggcacccacatctgcatggtgttcgaggtgctgggccaccacctgctgaagtggatcatcaagagcaactaccagggcctgcccctgccctgcgtgaagaagatcatccagcaggtgctgcagggcctggactacctgcacaccaagtgcagaatcatccacaccgacatcaagcccgagaacatcctgctgagcgtgaacgagcagtacatcagaagactggccgccgaggccaccgagtggcagagaagcggcgcccccccccccagcggcagcgccgtgagcaccgccccccagcccaagcccgccgacaagatgagcaagaacaagaagaagaagctgaagaagaagcagaagagacaggccgagctgctggagaagagaatgcaggagatcgaggagatggagaaggagagcggccccggccagaagagacccaacaagcaggaggagagcgagagccccgtggagagacccctgaaggagaacccccccaacaagatgacccaggagaagctggaggagagcagcaccatcggccaggaccagaccctgatggagagagacaccgagggcggcgccgccgagatcaactgcaacggcgtgatcgaggtgatcaactacacccagaacagcaacaacgagaccctgagacacaaggaggacctgcacaacgccaacgactgcgacgtgcagaacctgaaccaggagagcagcttcctgagcagccagaacggcgacagcagcaccagccaggagaccgacagctgcacccccatcaccagcgaggtgagcgacaccatggtgtgccagagcagcagcaccgtgggccagagcttcagcgagcagcacatcagccagctgcaggagagcatcagagccgagatcccctgcgaggacgagcaggagcaggagcacaacggccccctggacaacaagggcaagagcaccgccggcaacttcctggtgaaccccctggagcccaagaacgccgagaagctgaaggtgaagatcgccgacctgggcaacgcctgctggcacaagcacttcaccgaggacatccagaccagacagtacagaagcctggaggtgctgatcggcagcggctacaacacccccgccgacatctggagcaccgcctgcatggccttcgagctggccaccggcgactacctgttcgagccccacagcggcgaggagtacaccagagacgaggaccacatcgtgcacatcatcgagctgatcggcagaatccccagaagattcagcctgagcggcaagtacagccaggacttcttcagccacagaggcgacctgaagcacatcaccaagctgaagccctggggcctgttcgaggtgctggtggagaagtacgagtggagccaggaggaggccgccggcttcaccgacttcctgctgcccatgctggagctgatccccgagaagagagccaccgccgccgagtgcctgagacacccctggctgaacagctag

SEQ ID NO: 135508 - DNA, 1968 bp, Artificial Sequence
  derived and/or modified sequence
atggagagaaaggtgctggccctgcaggccagaaagaagagaaccaaggccaagaaggacaaggcccagagaaagagcgagacccagcacagaggcagcgccccccacagcgagagcgacctgcccgagcaggaggaggagatcctgggcagcgacgacgacgagcaggaggaccccaacgactactgcaagggcggctaccacctggtgaagatcggcgacctgttcaacggcagataccacgtgatcagaaagctgggctggggccacttcagcaccgtgtggctgagctgggacatccagggcaagaagttcgtggccatgaaggtggtgaagagcgccgagcactacaccgagaccgccctggacgagatcagactgctgaagagcgtgagaaacagcgaccccaacgaccccaacagagagatggtggtgcagctgctggacgacttcaagatcagcggcgtgaacggcacccacatctgcatggtgttcgaggtgctgggccaccacctgctgaagtggatcatcaagagcaactaccagggcctgcccctgccctgcgtgaagaagatcatccagcaggtgctgcagggcctggactacctgcacaccaagtgcagaatcatccacaccgacatcaagcccgagaacatcctgctgagcgtgaacgagcagtacatcagaagactggccgccgaggccaccgagtggcagagaagcggcgcccccccccccagcggcagcgccgtgagcaccgccccccagcccaagcccgccgacaagatgagcaagaacaagaagaagaagctgaagaagaagcagaagagacaggccgagctgctggagaagagaatgcaggagatcgaggagatggagaaggagagcggccccggccagaagagacccaacaagcaggaggagagcgagagccccgtggagagacccctgaaggagaacccccccaacaagatgacccaggagaagctggaggagagcagcaccatcggccaggaccagaccctgatggagagagacaccgagggcggcgccgccgagatcaactgcaacggcgtgatcgaggtgatcaactacacccagaacagcaacaacgagaccctgagacacaaggaggacctgcacaacgccaacgactgcgacgtgcagaacctgaaccaggagagcagcttcctgagcagccagaacggcgacagcagcaccagccaggagaccgacagctgcacccccatcaccagcgaggtgagcgacaccatggtgtgccagagcagcagcaccgtgggccagagcttcagcgagcagcacatcagccagctgcaggagagcatcagagccgagatcccctgcgaggacgagcaggagcaggagcacaacggccccctggacaacaagggcaagagcaccgccggcaacttcctggtgaaccccctggagcccaagaacgccgagaagctgaaggtgaagatcgccgacctgggcaacgcctgctgggtgcacaagcacttcaccgaggacatccagaccagacagtacagaagcctggaggtgctgatcggcagcggctacaacacccccgccgacatctggagcaccgcctgcatggccttcgagctggccaccggcgactacctgttcgagccccacagcggcgaggagtacaccagagacgaggaccacatcgccctgatcatcgagctgctgggcaaggtgcccagaaagctgatcgtggccggcaagtacagcaaggagttcttcaccaagaagggcgacctgaagcacatcaccaagctgaagccctggggcctgttcgaggtgctggtggagaagtacgagtggagccaggaggaggccgccggcttcaccgacttcctgctgcccatgctggagctgatccccgagaagagagccaccgccgccgagtgcctgagacacccctggctgaacagctag

SEQ ID NO: 135509 - DNA, 1644 bp, Artificial Sequence
  derived and/or modified sequence
atgaaggtcgtgaaatccgcggaacactacacagagacagctttagacgaaattagactgcttaaatctgtgaggaacagcgatccaaacgatccaaatcgtgaaatggtggttcagctgctggacgactttaaaattagcggcgtcaacggcacgcatatatgtatggtcttcgaagtcttggggcaccacctactgaagtggattataaagagtaactaccagggtctccctctgccttgcgtgaaaaagatcattcagcaggttttacagggattagactacctgcacacgaagtgcagaatcattcatacggacatcaagccggagaacatcctgctatctgtaaatgaacagtacatcaggaggttagccgccgaggctaccgagtggcaacgtagtggcgcgcctccaccatcaggctcagccgtcagcacagccccccagccgaagccagctgataaaatgagcaaaaataagaagaagaagctcaagaaaaagcagaaacgccaggcggagttactcgagaagcgcatgcaggagattgaagaaatggagaaggagagcggaccgggtcagaaaagaccaaataagcaggaagagtccgaatcccctgtagagcggcctctcaaggaaaatcctccaaacaaaatgacgcaagaaaagcttgaagaatcaagcacgatcggccaggatcagacactgatggaacgggataccgagggaggcgcagcagagatcaactgcaacggggtgatcgaagtgataaattacacacagaactccaacaacgagacactgcggcataaagaggacctgcataacgcgaatgactgcgacgtgcagaacctgaaccaggaaagctcgtttctttccagccagaatggggactcaagtacatctcaagagacggactcctgtacccctatcactagcgaggtgtcggacacgatggtgtgccaaagcagtagcaccgtaggtcaatctttttctgaacagcacatcagccagcttcaggagagcattagagcagaaattccctgtgaggacgagcaggagcaggagcataatggaccacttgataacaaggggaagagtaccgcagggaattttcttgtaaaccctctcgagcccaagaatgccgagaaacttaaggtcaagatcgctgacctgggaaacgcctgctggcataagcatttcactgaggatatccagacaagacaatacagaagtctcgaggtgctgatcgggtccggctacaacactcccgccgacatttggtccacagcatgcatggcttttgagttggctacaggagactatctgttcgaaccgcatagtggcgaggagtacactcgcgatgaagatcacatcgtccatatcatcgagctcattggacgtatcccaagaaggtttagcctctcgggtaagtactcccaggatttcttttcacaccgtggcgatttgaagcacataaccaagctaaagccttggggcctatttgaggtcctcgtcgagaagtacgagtggtctcaggaggaggcagctgggtttaccgacttccttctcccaatgctcgaactaatacctgaaaaaagggccaccgccgctgagtgtttgaggcatccatggctaaactcctag

SEQ ID NO: 135510 - DNA, 1968 bp, Artificial Sequence
  derived and/or modified sequence
atggaacgaaaggtcctggcccttcaggcacggaagaagcgcaccaaggccaaaaaggacaaggcccagcggaagtcggaaacacaacaccgcggatcagccccacattctgaaagcgacctgcctgagcaagaggaggaaatcctaggctccgatgacgacgagcaagaagaccccaatgactattgcaagggaggctaccatctcgttaagatcggcgacctttttaacggccgctaccacgtcatcagaaaattaggttggggccacttctccactgtatggctgagttgggacatccagggtaagaagtttgtggcgatgaaagttgtgaagagcgccgagcactatacagagactgctctggatgagatcaggctgctcaagtcagtgcgtaacagcgaccccaatgatcctaacagggaaatggtggtccaactgctggacgattttaaaatctccggggtcaacggtacccatatctgcatggtctttgaagtgcttggccatcatcttctgaagtggatcattaagagcaattatcaaggtctgccacttccttgcgtgaagaaaattatccaacaggttctccagggtctggattacctacatacgaagtgccgaataatccacactgatattaaacccgagaacatacttctgagcgtcaacgaacagtatattcgacgcctggctgctgaagcgaccgagtggcagcgcagtggggcccctcccccctccgggagcgccgtctccactgcaccccaacctaagccagcggacaagatgagcaaaaacaagaaaaagaaactcaagaaaaagcaaaaacgacaggcagaactgctggaaaaacgcatgcaggagatcgaggaaatggaaaaagaatctggtccaggacaaaagcgaccgaacaaacaagaggagtctgagtctcccgtcgagcgtccgctcaaggagaaccctcctaacaaaatgacacaagaaaagcttgaggagtcctccacgataggtcaggaccagaccttgatggagagagatacagaggggggcgctgccgagattaactgcaacggagtgattgaagtaatcaattatacacagaacagcaataatgaaacgcttcggcacaaggaggaccttcacaatgccaatgactgcgatgttcaaaatctaaaccaggagtcatccttcctgagttcccaaaatggggatagtagcacgagtcaagagaccgactcctgcacacccatcacatcagaagtgagcgacacgatggtttgccagtccagttctaccgttggtcagtcattttccgaacaacatatctctcaactccaagagagcataagggccgagattccctgtgaagatgaacaggagcaggaacacaacggtcctttggataataaagggaaatccaccgccggtaattttctggttaatcctctcgaaccaaagaacgcagaaaaacttaaggttaagatagcagacctcggaaacgcctgttgggtccataagcacttcacagaggacattcagactcggcaatatcggtcccttgaggtgctgatcggctccggctataacactcccgctgacatatggtccacagcatgtatggcattcgaattagccactggcgactacctgtttgaaccacactcaggagaggagtacactcgggacgaggaccatatcgcactgattattgaactactcggcaaagtaccccgcaagctcattgtcgccggaaaatacagcaaggaattcttcactaagaaaggggacctgaagcatataaccaagttgaaaccatggggcctgttcgaagtgctggtggaaaaatatgagtggtcccaagaagaagctgcagggtttactgatttcctcctcccaatgttagaattaatccctgagaagagggcaactgccgcagaatgtctgaggcacccatggttaaacagctag

SEQ ID NO: 135511 - DNA, 4358 bp, Artificial Sequence
  derived and/or modified sequence
tcgtggggcgggggtggggcgggactgagggcggagtgtgagcgggctcggttttgggccgcggcgggagcgggagtcgccgccactcgagtgcgcaggcgcctggcgattaccggtctcaccatggagcggaaagtgcttgcgctccaggcccgaaagaaaaggaccaaggccaagaaggacaaagcccaaaggaaatctgaaactcagcaccgaggctctgctccccactctgagagtgatctaccagagcaggaagaggagattctgggatctgatgatgatgagcaagaagatcctaatgattattgtaaaggaggttatcatcttgtgaaaattggagatctattcaatgggagataccatgtgatccgaaagttaggctggggacacttttcaacagtatggttatcatgggatattcaggggaagaaatttgtggcaatgaaagtagttaaaagtgctgaacattacactgaaacagcactagatgaaatccggttgctgaagtcagttcgcaattcagaccctaatgatccaaatagagaaatggttgttcaactactagatgactttaaaatatcaggagttaatggaacacatatctgcatggtatttgaagttttggggcatcatctgctcaagtggatcatcaaatccaattatcaggggcttccactgccttgtgtcaaaaaaattattcagcaagtgttacagggtcttgattatttacataccaagtgccgtatcatccacactgacattaaaccagagaacatcttattgtcagtgaatgagcagtacattcggaggctggctgcagaagcaacagaatggcagcgatctggagctcctccgccttccggatctgcagtcagtactgctccccagcctaaaccagctgacaaaatgtcaaagaataagaagaagaaattgaagaagaagcagaagcgccaggcagaattactagagaagcgaatgcaggaaattgaggaaatggagaaagagtcgggccctgggcaaaaaagaccaaacaagcaagaagaatcagagagtcctgttgaaagacccttgaaagagaacccacctaataaaatgacccaagaaaaacttgaagagtcaagtaccattggccaggatcaaacgcttatggaacgtgatacagagggtggtgcagcagaaattaattgcaatggagtgattgaagtcattaattatactcagaacagtaataatgaaacattgagacataaagaggatctacataatgctaatgactgtgatgtccaaaatttgaatcaggaatctagtttcctaagctcccaaaatggagacagcagcacatctcaagaaacagactcttgtacacctataacatctgaggtgtcagacaccatggtgtgccagtcttcctcaactgtaggtcagtcattcagtgaacaacacattagccaacttcaagaaagcattcgggcagagataccctgtgaagatgaacaagagcaagaacataacggaccactggacaacaaaggaaaatccacggctggaaattttcttgttaatccccttgagccaaaaaatgcagaaaagctcaaggtgaagattgctgaccttggaaatgcttgttggcacaaacatttcactgaagatattcaaacaaggcaatatcgttccttggaagttctaatcggatctggctataatacccctgctgacatttggagcacggcatgcatggcctttgaactggccacaggtgactatttgtttgaacctcattcaggggaagagtacactcgagatgaagaccacattgtgcacattatagagctgataggcagaattccaagacgcttttccctcagtgggaaatattcacaagacttcttcagtcacagaggtgacctgaaacatatcacgaagctgaaaccttggggcctttttgaggttctagtggagaagtatgagtggtcgcaggaagaggcagctggcttcacagatttcttactgcccatgttggagctgatccctgagaagagagccactgccgccgagtgtctccggcacccttggcttaactcctaagcccctgcccagcaccacagcagagatcacacactgaccctccgcccttccccttcaagcattttcctcttcccttttcagggtgaagctcttccttcaagagtttctagatcttgttttttttttaatccaacatgttcatttgggtttgcttacttgaccctgtggagatccccacagccattgggcatcctaggtgaatttggccttggttgggctctgccaaagactaatggactaaaatgtgaaacagcctcttgccctgtacctttccttcccattaggacatcctttaaattataagcatcctttttgaaaagagctatgaaggtgtatgagcccatccttttattcattgactctaagagtcaaattttctagtgcatatcctattgccagcataaggatgaggagggggaaagggtcttaattctatgtacagcagagacattaaacttgctgtgtccgggctgcatcatcttcctggactgtttctgttgttctctgtgttcacattttttcctgcaacttttaagctactgtcttttttaaatagctatatgaacaccaaatttgggtaccattttatcactgttcaaagcactgtcaaattcctttcatcctttaatagttaagatctttgaatcttcagtctgatttttaatgtaagcaaaaacagaaccattgaatagtaatttcttgagaacctcaggtgttctataaacagtcctttcctgtatgtcttctattaccctaagaccagagttattttggttggttgttttgttttattttttgtttttgtatccatggctggcactttactcattgcacttgagtttattgccccataactaaaggatcaggatgatggtagaacggagatctgggtttcagagctttcccatttaagaaaaatagatcttgagattctgattcttttccaaacagtcccctgctttcatgtacagctttttctttaccttacccaaaattctggccttgaagcagttttcctctatggctttgcctttctgattttctcagaggctcgagtctttaatataaccccaaatgaaagaaccaaggggaggggtgggatggcacttttttttgttggtcttgttttgttttgttttttggttggttggttcgttattttttaagattagccattctctgctgctatttccctacataatgtcaatttttaaccataattttgacatgattgagatgtacttgaggcttttttgttttaattgagaaaagactttgcaattttttttttaggatgagcctctcctagacttgacctagaatattacatattcctccagtaagtaatactgaagagcaaaagagaggcaggattggggtcacagccgcttcttcagcatggaccaagtgggccttggggattgcagcgttctcgaagtggctgtaggactcgaatttacagaaagccacagaggtgcaacttgaggctctgctagcaagccaccagtgaggctattgggtaaccacctttctatacaggagattggaatctactttgtcatttatccaccacagtgacaaaggaaaagtggtgccgttatgcaatccatttaactcataaacatattactctgagtaactggccagccattcatcggatccttcattgggtactcctgaaatcagacatgttcctgtagaaagaattttaagttaggctttctatgcacctatcaagaatcaagagaatagattgtatcaaacaacggcagggaaatccttcagcaattctaatccactttgggttttcagctgtttttacatctaaagcaatagactagaactgaattatcttctacatagtaaaatcacaattgtggaattacaggaattctggtgatattaaggtgaaataacaaaacacaaaaggccctattttaacagttgatgtgacagtaagttttaatagaacctgtaacttcattttggaaatgcttctccaccaaataagggctttttcccctatttaaggagccagatggattgaaagatgtggaaataggcagctgtagatcttgatcttccaggtaccccatgtacctttattgagcttaattataatactgtcaaattgccacgatctcactaaaggatttctatttgctgtcagttaaaaataaagccctaaatacatttttattctttctactgagggcattgtctgttttctttgtaaatgccgtacaataaacaaattatttaataaccta

SEQ ID NO: 135512 - DNA, 4592 bp, Artificial Sequence
  derived and/or modified sequence
aaatagaacaaaactaaccttgccaggtttccaagcttggatctctaacactccttcaacgttcaccccggcgttcctccccgctgcgccccctccctctccttgccgccccctcctcgggagcaggtggtaggctccgcgcccaacgcgcaagcgcgcggcatcgtggggcgggggtggggcgggactgagggcggagtgtgagcgggctcggttttgggccgcggcgggagcgggagtcgccgccactcgagtgcgcaggcgcctggcgattaccggtctcaccatggagcggaaagtgcttgcgctccaggcccgaaagaaaaggaccaaggccaagaaggacaaagcccaaaggaaatctgaaactcagcaccgaggctctgctccccactctgagagtgatctaccagagcaggaagaggagattctgggatctgatgatgatgagcaagaagatcctaatgattattgtaaaggaggttatcatcttgtgaaaattggagatctattcaatgggagataccatgtgatccgaaagttaggctggggacacttttcaacagtatggttatcatgggatattcaggggaagaaatttgtggcaatgaaagtagttaaaagtgctgaacattacactgaaacagcactagatgaaatccggttgctgaagtcagttcgcaattcagaccctaatgatccaaatagagaaatggttgttcaactactagatgactttaaaatatcaggagttaatggaacacatatctgcatggtatttgaagttttggggcatcatctgctcaagtggatcatcaaatccaattatcaggggcttccactgccttgtgtcaaaaaaattattcagcaagtgttacagggtcttgattatttacataccaagtgccgtatcatccacactgacattaaaccagagaacatcttattgtcagtgaatgagcagtacattcggaggctggctgcagaagcaacagaatggcagcgatctggagctcctccgccttccggatctgcagtcagtactgctccccagcctaaaccagctgacaaaatgtcaaagaataagaagaagaaattgaagaagaagcagaagcgccaggcagaattactagagaagcgaatgcaggaaattgaggaaatggagaaagagtcgggccctgggcaaaaaagaccaaacaagcaagaagaatcagagagtcctgttgaaagacccttgaaagagaacccacctaataaaatgacccaagaaaaacttgaagagtcaagtaccattggccaggatcaaacgcttatggaacgtgatacagagggtggtgcagcagaaattaattgcaatggagtgattgaagtcattaattatactcagaacagtaataatgaaacattgagacataaagaggatctacataatgctaatgactgtgatgtccaaaatttgaatcaggaatctagtttcctaagctcccaaaatggagacagcagcacatctcaagaaacagactcttgtacacctataacatctgaggtgtcagacaccatggtgtgccagtcttcctcaactgtaggtcagtcattcagtgaacaacacattagccaacttcaagaaagcattcgggcagagataccctgtgaagatgaacaagagcaagaacataacggaccactggacaacaaaggaaaatccacggctggaaattttcttgttaatccccttgagccaaaaaatgcagaaaagctcaaggtgaagattgctgaccttggaaatgcttgttgggtgcacaaacatttcactgaagatattcaaacaaggcaatatcgttccttggaagttctaatcggatctggctataatacccctgctgacatttggagcacggcatgcatggcctttgaactggccacaggtgactatttgtttgaacctcattcaggggaagagtacactcgagatgaagatcacattgcattgatcatagaacttctggggaaggtgcctcgcaagctcattgtggcaggaaaatattccaaggaatttttcaccaaaaaaggtgacctgaaacatatcacgaagctgaaaccttggggcctttttgaggttctagtggagaagtatgagtggtcgcaggaagaggcagctggcttcacagatttcttactgcccatgttggagctgatccctgagaagagagccactgccgccgagtgtctccggcacccttggcttaactcctaagcccctgcccagcaccacagcagagatcacacactgaccctccgcccttccccttcaagcattttcctcttcccttttcagggtgaagctcttccttcaagagtttctagatcttgttttttttttaatccaacatgttcatttgggtttgcttacttgaccctgtggagatccccacagccattgggcatcctaggtgaatttggccttggttgggctctgccaaagactaatggactaaaatgtgaaacagcctcttgccctgtacctttccttcccattaggacatcctttaaattataagcatcctttttgaaaagagctatgaaggtgtatgagcccatccttttattcattgactctaagagtcaaattttctagtgcatatcctattgccagcataaggatgaggagggggaaagggtcttaattctatgtacagcagagacattaaacttgctgtgtccgggctgcatcatcttcctggactgtttctgttgttctctgtgttcacattttttcctgcaacttttaagctactgtcttttttaaatagctatatgaacaccaaatttgggtaccattttatcactgttcaaagcactgtcaaattcctttcatcctttaatagttaagatctttgaatcttcagtctgatttttaatgtaagcaaaaacagaaccattgaatagtaatttcttgagaacctcaggtgttctataaacagtcctttcctgtatgtcttctattaccctaagaccagagttattttggttggttgttttgttttattttttgtttttgtatccatggctggcactttactcattgcacttgagtttattgccccataactaaaggatcaggatgatggtagaacggagatctgggtttcagagctttcccatttaagaaaaatagatcttgagattctgattcttttccaaacagtcccctgctttcatgtacagctttttctttaccttacccaaaattctggccttgaagcagttttcctctatggctttgcctttctgattttctcagaggctcgagtctttaatataaccccaaatgaaagaaccaaggggaggggtgggatggcacttttttttgttggtcttgttttgttttgttttttggttggttggttcgttattttttaagattagccattctctgctgctatttccctacataatgtcaatttttaaccataattttgacatgattgagatgtacttgaggcttttttgttttaattgagaaaagactttgcaattttttttttaggatgagcctctcctagacttgacctagaatattacatattcctccagtaagtaatactgaagagcaaaagagaggcaggattggggtcacagccgcttcttcagcatggaccaagtgggccttggggattgcagcgttctcgaagtggctgtaggactcgaatttacagaaagccacagaggtgcaacttgaggctctgctagcaagccaccagtgaggctattgggtaaccacctttctatacaggagattggaatctactttgtcatttatccaccacagtgacaaaggaaaagtggtgccgttatgcaatccatttaactcataaacatattactctgagtaactggccagccattcatcggatccttcattgggtactcctgaaatcagacatgttcctgtagaaagaattttaagttaggctttctatgcacctatcaagaatcaagagaatagattgtatcaaacaacggcagggaaatccttcagcaattctaatccactttgggttttcagctgtttttacatctaaagcaatagactagaactgaattatcttctacatagtaaaatcacaattgtggaattacaggaattctggtgatattaaggtgaaataacaaaacacaaaaggccctattttaacagttgatgtgacagtaagttttaatagaacctgtaacttcattttggaaatgcttctccaccaaataagggctttttcccctatttaaggagccagatggattgaaagatgtggaaataggcagctgtagatcttgatcttccaggtaccccatgtacctttattgagcttaattataatactgtcaaattgccacgatctcactaaaggatttctatttgctgtcagttaaaaataaagccctaaatacatttttattctttctactgagggcattgtctgttttctttgtaaatgccgtacaataaacaaattatttaataacctacatgtttccaaaaatctctgttcatttgttgtccaaattgctctgccctgagtaaaaggaggaaaaga

SEQ ID NO: 135513 - DNA, 1644 bp, Artificial Sequence
  derived and/or modified sequence
atgaaggtggtgaagtctgctgagcactacacagaaacagccctggatgagatccggctgctgaagtctgtgaggaacagcgaccccaatgaccccaaccgggagatggtggtgcagctgctggatgacttcaagatctctggagtgaatggcacccacatctgcatggtgtttgaggtgctgggccaccacctgctgaagtggatcatcaagagcaactaccagggcctgcccctgccctgtgtgaagaagatcatccagcaggtgctgcagggcctggactacctgcacaccaagtgccgcatcatccacacagacatcaagccagagaacatcctgctgtctgtgaatgagcagtacatccggcggctggccgctgaggccacagagtggcagaggtctggggcccccccacccagcggcagcgctgtgtccacagccccccagcccaagccagctgacaagatgagcaagaacaagaagaagaagctgaagaagaagcagaagaggcaggccgagctgctggagaagaggatgcaggagattgaggagatggagaaggagagcggccctggccagaagaggcccaacaagcaggaggagagcgagagccctgtggagcggcccctgaaggagaacccccccaacaagatgacccaggagaagctggaggagagcagcaccatcggccaggaccagaccctgatggagcgggacacagagggcggcgctgctgagatcaactgcaatggagtgattgaagtcatcaactacacccagaacagcaacaatgagaccctgcggcacaaggaggacctgcacaatgccaatgactgtgatgtgcagaacctgaaccaggagagcagcttcctgagcagccagaatggagacagcagcaccagccaggagacagacagctgcacccccatcaccagcgaggtgtctgacaccatggtgtgccagagcagcagcacagtgggccagagcttcagcgagcagcacatcagccagctgcaggagagcatccgggcagagatcccctgtgaagatgagcaggagcaggagcacaacggccccctggacaacaagggcaagagcacagctggcaacttcctggtgaaccccctggagcccaagaatgctgagaagctgaaggtgaagattgctgacctgggcaatgcctgctggcacaagcacttcacagaggacatccagacccggcagtaccgcagcctggaggtgctgattggcagcggctacaacaccccagctgacatctggagcacagcctgcatggcctttgagctggccaccggggactacctgtttgagccccacagcggggaggagtacaccagagatgaggaccacatcgtgcacatcatcgagctgattggccgcatcccccggcgcttcagcctgagcggcaagtacagccaggacttcttcagccacagaggagacctgaagcacatcaccaagctgaagccctggggcctgtttgaggtgctggtggagaagtatgagtggagccaggaggaggccgccggcttcacagacttcctgctgcccatgctggagctgatccctgagaagagggccacagctgctgagtgcctgcggcacccctggctgaacagctag

SEQ ID NO: 135514 - DNA, 1968 bp, Artificial Sequence
  derived and/or modified sequence
atggagaggaaggtgctggccctgcaggccaggaagaagaggaccaaggccaagaaggacaaggcccagaggaagtctgagacccagcaccggggcagcgccccccacagcgagagtgacctgcctgagcaggaggaggagatcctgggcagtgatgatgatgagcaggaggaccccaatgactactgcaagggcggctaccacctggtgaagatcggggacctcttcaacggccgctaccacgtgatcaggaagctgggctggggccacttcagcacagtgtggctgtcctgggacatccagggcaagaagtttgtggccatgaaggtggtgaagtctgctgagcactacacagaaacagccctggatgagatccggctgctgaagtctgtgaggaacagcgaccccaatgaccccaaccgggagatggtggtgcagctgctggatgacttcaagatcagcggcgtgaatggcacccacatctgcatggtgtttgaggtgctgggccaccacctgctgaagtggatcatcaagagcaactaccagggcctgcccctgccctgtgtgaagaagatcatccagcaggtgctgcagggcctggactacctgcacaccaagtgccgcatcatccacacagacatcaagccagagaacatcctgctgtctgtgaatgagcagtacatccggcggctggccgctgaggccacagagtggcagaggtctggggcccctcctccttctggcagcgctgtgtccacagccccccagcccaagccagctgacaagatgagcaagaacaagaagaagaagctgaagaagaagcagaagaggcaggccgagctgctggagaagaggatgcaggagattgaggagatggagaaggagagcggccctggccagaagaggcccaacaagcaggaggagagcgagagccctgtggagcggcccctgaaggaaaatccacccaacaagatgacccaggagaagctggaggagagcagcaccatcggccaggaccagaccctgatggagcgggacacagaaggaggagctgctgagatcaactgcaatggagtcatcgaggtgatcaactacacccagaacagcaacaatgagaccctgcggcacaaggaggacctgcacaatgccaatgactgtgatgtgcagaacctgaaccaggagagcagcttcctgagcagccagaatggagacagcagcaccagccaggagacagacagctgcacccccatcaccagcgaggtgtctgacaccatggtgtgccagagcagcagcacagtgggccagagcttcagcgagcagcacatcagccagctgcaggagagcatccgggcagagatcccctgtgaagatgagcaggagcaggagcacaacggccccctggacaacaagggcaagagcacagctggcaacttcctggtgaaccccctggagcccaagaatgctgagaagctgaaggtgaagattgctgacctgggcaatgcctgctgggtgcacaagcacttcacagaggacatccagacccggcagtaccgcagcctggaggtgctgattggcagcggctacaacaccccagctgacatctggagcacagcctgcatggcctttgagctggccaccggggactacctgtttgagccccacagcggggaggagtacaccagagatgaggaccacatcgccctgatcatcgagctgctgggcaaggtgcccaggaagctgattgtggccggcaagtacagcaaggagttcttcaccaagaagggggacctgaagcacatcaccaagctgaagccctggggcctgtttgaggtgctggtggagaagtatgagtggagccaggaggaggccgccggcttcacagacttcctgctgcccatgctggagctgatccctgagaagagggccacagctgctgagtgcctgcggcacccctggctgaacagctag

SEQ ID NO: 135515 - DNA, 1644 bp, Artificial Sequence
  derived and/or modified sequence
atgaaggtggtgaagagcgccgagcactacaccgagaccgccctggacgagatccggctgctgaagtccgttaggaatagcgacccaaatgaccctaaccgcgagatggttgtacaacttctggacgattttaagatctccggagtgaatgggacgcatatttgtatggtcttcgaggtgctcggtcatcacctccttaaatggattattaaatctaattaccaaggcctgcccttgccctgtgttaaaaagatcatccagcaagtcctacagggcctggactatctccacaccaagtgcagaataatccatactgacatcaaacctgagaacatcctgttaagcgttaatgaacagtacatccgcaggttagctgctgaagccacagagtggcagaggagcggtgcaccccccccctcagggtcagcagtaagcacagcgcctcagcccaaaccggccgacaagatgtcgaagaataaaaaaaaaaaactcaagaaaaagcagaaacgccaggccgagcttctggaaaagcgaatgcaggaaatcgaggaaatggagaaggagtctgggcccggtcagaaacgcccaaataagcaggaagaatcagagtcacccgtcgagaggcccctaaaggagaatccgccaaacaagatgacccaggaaaaactggaggagtcctcaacaatcggacaggaccagacactgatggaaagggataccgaaggcggagcggcagagatcaactgtaacggagtgattgaagttattaactacactcagaactctaataacgagaccctgcgccacaaggaagacttgcacaatgcaaatgattgcgatgtccagaatcttaaccaggagtcctcattcctgagtagccaaaatggcgatagcagtacctctcaagaaactgactcatgtacaccaatcacaagtgaagtctctgacactatggtgtgtcagagctcctccactgtggggcagagtttctctgagcagcacatctctcagctccaggagtctataagggccgaaatcccatgtgaggatgagcaggaacaggagcacaatggaccactagataacaagggcaagtctacagctggaaacttcctggtcaacccacttgagccaaagaatgcagaaaagctgaaggtcaagatcgcagatcttgggaacgcttgttggcataagcactttactgaggacatccagaccaggcaatataggtccctggaggtcctgatcggttccggttacaataccccagccgacatctggtcaaccgcctgcatggcttttgaactggcaacaggtgactatctctttgagcctcactcgggggaggaatatacccgggatgaagatcatattgtgcatattatcgagcttattggaagaatccccagacggttttccctcagtggaaaatactcacaggacttcttcagccaccggggagacttgaagcatatcaccaagctcaaaccatggggtctctttgaggtactcgtggagaagtacgaatggagtcaggaggaggcggctggtttcaccgactttctcctgccaatgctggagttgatccctgagaaacgggccacagctgctgagtgtctgaggcatccatggctcaattcatag

SEQ ID NO: 135516 - DNA, 1968 bp, Artificial Sequence
  derived and/or modified sequence
atggagcggaaggtgctggccctgcaggcccggaagaagcggaccaaagcaaaaaaggataaggcacagcgcaagtccgagacacagcatcgaggttcagctcctcattccgaatccgacctgcctgaacaagaagaggaaatcttgggatccgacgatgacgagcaggaggacccaaacgattactgcaagggaggataccacctggtcaagataggcgacttattcaacgggcgatatcacgtcatccgtaagctcggttgggggcactttagcaccgtgtggttgtcctgggatatccaaggaaaaaaatttgtagcaatgaaagtcgtgaaaagtgccgagcattacacagaaaccgccctagatgaaatccgactgcttaaaagcgtccgaaactctgacccaaatgatccaaatagggagatggtcgtgcagctgctggacgattttaagatttccggagttaatggaacccatatctgtatggtgtttgaagtcctgggccaccatttgctaaaatggattatcaaatccaactaccagggtctgcctcttccatgcgtcaaaaagatcattcagcaggtgctccagggcctggactacctccacaccaagtgcaggattattcacaccgacatcaaacctgaaaatatcctcctctccgtaaacgagcagtacatacggcggcttgcggcagaagctaccgagtggcaacgcagcggtgccccccccccttctgggtctgccgtaagtactgccccccaaccaaagccagcagacaagatgtctaaaaacaagaagaaaaagctaaagaagaaacagaagagacaagcggagttactggagaaacgcatgcaggaaatcgaggagatggagaaggagagcggccccggacagaagagacctaacaaacaggaagagtctgagtccccggtagagcgtcccttgaaggaaaaccctccaaacaagatgacccaggagaaattggaggagtcatccacaattggtcaggaccagaccctcatggagagagatacagaaggcggggcggctgagataaactgtaatggtgtgatagaggtcattaattatactcagaattccaacaacgagaccctgagacataaagaggatctgcacaatgcaaatgactgtgatgtgcagaacctaaaccaagaaagttcttttttgagcagtcaaaatggagactcatctacaagtcaggaaacagattcttgcacaccgattacctccgaagtcagcgataccatggtttgtcagagctccagcaccgtgggacagagctttagtgaacagcacatttcacagctacaggagtctatccgagctgagataccctgtgaagacgagcaagagcaggagcataacggtcccttagacaataagggcaaaagcactgccggaaattttcttgtgaatccacttgagccaaagaatgccgagaagctgaaagtgaaaatcgcggatctgggtaatgcctgctgggtccataagcactttaccgaggacatccagacacgacagtataggagcttagaagtcctgattggatccgggtataataccccggccgatatctggtctactgcttgcatggcctttgagttggccactggagactacttgttcgagcctcactctggtgaagagtatactcgagatgaagatcacatcgcgcttatcatcgagctcctcggtaaagtgccccgcaagctgatcgtcgccggtaagtattcgaaagagtttttcaccaaaaaaggggacctgaagcatattacaaaactgaagccatgggggctgtttgaagtgctggtggaaaagtatgaatggtctcaagaggaggccgctggttttaccgattttctgctgcctatgctagagctaatccctgagaagcgcgcgaccgctgccgagtgtctccggcacccatggctgaactcttag

SEQ ID NO: 135517 - DNA, 1644 bp, Artificial Sequence
  derived and/or modified sequence
atgaaagtggtgaagtcggctgagcactataccgaaaccgcattggacgaaatccgactgctgaagagcgtccggaattccgatccaaatgaccctaatagggagatggtggtgcagctgctcgacgacttcaaaatttcaggcgtgaatgggacccacatttgcatggtgttcgaggtgcttgggcaccacctcctgaaatggattatcaagtctaattaccaggggttgccactgccctgtgtgaagaaaattatccagcaagttctgcagggattggactatttgcataccaaatgcagaattatccacaccgatataaaaccagagaacattctgctttctgtgaacgaacagtacattcggcgtttggcagctgaagccaccgagtggcagcgctccggagccccacctccgagtggaagcgctgtgtccaccgcccctcagcctaagccagccgataagatgagtaagaataagaagaaaaagctaaaaaaaaaacagaagcgacaggcagagttgctggagaagagaatgcaggagatcgaagagatggagaaggagtctggccctggacagaagagacctaataagcaagaagagtcggaatcccctgtggaacggcctttgaaagaaaaccccccaaacaagatgacccaagagaaattagaagagagttcgacgataggacaggatcagacattaatggaacgggacactgagggcggagccgctgagattaactgcaatggagtgatcgaggtcataaattatacccagaacagcaataatgaaacactacgccacaaggaggaccttcacaacgccaatgactgcgatgtccaaaatctcaatcaggaatcatcctttctgagctctcagaatggcgattcgagtacttcccaagagactgactcctgcactcctatcaccagcgaagtctctgatacaatggtttgccagtctagcagtactgtaggacagtccttctctgaacagcacatctcccagctgcaggagagcattagggcagagatcccgtgcgaagacgaacaggaacaagaacataacggccctcttgataacaaagggaagagtaccgcaggaaacttcctcgtcaacccacttgaaccgaagaacgccgagaagcttaaggtcaaaatagctgacttaggcaacgcatgctggcataagcactttacggaagacatccagacgcggcaatatagatctctggaggtgcttatcggcagcggctacaacactccagctgacatttggtctaccgcatgcatggcttttgagctggccaccggcgactacctcttcgagccccactccggcgaagagtatacgcgggacgaagatcacatcgtgcatataatcgagctaatcggcaggattccccgtagattctccctctctggcaagtactcacaagacttttttagccataggggtgacctgaaacatatcacaaaactgaaaccctgggggctctttgaagtgctggtggagaaatatgagtggtctcaggaggaggctgccggtttcaccgatttcctgctgcccatgctggaactgatcccagagaagagggcgaccgcggctgaatgtctgaggcatccatggctcaattcctag

SEQ ID NO: 135518 - DNA, 1968 bp, Artificial Sequence
  derived and/or modified sequence
atggaaaggaaagtgctagcattgcaagctcgcaagaagcgtaccaaagccaagaaggataaggctcaaagaaaaagtgaaactcagcacagggggagtgcgcctcatagcgaatcggacctgccggagcaagaggaggagatccttggttccgatgacgatgagcaggaggacccgaatgactattgcaagggtgggtaccatttagtgaaaatcggagaccttttcaacggccgttaccacgtgatccggaaactgggctggggacacttttctaccgtctggctctcttgggatattcaaggaaaaaagttcgtcgccatgaaggtggttaagagcgcagagcattacacagaaactgcccttgatgaaattagactactgaaatctgtgcggaattccgatcctaatgaccccaaccgggaaatggtcgtacagctccttgacgattttaagatttccggagtgaacggcacccacatttgtatggtgttcgaggttttaggacaccaccttctgaagtggatcattaaatccaattatcaggggctgccactgccttgcgtgaagaagataatccagcaggtattgcaggggctagattaccttcatacaaagtgtcgtatcatacataccgatattaagcccgagaacatcctcctgtccgtcaacgaacagtacatccggcgtctcgcagcagaggctactgaatggcagaggagcggcgctccacccccttctggctctgccgtgtctacagccccacagcctaagcctgccgacaagatgtcaaagaataaaaagaaaaagcttaaaaaaaagcagaaacggcaggctgagctgttggaaaaacgcatgcaggaaatcgaagagatggagaaggaatcaggcccagggcaaaaacggccaaacaaacaagaggaatcagaatcccccgtggagagaccactcaaggagaatcctccaaacaaaatgacccaagagaaattggaagagagttctaccatcgggcaggatcagaccttgatggagcgagatactgaaggcggtgctgctgaaatcaattgcaatggtgtcattgaggtgatcaattacacacagaatagcaacaacgagaccttgaggcataaagaggatttacataatgcaaatgattgtgacgtccaaaatctgaaccaggaatcttccttcttatcatctcagaatggcgactcttcaacttcacaagaaaccgattcttgtacccccattacctccgaagtgagcgatacaatggtctgtcagagctcctccacagtcgggcagagtttctccgagcaacatatttcacagctgcaggaaagcatcagagcagagattccgtgtgaggacgagcaggaacaggagcacaatggcccactggacaataagggaaagtctacagccggaaatttcctggtcaatcccctcgagccgaagaatgccgaaaaactgaaggtgaaaattgccgacctggggaatgcatgctgggtgcacaaacactttactgaagacatccaaacacgtcagtatcgcagccttgaggtgttgattggctccggatataacacgcccgcagacatttggagtaccgcctgcatggcgtttgagcttgctacgggagattacctgtttgagcctcactccggcgaagagtacactagagacgaggaccacatcgcactaatcatcgagctgctcggcaaagtgccaagaaagctcattgttgcgggtaagtactccaaagagtttttcacaaaaaaaggcgatctcaaacacattaccaagctcaagccatgggggctgtttgaggttttagtggaaaaatatgaatggagccaggaggaagcagctggctttactgactttttgttacccatgctggagcttattcccgaaaagagagctacagccgctgagtgtttacggcatccttggctgaatagctag

SEQ ID NO: 135519 - DNA, 372 bp, Artificial Sequence
  derived and/or modified sequence
atggtggacggcagaaccagaaccatcatcaacgacatcttcttcaccgagcccacccccgagatgagcagcctgcccgtgagaagccacagcagcctgagcctgaacctggtgagcctgatggtgatctgcagaggcatcatcaagctggtgatccacttcagaatgtactgcccccccagactgaaggccaagcacatcgagcccaccctgagacccgtgcccctgaaggagctgagaatcagccactggcccaacgagtgcatcagacacagcgccagcgtgcccatggccaccggcgccaacggcctggagaccaaggacgagaccaagagaaacgccgagaagtgcgcctgcagcgtgttcctgtag

SEQ ID NO: 135520 - DNA, 345 bp, Artificial Sequence
  derived and/or modified sequence
atgagctgccagcagagccagcagcagtgccagcccccccccaagtgcacccctaagtgtactcccaaatgtccagccccaaagtgtccccccaaatgcccgcccgtgagcagttgttgcagcgtgtcctcgggcggttgttgtggatcatccagcggggggggatgtgggtctaattccggcggttgctgcagctctggcggtggcgggtgttgtttgagtcaccatcggcggcacagatcacataggaggcggcctcagtcctctgactgctgcagccagccgagtggagggagctcctgctgcggcgggggttcaagccagcattctggcggctgctgttag

SEQ ID NO: 135521 - protein, 638 aa, Artificial Sequence
  derived and/or modified sequence
MLDFFTIFSKGGLVLWCFQGVSDSCTGPVNALIRSVLLQERGGNNSFTHEALTLKYKLDNQFELVFVVGFQKILTLTYVDKLIDDVHRLFRDKYRTEIQQQSALSLLNGTFDFQNDFLRLLREAEESSKIRAPTTMKKFEDSEKAKKPVRSMIETRGEKPKEKAKNSKKKGAKKEGSDGPLATSKPVPAEKSGLPVGPENGVELSKEELIRRKREEFIQKHGRGMEKSNKSTKSDAPKEKGKKAPRVWELGGCANKEVLDYSTPTTNGTPEAALSEDINLIRGTGSGGQLQDLDCSSSDDEGAAQNSTKPSATKGTLGGMFGMLKGLVGSKSLSREDMESVLDKMRDHLIAKNVAADIAVQLCESVANKLEGKVMGTFSTVTSTVKQALQESLVQILQPQRRVDMLRDIMDAQRRQRPYVVTFCGVNGVGKSTNLAKISFWLLENGFSVLIAACDTFRAGAVEQLRTHTRRLSALHPPEKHGGRTMVQLFEKGYGKDAAGIAMEAIAFARNQGFDVVLVDTAGRMQDNAPLMTALAKLITVNTPDLVLFVGEALVGNEAVDQLVKFNRALADHSMAQTPRLIDGIVLTKFDTIDDKVGAAISMTYITSKPIVFVGTGQTYCDLRSLNAKAVVAALMKA

SEQ ID NO: 135522 - DNA, 1917 bp, Artificial Sequence
  derived and/or modified sequence
atgctcgacttttttaccatcttcagcaaaggcggcctcgttctgtggtgcttccaaggcgtgtcagactcctgcaccggtcctgtcaacgccctaatccggtctgtgctgttgcaggagcggggcggcaacaacagctttactcatgaggccttaaccctcaagtataagctcgacaatcagtttgaactcgtgttcgtggtgggcttccagaagattctgacacttacttacgtcgacaaactgatcgacgacgtgcaccggctttttcgggacaagtaccgtaccgaaatccagcaacaatccgcactaagtctgcttaacggcaccttcgactttcagaacgacttcctcagactcttacgagaagctgaggagtcgagcaagatccgcgcccctaccaccatgaagaaattcgaggacagcgagaaggcaaaaaagccagtccggtcaatgatcgaaacccgaggagaaaagcccaaggagaaagcaaagaatagtaagaagaagggagccaagaaagaagggtcagacggaccgttggcaacttccaagcccgtgcccgccgaaaaaagcggcttgccagtggggcctgaaaatggggtcgagctgagtaaagaggagctgatccggcgaaagagagaggagttcattcagaaacatggtcggggaatggaaaaatccaataaatccactaagtctgacgccccaaaggaaaagggcaagaaagcaccacgtgtgtgggaattgggtggatgcgctaacaaggaggtgctggattactctacgccaaccactaatggcacacctgaagcagctctgagcgaggatattaatctgatacgcggtactgggtctggaggtcagctacaggatctggattgctctagtagcgatgatgaaggtgctgctcagaactcaacaaagccctccgcaactaaagggaccttaggcggtatgtttggcatgcttaagggcctggtggggtcgaagagcctctcccgggaggacatggagtcagtcctggacaagatgagggatcacttaatcgcaaaaaatgtcgccgccgatatcgctgtgcaactgtgtgagtccgtggctaataagctagaaggaaaagtcatgggaaccttctctaccgtgacaagcacagtgaaacaggctttgcaggagtcactcgtccaaattctgcagcctcagcgtcgggtagacatgttacgggacatcatggacgctcagcgacgccaaagaccatatgtagtaacattttgcggtgtcaatggagttggcaagtcaacaaacctagctaagatcagtttttggctgctggaaaacgggttcagtgtgctgatcgcagcttgcgataccttcagagccggtgccgtcgagcagctgaggacccacactcgtcggctcagtgctttgcacccgccagagaagcacggagggcgcacgatggtgcagctctttgagaaaggatatgggaaggatgcggccggtattgccatggaagccattgcctttgcccgcaatcaaggattcgacgtagtgttagtggatacagccggtaggatgcaggataatgccccactgatgacagcactcgctaagttgattaccgtgaacactccggacctggtattgtttgttggcgaggccctcgtgggcaacgaagccgtcgatcaattggttaaatttaaccgggccttggcagaccacagcatggcccaaacgccacggctgatcgacggtatagttcttactaaattcgacaccattgacgacaaggtgggcgcagctattagtatgacctacatcacctcaaaacccattgtcttcgtaggcaccggtcagacttattgcgacctgcggagccttaatgcgaaggcagtcgtggccgctctaatgaaggcctag

SEQ ID NO: 135523 - DNA, 1917 bp, Artificial Sequence
  derived and/or modified sequence
atgctggacttcttcaccatcttcagcaagggcggcctggtgctgtggtgcttccagggcgtgtctgacagctgcaccggccctgtgaatgccctgatccgctctgtgctgctgcaggagcggggcggcaacaacagcttcacccatgaggccctgaccctgaagtacaagctggacaaccagtttgagctggtgtttgtggtgggcttccagaagatcctgaccctgacctacgtggacaagctgattgatgatgtgcacaggctcttccgggacaagtacagaacagagatccagcagcagagcgccctgagcctgctgaatggcacctttgacttccagaatgacttcctgcggctgctgcgggaggccgaggagagcagcaagatccgggcccccaccaccatgaagaagtttgaggacagcgagaaggccaagaagcctgtgcgctccatgattgagaccagaggagagaagcccaaggagaaggccaagaacagcaagaagaagggggccaagaaggagggcagtgatggccccctggccaccagcaagcctgtgcctgctgagaagagcggcctgcctgtgggcccagaaaatggagtggagctgagcaaggaggagctgatccggaggaagcgggaggagttcatccagaagcacggccggggcatggagaagagcaacaagagcaccaagagtgatgcccccaaggagaagggcaagaaggccccccgggtgtgggagctgggcggctgtgccaacaaggaggtgctggactacagcacccccaccaccaacggcaccccagaggccgccctgtctgaggacatcaacctgatccggggcaccggcagcggcggccagctgcaggacctggactgcagcagcagtgatgatgagggcgccgcccagaacagcaccaagcccagcgccaccaagggcaccctgggcggcatgtttggcatgctgaagggcctggtgggcagcaagagcctgagccgggaggacatggagagcgtgctggacaagatgagggaccacctgattgccaagaatgtggccgctgacattgctgtgcagctgtgtgagagcgtggccaacaagctggagggcaaggtgatgggcaccttcagcacagtgaccagcacagtgaagcaggccctgcaggagagcctggtgcagatcctgcagccccagaggagagtggacatgctgcgggacatcatggatgcccagaggcggcagaggccctacgtggtgaccttctgtggggtgaatggagtgggcaagagcaccaacctggccaagatctccttctggctgctggagaatggcttctctgtgctgattgctgcctgtgacaccttccgggccggggctgtggagcagctgcggacccacacccggcggctgagcgccctgcaccccccagagaagcatggaggccgcaccatggtgcagctgtttgagaagggctacggcaaggatgctgctggcatcgccatggaggccatcgcctttgccaggaaccagggctttgatgtggtgctggtggacacagctggccgcatgcaggacaatgcccccctgatgacagccctggccaagctgatcaccgtgaacaccccagacctggtgctgtttgtgggggaggccctggtgggcaatgaagctgtggaccagctggtgaagttcaacagagccctggccgaccacagcatggcccagaccccccggctgattgatggcatcgtgctgaccaagtttgacaccattgatgacaaggtgggcgccgccatctccatgacctacatcaccagcaagcccatcgtgtttgtgggcaccggccagacctactgtgacctgcggagcctgaatgccaaggctgtggtggccgccctgatgaaggcctag

SEQ ID NO: 135524 - DNA, 1917 bp, Artificial Sequence
  derived and/or modified sequence
atgctggacttcttcaccatcttcagcaagggcggcctggtgctgtggtgctttcaaggcgtgtcggatagctgcacagggccagtgaacgccctgatcagatcagtgctgctgcaagagcgagggggaaataattcctttacccatgaggcacttacgctcaaatataagctagacaatcagtttgagcttgtcttcgttgtgggatttcagaaaattctgactttaacctacgtagacaagctgatcgatgacgttcaccggctgttcagagacaagtacagaaccgagatccagcagcaatcggctctcagcctgctcaacggcacctttgacttccagaatgacttcctgaggctcttgagagaagcagaggagtcctccaagatcagggcccctacaaccatgaaaaagtttgaggacagtgagaaagctaaaaagccagtgcgcagtatgatcgagactcggggggagaaaccaaaagaaaaagcaaaaaactccaagaagaagggtgccaaaaaagaggggagcgacggccccttggcaaccagcaaacccgtgccagccgagaagtccgggcttccggtcggccctgaaaatggagtggagctttcgaaggaggaactgatcagaagaaagcgcgaagagttcattcaaaagcacggaagaggcatggagaagagtaataagtctaccaaatctgatgcccctaaggagaagggcaaaaaggctcccagggtatgggagctgggaggttgcgctaataaggaggtcttggactatagcacacccaccacgaatggaacgccagaggctgcactgagcgaggacatcaatctcatccgggggaccggatccggcggacagctgcaggacttggattgctcatcatctgatgatgagggagctgcacaaaatagtaccaagccttcagcgacaaaagggaccctaggcggaatgtttgggatgttaaaaggtctcgtgggtagtaagtccttgagtcgggaagacatggagagcgtgctggacaaaatgcgggatcatcttatcgccaaaaatgttgcagctgacatcgctgtccagttgtgtgagtcggtggcaaataaactggaaggcaaggtaatgggaacattttcgactgtcacgagcaccgtcaaacaggcgctgcaggaaagcttggttcagatccttcagccacagagacgggtcgacatgttacgggatatcatggatgcccaacggcgccaaagaccatacgtggttacattttgcggtgtaaatggggtggggaagagcacaaatctcgccaagattagcttttggctccttgagaatgggtttagcgtgcttatcgctgcctgtgataccttccgggctggcgccgtcgaacagctgcgaacccatacccggaggctgtccgctctgcatccccctgagaagcatggaggacggacgatggtacagctgtttgagaaaggatatgggaaagatgcagcaggaattgctatggaggccatagccttcgctaggaaccaggggtttgacgtggttctggtggatacagctgggcgcatgcaggataatgctcccctcatgacagcactggctaagctcatcacggtgaatactcccgacctcgtcctgtttgttggggaggctctcgtgggcaatgaggctgtggaccagttggtgaagttcaacagagcactcgccgatcatagcatggcgcagacccccagactgatcgacggcatcgtactgaccaagtttgacactatcgacgataaggtaggcgccgcaattagcatgacctacattacaagtaaacccattgtgttcgtgggcactggacaaacctactgcgacctgcggagcctgaacgctaaggctgtcgtcgccgccctcatgaaggcctag

SEQ ID NO: 135525 - DNA, 1917 bp, Artificial Sequence
  derived and/or modified sequence
atgttagactttttcactatattcagtaagggaggccttgtgctgtggtgttttcagggcgtgagcgattcttgcacaggcccagtcaacgcacttatacgctccgtcctcctgcaggaaagaggcggtaataattctttcacccacgaagcactaaccttgaagtacaaacttgacaaccagttcgagctagtcttcgtggtgggatttcagaaaattctgaccctaacctacgtagataaattaatagacgacgttcatcgcttatttcgcgacaagtaccgcaccgagatacagcagcagagcgctctgagtctgctcaacggaacgttcgacttccagaacgatttcttgcgcctgctgcgggaagctgaagaaagctccaaaattcgtgcccctactactatgaaaaagtttgaggatagcgaaaaggctaaaaaacctgtgcgatccatgatcgagacacgcggtgagaagccaaaggagaaggctaaaaacagcaaaaagaagggcgcaaagaaggaaggctcagacggcccactcgctacaagcaaaccagtacctgcagagaagtccgggctgccggtgggcccagaaaatggggtggagctgtctaaagaagaactgatacgtagaaagagggaagaatttattcagaagcatggaagaggcatggaaaagagcaacaaatccacaaagagcgacgcccctaaggaaaaaggaaaaaaggcccctagagtgtgggagctcgggggatgtgctaacaaagaagtgttagactactccacgccaaccacaaatggcacacctgaggcagccctgtctgaggatataaatttgatcagagggacaggtagcgggggtcagctgcaggacctagactgtagttcaagcgacgacgagggcgctgcacagaattctactaaaccaagtgcgactaagggcaccctcggtgggatgtttggtatgctgaaagggcttgtcggctccaagagcctgtcgcgggaagacatggagtctgtgcttgacaaaatgcgtgaccatcttattgccaagaacgttgcagcagatattgccgtccaattgtgcgagtctgttgctaacaaactggaaggcaaggtaatggggaccttttccacagtgacatctaccgtgaagcaagctttgcaagaaagcctggtccagatacttcaaccgcaacgccgagtagatatgttaagagacattatggatgcccagagaaggcagcgcccttatgtcgtgaccttctgtggagtaaacggtgtcggaaagtctaccaatctggccaagatctccttttggctgctcgaaaacggcttctctgtgctcatagctgcatgtgacacattccgcgctggcgcagttgaacaactgcgcacacacacaaggcgcctatctgccctgcacccacctgaaaaacacgggggacgcactatggttcagctcttcgagaaaggctatgggaaggacgcagccggaattgctatggaggcaatagctttcgcaagaaaccagggttttgatgtggtgctggtggataccgcgggtaggatgcaggataatgctccgctgatgactgccttggcgaagctgatcaccgtcaacaccccggacttggttctgttcgtgggagaggccctggtgggcaacgaggccgtcgaccagcttgtgaagttcaatcgagcattggcggaccactcaatggcccagaccccgaggctgatagatggcatcgttctcactaaatttgataccattgacgataaagtgggtgcagccatcagcatgacatacatcacatccaaacccattgtgtttgtcggaactggacagacgtattgcgacctgaggagcctgaacgccaaggctgtggtggctgccttgatgaaggcatag

SEQ ID NO: 135526 - DNA, 3050 bp, Artificial Sequence
  derived and/or modified sequence
gatggggagggcacccggcgttctgagcggaagtacggttgagccgatttccggggccactggtgtgacgtgtcccgcgcttggcgcagcaggaagcggcggcgaacgcggcctgaattcccggcgccggccccagctcctctgccgctgccgccatgctcgacttcttcaccattttctccaagggcgggcttgtgctctggtgcttccagggcgttagcgactcatgcaccggacccgttaacgcgttgattcgttccgtgctgctgcaggaacggggaggtaacaactccttcacccatgaggcactcacactcaagtataaactggacaaccagtttgagctggtgtttgtggttggttttcagaagatcctgacactgacatatgtagacaaattgatagatgacgtgcatcggctgtttcgggacaagtaccgcacagagatccaacagcaaagtgctttaagtttattaaatggcacttttgatttccaaaatgacttcctgcggctccttcgtgaagcagaggagagcagtaagatccgtgctcccactaccatgaagaaatttgaagattctgaaaaggccaagaaacctgtgaggtccatgattgagacacggggggaaaagcccaaggaaaaagcaaagaatagcaaaaaaaagggggccaagaaggaaggttctgatggtcctttggctaccagcaaaccagtccctgcagaaaagtcaggtcttccagtgggtcctgagaacggagtagaactttccaaagaggagctgatccgcaggaagcgcgaggagttcattcagaagcatgggaggggtatggagaagtccaacaagtccacgaagtcagatgctccaaaggagaagggcaaaaaagcaccccgggtgtgggaactgggtggctgtgctaacaaagaagtgttggattacagtactcccaccaccaatggaacccctgaggctgccttgtctgaggacatcaacctgattcgagggactgggtctggggggcagcttcaggatctggactgcagcagctctgatgacgaaggggctgctcaaaactctaccaaacctagtgcgaccaagggaacactgggtggcatgtttggtatgctgaagggccttgtgggttcaaagagcttgagtcgtgaagacatggaatctgtgctggacaagatgcgtgatcatctcattgctaagaacgtggctgcagacattgccgtccagctctgtgaatctgttgccaacaagttggaagggaaggtgatggggacgttcagcacggtgacttccacagtaaagcaagccctacaggagtccctggtgcagattctgcagccacagcgtcgtgtagacatgctccgggacatcatggatgcccagcgtcgccagcgcccttatgtcgtcaccttctgcggcgttaatggagtggggaaatctactaatcttgccaagatttccttctggttgttagagaatggcttcagtgtcctcattgctgcctgtgatacatttcgtgctggggccgtggagcagctgcgtacacacacccggcgtttgagtgccctacaccctccagagaagcatggtggccgcaccatggtgcagttgtttgaaaagggctatggcaaggatgctgctggcattgccatggaagccattgcttttgcacgtaaccaaggctttgacgtggtgctggtggacacggcaggccgcatgcaagacaatgcccctctgatgactgccctggccaaactcattactgtcaatacacctgatttggtgctgtttgtaggagaagccttagtaggcaatgaagccgtggaccagctggtcaagttcaacagagccttggctgaccattctatggctcagacacctcggctcattgatggcattgttcttaccaaatttgataccattgatgacaaggtgggagctgctatttctatgacgtacatcacaagcaaacccatcgtctttgtgggcaccggccagacctactgtgacctacgcagcctcaatgccaaggctgtggtggctgccctcatgaaggcttaacgtggctcttgcccaataccaaatcgccgctttccccacaagcccttcttcctgtatcaagaatgtgctttagagtatgtgagcaacctgtcttcagtgtagtacaaaggcagagtgagggggcttgtggctccttccaaccccactccccgttcagcacagccgccatctgcaaggaaggcctaatcatgttacaatcactgcccactgaccctctcccagcgggcctcccccttcctactcaggcacccccttcactctgcctacagactcagtcttattacagctttgaccaatggttggaacccaacaccagagctttgctaataattagtgtggtcaagagccgtctgagcctaatgagtcccagctgcattaggttaagagactcttccagagccagcgccaggtcttgaatggcacctctccctaggatacacagcctgcaggtccccaggacctggatgacacccgcctcactgtggcagtgtattgcctgttaattgctgctaattctaattctgatgatgactcctactccattgtttaccccaaagcatcagctaggctggagtgatttgttacaaatgagcaaaagatgagtccttgcttccctcagaaataaaaggagctcagctgcagcgttgcattgggcttcttggcctcccaactcttcccactcccagaatccagaagtaagctctgcatgttccccttcctgggaggaaaccaattgtcagaaggatgtatgatgaccccctcccctcccatccttcacctcctaagcagtcctggcttttcctcatcactcccctctacagtgcctggtagacaagtgctacattgaagaacacaaacctcttgttaagacttgtcctgtagcttgatattacagatgtgctattagtgcaataaggtgaaggctgtctgcccagagaaataagtaatttatataagaaaataaatttcataaataaa

SEQ ID NO: 135527 - DNA, 1917 bp, Artificial Sequence
  derived and/or modified sequence
atgctggacttcttcaccatcttcagcaagggcggcctggtgctgtggtgcttccagggcgtgagcgacagctgcaccggccccgtgaacgccctgatcagaagcgtgctgctgcaggagagaggcggcaacaacagcttcacccacgaggccctgaccctgaagtacaagctggacaaccagttcgagctggtgttcgtggtgggcttccagaagatcctgaccctgacctacgtggacaagctgatcgacgacgtgcacagactgttcagagacaagtacagaaccgagatccagcagcagagcgccctgagcctgctgaacggcaccttcgacttccagaacgacttcctgagactgctgagagaggccgaggagagcagcaagatcagagcccccaccaccatgaagaagttcgaggacagcgagaaggccaagaagcccgtgagaagcatgatcgagaccagaggcgagaagcccaaggagaaggccaagaacagcaagaagaagggcgccaagaaggagggcagcgacggccccctggccaccagcaagcccgtgcccgccgagaagagcggcctgcccgtgggccccgagaacggcgtggagctgagcaaggaggagctgatcagaagaaagagagaggagttcatccagaagcacggcagaggcatggagaagagcaacaagagcaccaagagcgacgcccccaaggagaagggcaagaaggcccccagagtgtgggagctgggcggctgcgccaacaaggaggtgctggactacagcacccccaccaccaacggcacccccgaggccgccctgagcgaggacatcaacctgatcagaggcaccggcagcggcggccagctgcaggacctggactgcagcagcagcgacgacgagggcgccgcccagaacagcaccaagcccagcgccaccaagggcaccctgggcggcatgttcggcatgctgaagggcctggtgggcagcaagagcctgagcagagaggacatggagagcgtgctggacaagatgagagaccacctgatcgccaagaacgtggccgccgacatcgccgtgcagctgtgcgagagcgtggccaacaagctggagggcaaggtgatgggcaccttcagcaccgtgaccagcaccgtgaagcaggccctgcaggagagcctggtgcagatcctgcagccccagagaagagtggacatgctgagagacatcatggacgcccagagaagacagagaccctacgtggtgaccttctgcggcgtgaacggcgtgggcaagagcaccaacctggccaagatcagcttctggctgctggagaacggcttcagcgtgctgatcgccgcctgcgacaccttcagagccggcgccgtggagcagctgagaacccacaccagaagactgagcgccctgcacccccccgagaagcacggcggcagaaccatggtgcagctgttcgagaagggctacggcaaggacgccgccggcatcgccatggaggccatcgccttcgccagaaaccagggcttcgacgtggtgctggtggacaccgccggcagaatgcaggacaacgcccccctgatgaccgccctggccaagctgatcaccgtgaacacccccgacctggtgctgttcgtgggcgaggccctggtgggcaacgaggccgtggaccagctggtgaagttcaacagagccctggccgaccacagcatggcccagacccccagactgatcgacggcatcgtgctgaccaagttcgacaccatcgacgacaaggtgggcgccgccatcagcatgacctacatcaccagcaagcccatcgtgttcgtgggcaccggccagacctactgcgacctgagaagcctgaacgccaaggccgtggtggccgccctgatgaaggcctag

SEQ ID NO: 135528 - protein, 204 aa, Artificial Sequence
  derived and/or modified sequence
MQSYASAMLSVFNSDDYSPAVQENIPALRRSSSFLCTESCNSKYQCETGENSKGNVQDRVKRPMNAFIVWSRDQRRKMALENPRMRNSEISKQLGYQWKMLTEAEKWPFFQEAQKLQAMHREKYPNYKYRPRRKAKMLPKNCSLLPADPASVLCSEVQLDNRLYRDDCTKATHSRMEHQLGHLPPINAASSPQQRDRYSHWTKL

SEQ ID NO: 135529 - protein, 197 aa, Artificial Sequence
  derived and/or modified sequence
MQSYASAMLSVFNSDDYSPAVQENIPALRRSSSFLCTESCNSKYQCETGENSKGNVQDRVKRPMNAFIVWSRDQRRKMALENPRMRNSEISKQLGYQWKMLTEAEKWPFFQEAQKLQAMHREKYPNYKYRPRRKAKMLPKNCSLLPADPASVLCSEVQLDNRLYRDDCTKATHSRMEHQLGHLPPINAASAATGPLQ

SEQ ID NO: 135530 - protein, 165 aa, Artificial Sequence
  derived and/or modified sequence
MQSYASAMLSVFNSDDYSPAVQENIPALRRSSSFLCTESCNSKYQCETGENSKGNVQDRVKRPMNAFIVWSRDQRRKMALENPRMRNSEISKQLGYQWKMLTEAEKWPFFQEAQKLQAMHREKYPNYKYRPRRKAKMLPKNCSLLPADPASVLCSEVQGQQVVQG

SEQ ID NO: 135531 - DNA, 897 bp, Artificial Sequence
  derived and/or modified sequence
gttgagggggtgttgagggcggagaaatgcaagtttcattacaaaagttaacgtaacaaagaatctggtagaagtgagttttggatagtaaaataagtttcgaactctggcacctttcaattttgtcgcactctccttgtttttgacaatgcaatcatatgcttctgctatgttaagcgtattcaacagcgatgattacagtccagctgtgcaagagaatattcccgctctccggagaagctcttccttcctttgcactgaaagctgtaactctaagtatcagtgtgaaacgggagaaaacagtaaaggcaacgtccaggatagagtgaagcgacccatgaacgcattcatcgtgtggtctcgcgatcagaggcgcaagatggctctagagaatcccagaatgcgaaactcagagatcagcaagcagctgggataccagtggaaaatgcttactgaagccgaaaaatggccattcttccaggaggcacagaaattacaggccatgcacagagagaaatacccgaattataagtatcgacctcgtcggaaggcgaagatgctgccgaagaattgcagtttgcttcccgcagatcccgcttcggtactctgcagcgaagtgcaactggacaacaggttgtacagggatgactgtacgaaagccacacactcaagaatggagcaccagctaggccacttaccgcccatcaacgcagccagctcaccgcagcaacgggaccgctacagccactggacaaagctgtaggacaatcgggtaacattggctacaaagacctacctagatgctcctttttacgataacttacagccctcactttcttatgtttagtttcaatattgttttcttttctctggctaataaaggccttattcatttca

SEQ ID NO: 135532 - DNA, 615 bp, Artificial Sequence
  derived and/or modified sequence
atgcagagctacgcctccgctatgctgtccgtcttcaattctgatgactattctcccgctgtgcaggaaaatataccagctctcaggcgcagctcttctttcctgtgcacggagtcatgtaatagcaagtatcagtgtgaaacaggggaaaattccaagggtaatgtgcaggaccgcgtgaaacgaccaatgaacgccttcatcgtgtggtcacgggaccagcgcaggaaaatggcattggagaatccccggatgcgtaactccgagatctctaagcagctgggttatcaatggaagatgctcacagaggctgagaaatggccgtttttccaggaagcgcaaaagctccaggctatgcatagagagaaatatccaaactacaaatatcgaccccgtcgcaaagcaaagatgcttcccaaaaattgctctctccttccagccgaccccgcttcagtgctgtgctctgaggttcagttagataatcgcctgtatcgggacgattgcactaaagccactcattctaggatggaacatcaattggggcatttacctcctatcaatgctgcctctagtccacagcagcgcgaccggtactctcattggaccaaattgtag

SEQ ID NO: 135533 - DNA, 594 bp, Artificial Sequence
  derived and/or modified sequence
atgcagagttacgcctcagccatgctgtccgtgttcaatagcgacgactattccccagccgtacaggagaatatcccagccctgcgaaggagctcgtctttcctgtgtacagagtcttgcaattccaaataccagtgcgaaactggggagaattccaaggggaacgttcaggacagggtcaagcgacccatgaatgccttcatagtgtggtcacgggatcagcgacggaagatggccctggagaatccccgaatgagaaacagcgagatcagcaagcagcttggctaccagtggaaaatgttaacagaggcggagaaatggccatttttccaggaggcacaaaagcttcaggctatgcacagggaaaagtacccaaactacaagtatcgacccagacgcaaagcgaaaatgctcccaaagaactgctcactgctgcccgccgacccagcttccgtgctctgctccgaggtccagctggataatagattgtatagggacgactgcactaaggctacccacagcaggatggagcaccaattgggccatttaccgccaatcaacgcggcatctgctgccaccggaccacttcaatag

SEQ ID NO: 135534 - DNA, 498 bp, Artificial Sequence
  derived and/or modified sequence
atgcagtcttacgcttccgccatgttgtccgttttcaattcggacgattactctccggccgtccaagagaatatcccagccctgagaaggagttcaagtttcttgtgtaccgaatcctgtaatagcaagtatcagtgtgagactggcgagaacagcaaaggcaatgtccaagatcgtgtgaaacggcccatgaatgcctttatcgtgtggtcccgtgaccaacgcagaaagatggctctcgagaatccacgcatgcggaactcggagatctcaaaacagctcggatatcagtggaaaatgctgaccgaagctgagaaatggcccttctttcaggaggctcagaaattgcaagccatgcaccgagagaagtatccaaattacaaatacaggccccggcgtaaggccaagatgctgccaaaaaactgctctttgctgcctgcagaccctgcttccgtgctctgcagcgaagtccaaggtcagcaggtagtgcaaggatag

SEQ ID NO: 135535 - DNA, 615 bp, Artificial Sequence
  derived and/or modified sequence
atgcagagctatgccagcgccatgctgagcgtcttcaacagtgatgactacagccctgctgtgcaggagaacatcccagccctgcggcgcagcagcagcttcctgtgcacagagagctgcaacagcaagtaccagtgtgagaccggggagaacagcaaaggaaatgtgcaggacagagtgaagaggcccatgaatgccttcatcgtgtggagccgggaccagaggaggaagatggccctggagaaccccaggatgaggaacagcgagatcagcaagcagctgggctaccagtggaagatgctgacagaggccgagaagtggcccttcttccaggaggcccagaagctgcaggccatgcaccgggagaagtaccccaactacaagtaccggcccaggaggaaggccaagatgctgcccaagaactgcagcctgctgcctgctgaccctgcctctgtgctgtgcagcgaggtgcagctggacaacagactctacagagatgactgcaccaaggccacccacagcaggatggagcaccagctgggccacctgccccccatcaatgctgccagcagcccccagcagagggaccgctacagccactggaccaagctgtag

SEQ ID NO: 135536 - DNA, 594 bp, Artificial Sequence
  derived and/or modified sequence
atgcagagctatgccagcgccatgctgagcgtcttcaacagtgatgactacagccctgctgtgcaggagaacatcccagccctgcggcgcagcagcagcttcctgtgcacagagagctgcaacagcaagtaccagtgtgagaccggggagaacagcaaaggaaatgtgcaggacagagtgaagaggcccatgaatgccttcatcgtgtggagccgggaccagaggaggaagatggccctggagaaccccaggatgaggaacagcgagatcagcaagcagctgggctaccagtggaagatgctgacagaggccgagaagtggcccttcttccaggaggcccagaagctgcaggccatgcaccgggagaagtaccccaactacaagtaccggcccaggaggaaggccaagatgctgcccaagaactgcagcctgctgcctgctgaccctgcctctgtgctgtgcagcgaggtgcagctggacaacagactctacagagatgactgcaccaaggccacccacagcaggatggagcaccagctgggccacctgccccccatcaatgctgccagcgctgccaccggccccctgcagtag

SEQ ID NO: 135537 - DNA, 498 bp, Artificial Sequence
  derived and/or modified sequence
atgcagagctatgccagcgccatgctgagcgtcttcaacagtgatgactacagccctgctgtgcaggagaacatcccagccctgcggcgcagcagcagcttcctgtgcacagagagctgcaacagcaagtaccagtgtgagaccggggagaacagcaaaggaaatgtgcaggacagagtgaagaggcccatgaatgccttcatcgtgtggagccgggaccagaggaggaagatggccctggagaaccccaggatgaggaacagcgagatcagcaagcagctgggctaccagtggaagatgctgacagaggccgagaagtggcccttcttccaggaggcccagaagctgcaggccatgcaccgggagaagtaccccaactacaagtaccggcccaggaggaaggccaagatgctgcccaagaactgcagcctgctgcctgctgaccctgcctctgtgctgtgcagcgaggtgcagggccagcaggtggtgcagggctag

SEQ ID NO: 135538 - DNA, 615 bp, Artificial Sequence
  derived and/or modified sequence
atgcagagctacgccagcgccatgctgagcgtgttcaacagcgacgactacagtccggcagtgcaggaaaatattcctgccttgaggcgatcaagctcctttttatgtactgagtcttgcaactcaaaataccagtgtgaaactggtgaaaatagcaaaggaaatgtgcaggaccgggtcaaacggccgatgaatgctttcatcgtatggagccgagatcagcggcggaagatggctctcgagaatccccgcatgcggaacagtgagatcagcaaacaactagggtaccaatggaaaatgctgacagaagccgagaagtggcccttttttcaggaagcccagaaactgcaggccatgcatcgggagaaatacccaaactacaagtacaggcctaggcggaaggctaaaatgctgccaaaaaattgctctctcctgcccgctgaccccgcatccgtcctttgcagcgaagtccagttggataacagactttaccgagacgactgtaccaaggctacccactcacggatggaacaccagctgggtcacctgccccctatcaatgccgcctctagtccccagcagcgagatagatattcacactggactaaattgtag

SEQ ID NO: 135539 - DNA, 594 bp, Artificial Sequence
  derived and/or modified sequence
atgcagagctacgccagcgccatgctgagcgtgttcaacagcgacgattactccccagcggtacaggagaacatccccgctctccgaaggtcatccagctttctctgcactgaaagctgcaattccaagtaccagtgcgaaaccggtgagaattctaagggcaatgtgcaagaccgcgtaaaacgccctatgaatgcattcattgtgtggtctagggaccagagaaggaaaatggcccttgagaatccgcgcatgcgcaatagcgagatcagcaagcagttgggatatcaatggaagatgctgacagaggccgaaaagtggcccttttttcaggaagctcaaaagcttcaagccatgcaccgggagaaatatccgaattacaagtaccgaccaagacgcaaggcaaagatgctgccaaagaactgctccctcctgccagccgacccagctagcgtgctgtgtagcgaggtgcagctggacaaccgactgtaccgagatgattgcaccaaagctacccatagccgcatggagcaccagctgggccatttacctccgattaacgctgccagcgctgccactggacccttgcaatag

SEQ ID NO: 135540 - DNA, 498 bp, Artificial Sequence
  derived and/or modified sequence
atgcagagctacgccagcgccatgctgagcgtgttcaacagcgacgattacagccccgccgtacaggaaaacatacctgcccttagaagaagtagtagttttctctgtaccgaaagctgtaatagtaaataccaatgtgaaactggggagaacagtaagggaaacgtacaggacagagtgaagcggccaatgaacgccttcatagtatggtcccgagaccagcggcgcaagatggctcttgagaatccacgaatgagaaactccgagatttccaagcagctaggctaccagtggaagatgttgaccgaagcggagaagtggcctttctttcaggaagcccaaaagctccaggcgatgcacagagaaaaatatccaaactacaagtatcggccacgacgaaaggctaaaatgttgccgaaaaactgctcactcttgcctgccgatccagcctcggtcctttgtagtgaagtgcagggacagcaagtggttcagggctag

SEQ ID NO: 135541 - DNA, 615 bp, Artificial Sequence
  derived and/or modified sequence
atgcagtcctatgctagtgctatgctgagtgtgtttaattcagacgactacagtcctgctgtgcaagagaacatccccgcactcaggaggtcctcttcctttctgtgtaccgagagctgcaattccaaataccaatgtgaaacaggcgagaatagtaaggggaacgtgcaggatcgtgtgaaacggccaatgaatgcttttatcgtgtggagccgggatcaacgacgaaaaatggctctggaaaacccacggatgagaaactctgagatatcgaagcaactaggctaccagtggaagatgctcacagaagccgaaaagtggccatttttccaagaggcccagaagctccaggcaatgcacagagagaaatatcccaattataaatatagacctcgcaggaaggcgaaaatgctcccaaagaattgttctctgctgccagctgatcccgctagcgtgctgtgctctgaagtgcagctggataaccggttataccgagacgattgtaccaaagcaacccattcacggatggaacaccagctcggacatttgcccccaattaatgctgcatcgagcccacagcagcgggatcgctattcacattggacgaaattgtag

SEQ ID NO: 135542 - DNA, 594 bp, Artificial Sequence
  derived and/or modified sequence
atgcaaagttatgcttctgcaatgttgtcagtttttaattcagatgattattccccagccgttcaggagaatattcccgcactgcggagatctagtagtttcctttgcaccgaatcctgtaactctaagtatcagtgcgagaccggagagaactctaaggggaacgtgcaggatagagtgaaaagacctatgaacgcttttatagtctggtcccgggatcagaggcgcaaaatggcccttgagaatcccaggatgcgcaacagtgaaattagcaagcaattaggctatcagtggaagatgctgactgaggccgagaaatggccattctttcaagaagcccaaaaactgcaggccatgcaccgagagaaataccccaattacaagtaccgccctcggcgaaaggctaagatgctgcccaagaactgttcactgctccctgcggatcccgctagcgtattatgctccgaggttcagttggataatcgtttatatagggacgactgcaccaaagcaactcactctcgcatggagcaccaactggggcatctgcctcctatcaacgccgctagtgcagctacgggccctttgcagtag

SEQ ID NO: 135543 - DNA, 498 bp, Artificial Sequence
  derived and/or modified sequence
atgcaatcatacgccagtgcgatgctgtctgtctttaacagcgacgactacagtcccgcagtgcaggagaacattcctgccctaagaaggagctcttccttcctgtgcaccgagagttgcaattcgaaatatcagtgcgaaactggtgaaaatagcaagggtaatgttcaagatcgcgtgaaacgcccaatgaacgccttcatcgtttggtcccgagatcagcggcgtaaaatggcgctggaaaatcctaggatgcggaattcggagattagcaagcaattgggataccagtggaagatgttgaccgaggccgagaaatggccgttcttccaagaggcccagaagcttcaagccatgcacagagagaaatatcctaactacaagtatcggcctaggagaaaagctaagatgctcccaaaaaactgctcattgctcccggcagaccctgccagtgtattatgcagtgaagttcaaggccaacaggtcgtccagggctag

SEQ ID NO: 135544 - DNA, 845 bp, Artificial Sequence
  derived and/or modified sequence
gtaacaaagaatctggtagaagtgagttttggatagtaaaataagtttcgaactctggcacctttcaattttgtcgcactctccttgtttttgacaatgcaatcatatgcttctgctatgttaagcgtattcaacagcgatgattacagtccagctgtgcaagagaatattcccgctctccggagaagctcttccttcctttgcactgaaagctgtaactctaagtatcagtgtgaaacgggagaaaacagtaaaggcaacgtccaggatagagtgaagcgacccatgaacgcattcatcgtgtggtctcgcgatcagaggcgcaagatggctctagagaatcccagaatgcgaaactcagagatcagcaagcagctgggataccagtggaaaatgcttactgaagccgaaaaatggccattcttccaggaggcacagaaattacaggccatgcacagagagaaatacccgaattataagtatcgacctcgtcggaaggcgaagatgctgccgaagaattgcagtttgcttcccgcagatcccgcttcggtactctgcagcgaagtgcaactggacaacaggttgtacagggatgactgtacgaaagccacacactcaagaatggagcaccagctaggccacttaccgcccatcaacgcagccagctcaccgcagcaacgggaccgctacagccactggacaaagctgtaggacaatcgggtaacattggctacaaagacctacctagatgctcctttttacgataacttacagccctcactttcttatgtttagtttcaatattgttttcttttctctggctaataaaggccttattcatttca

SEQ ID NO: 135545 - DNA, 591 bp, Artificial Sequence
  derived and/or modified sequence
atgcaatcatatgcttctgctatgttaagcgtattcaacagcgatgattacagtccagctgtgcaagagaatattcccgctctccggagaagctcttccttcctttgcactgaaagctgtaactctaagtatcagtgtgaaacgggagaaaacagtaaaggcaacgtccaggatagagtgaagcgacccatgaacgcattcatcgtgtggtctcgcgatcagaggcgcaagatggctctagagaatcccagaatgcgaaactcagagatcagcaagcagctgggataccagtggaaaatgcttactgaagccgaaaaatggccattcttccaggaggcacagaaattacaggccatgcacagagagaaatacccgaattataagtatcgacctcgtcggaaggcgaagatgctgccgaagaattgcagtttgcttcccgcagatcccgcttcggtactctgcagcgaagtgcaactggacaacaggttgtacagggatgactgtacgaaagccacacactcaagaatggagcaccagctaggccacttaccgcccatcaacgcagccagcgcagcaacgggaccgctacag

SEQ ID NO: 135546 - DNA, 498 bp, Artificial Sequence
  derived and/or modified sequence
atgcaatcatatgcttctgctatgttaagcgtattcaacagcgatgattacagtccagctgtgcaagagaatattcccgctctccggagaagctcttccttcctttgcactgaaagctgtaactctaagtatcagtgtgaaacgggagaaaacagtaaaggcaacgtccaggatagagtgaagcgacccatgaacgcattcatcgtgtggtctcgcgatcagaggcgcaagatggctctagagaatcccagaatgcgaaactcagagatcagcaagcagctgggataccagtggaaaatgcttactgaagccgaaaaatggccattcttccaggaggcacagaaattacaggccatgcacagagagaaatacccgaattataagtatcgacctcgtcggaaggcgaagatgctgccgaagaattgcagtttgcttcccgcagatcccgcttcggtactctgcagcgaagtgcaaggacaacaggttgtacagggatga

SEQ ID NO: 135547 - DNA, 615 bp, Artificial Sequence
  derived and/or modified sequence
atgcagagctacgccagcgccatgctgagcgtgttcaacagcgacgactacagccccgccgtgcaggagaacatccccgccctgagaagaagcagcagcttcctgtgcaccgagagctgcaacagcaagtaccagtgcgagaccggcgagaacagcaagggcaacgtgcaggacagagtgaagagacccatgaacgccttcatcgtgtggagcagagaccagagaagaaagatggccctggagaaccccagaatgagaaacagcgagatcagcaagcagctgggctaccagtggaagatgctgaccgaggccgagaagtggcccttcttccaggaggcccagaagctgcaggccatgcacagagagaagtaccccaactacaagtacagacccagaagaaaggccaagatgctgcccaagaactgcagcctgctgcccgccgaccccgccagcgtgctgtgcagcgaggtgcagctggacaacagactgtacagagacgactgcaccaaggccacccacagcagaatggagcaccagctgggccacctgccccccatcaacgccgccagcagcccccagcagagagacagatacagccactggaccaagctgtag

SEQ ID NO: 135548 - DNA, 594 bp, Artificial Sequence
  derived and/or modified sequence
atgcagagctacgccagcgccatgctgagcgtgttcaacagcgacgactacagccccgccgtgcaggagaacatccccgccctgagaagaagcagcagcttcctgtgcaccgagagctgcaacagcaagtaccagtgcgagaccggcgagaacagcaagggcaacgtgcaggacagagtgaagagacccatgaacgccttcatcgtgtggagcagagaccagagaagaaagatggccctggagaaccccagaatgagaaacagcgagatcagcaagcagctgggctaccagtggaagatgctgaccgaggccgagaagtggcccttcttccaggaggcccagaagctgcaggccatgcacagagagaagtaccccaactacaagtacagacccagaagaaaggccaagatgctgcccaagaactgcagcctgctgcccgccgaccccgccagcgtgctgtgcagcgaggtgcagctggacaacagactgtacagagacgactgcaccaaggccacccacagcagaatggagcaccagctgggccacctgccccccatcaacgccgccagcgccgccaccggccccctgcagtag

SEQ ID NO: 135549 - DNA, 498 bp, Artificial Sequence
  derived and/or modified sequence
atgcagagctacgccagcgccatgctgagcgtgttcaacagcgacgactacagccccgccgtgcaggagaacatccccgccctgagaagaagcagcagcttcctgtgcaccgagagctgcaacagcaagtaccagtgcgagaccggcgagaacagcaagggcaacgtgcaggacagagtgaagagacccatgaacgccttcatcgtgtggagcagagaccagagaagaaagatggccctggagaaccccagaatgagaaacagcgagatcagcaagcagctgggctaccagtggaagatgctgaccgaggccgagaagtggcccttcttccaggaggcccagaagctgcaggccatgcacagagagaagtaccccaactacaagtacagacccagaagaaaggccaagatgctgcccaagaactgcagcctgctgcccgccgaccccgccagcgtgctgtgcagcgaggtgcagggccagcaggtggtgcagggctag

SEQ ID NO: 135550 - protein, 475 aa, Artificial Sequence [sequence omitted]

SEQ ID NO: 135551 - protein, 475 aa, Artificial Sequence
  derived and/or modified sequence
MASAARLTMMWEEVTCPICLDPFVEPVSIECGHSFCQECISQVGKGGGSVCPVCRQRFLLKNLRPNRQLANMVNNLKEISQEAREGTQGERCAVHGERLHLFCEKDGKALCWVCAQSRKHRDHAMVPLEEAAQEYQEKLQVALGELRRKQELAEKLEVEIAIKRADWKKTVETQKSRIHAEFVQQKNFLVEEEQRQLQELEKDEREQLRILGEKEAKLAQQSQALQELISELDRRCHSSALELLQEVIVLGPRSESWNLKDLDITSPELRSVCHVPGLKKMLRTCAVHITLDPDTANPWLILSEDRRQVRLGDTQQSIPGNEERFDSYPMVLGAQHFHSGKHYWEVDVTGKEAWDLGVCRDSVRRKGHFLLSSKSGFWTIWLWNKQKYEAGTYPQTPLHLQVPPCQVGIFLDYEAGMVSFYNITDHGSLIYSFSECAFTGPLRPFFSPGFNDGGKNTAPLTLCPLNIGSQGSTDY

SEQ ID NO: 135552 - DNA, 1946 bp, Artificial Sequence
  derived and/or modified sequence
gcttctgagcggaaactgaaagtgaaatagggagctggctaccagcgttgagtcccctgtaaagccaaaccccctaaaggtctccacactgctgtttaacggcacacttgacaatggcttcagcagcacgcttgacaatgatgtgggaggaggtcacatgccctatctgcctggaccccttcgtggagcctgtgagcatcgagtgtggccacagcttctgccaggaatgcatctctcaggttgggaaaggtgggggcagcgtctgtcctgtgtgccggcagcgctttctgctcaagaatctccggcccaatcgacagctagccaacatggtgaacaaccttaaagaaatcagccaggaggccagagagggcacacagggggaacggtgtgcagtgcatggagagagacttcacctgttctgtgagaaagatgggaaggccctttgctgggtatgtgcccagtctcggaaacaccgtgaccacgccatggtccctcttgaggaggctgcacaggagtaccaggagaagctccaggtggcattaggggaactgagaagaaagcaggagttggctgagaagttggaagtggaaattgcaataaagagagcagactggaagaaaacagtggaaacacagaaatctaggattcacgcagagtttgtgcagcaaaaaaacttcctggttgaagaagaacagaggcagctgcaggagctggagaaggatgagagggagcagctgagaatcctgggggagaaagaggccaagctggcccagcagagccaggccctacaggagctcatctcagagctagatcgaaggtgccacagctcagcactggaactgctgcaggaggtgataattgtcctggaaaggagtgagtcctggaacctgaaggacctggatattacctctccagaactcaggagtgtgtgccatgtgccagggctgaagaagatgctgaggacatgtgcagtccacatcactctggatccagacacagccaatccgtggctgatactttcagaagatcggagacaagtgaggcttggagacacccagcagagcatacctggaaatgaagagagatttgatagttatcctatggtcctgggtgcccagcactttcactctggaaaacattactgggaggtagatgtgacaggaaaggaggcctgggacctgggtgtctgcagagactctgtgcgcaggaaggggcactttttgcttagttccaagagtggcttctggacaatttggttgtggaacaaacaaaaatatgaggctggcacctacccccagactcccctccaccttcaggtgcctccatgccaagttgggattttcctggactatgaggctggcatggtctccttctacaacatcactgaccatggctccctcatctactccttctctgaatgtgcctttacaggacctctgcggcccttcttcagtcctggtttcaatgatggaggaaaaaacacagcccctctaaccctctgtccactgaatattggatcacaaggatccactgactattgatggctttctctggacactgccactctccccattggcaccgcttctcagccacaaaccctgcctcttttccccatgaactctgaaccacctttgtctctgcagaggcatccggatcccagcaagcgagctttagcagggaagtcacttcaccatcaacattcctgccccagatggctttgtgattccctccagtgaagcagcctccttatatttggcccaaactcatcttgatcaaccaaaaacatgtttctgccttctttatgggacttaagttttttttttctcctctccatctctaggatgtcgtctttggtgagatctctattatatcttgtatggtttgcaaaagggcttcctaaaaataaaaaataaaatttaaaaaactgtgaaaaaaaaaaaaaaaaa

SEQ ID NO: 135553 - DNA, 1428 bp, Artificial Sequence
  derived and/or modified sequence
atggccagcgccgccagactgaccatgatgtgggaggaggtgacctgccccatctgcctggaccccttcgtggagcccgtgagcatcgagtgcggccacagcttctgccaggagtgcatcagccaggtgggcaagggcggcggcagcgtgtgccccgtgtgcagacagagattcctgctgaagaacctgagacccaacagacagctggccaacatggtgaacaacctgaaggagatcagccaggaggccagagagggcacccagggcgagagatgcgccgtgcacggcgagagactgcacctgttctgcgagaaggacggcaaggccctgtgctgggtgtgcgcccagagcagaaagcacagagaccacgccatggtgcccctggaggaggccgcccaggagtaccaggagaagctgcaggtggccctgggcgagctgagaagaaagcaggagctggccgagaagctggaggtggagatcgccatcaagagagccgactggaagaagaccgtggagacccagaagagcagaatccacgccgagttcgtgcagcagaagaacttcctggtggaggaggagcagagacagctgcaggagctggagaaggacgagagagagcagctgagaatcctgggcgagaaggaggccaagctggcccagcagagccaggccctgcaggagctgatcagcgagctggacagaagatgccacagcagcgccctggagctgctgcaggaggtgatcatcgtgctggagagaagcgagagctggaacctgaaggacctggacatcaccagccccgagctgagaagcgtgtgccacgtgcccggcctgaagaagatgctgagaacctgcgccgtgcacatcaccctggaccccgacaccgccaacccctggctgatcctgagcgaggacagaagacaggtgagactgggcgacacccagcagagcatccccggcaacgaggagagattcgacagctaccccatggtgctgggcgcccagcacttccacagcggcaagcactactgggaggtggacgtgaccggcaaggaggcctgggacctgggcgtgtgcagagacagcgtgagaagaaagggccacttcctgctgagcagcaagagcggcttctggaccatctggctgtggaacaagcagaagtacgaggccggcacctacccccagacccccctgcacctgcaggtgcccccctgccaggtgggcatcttcctggactacgaggccggcatggtgagcttctacaacatcaccgaccacggcagcctgatctacagcttcagcgagtgcgccttcaccggccccctgagacccttcttcagccccggcttcaacgacggcggcaagaacaccgcccccctgaccctgtgccccctgaacatcggcagccagggcagcaccgactactag

SEQ ID NO: 135554 - DNA, 1428 bp, Artificial Sequence
  derived and/or modified sequence
atggccagcgccgccagactgaccatgatgtgggaggaggtgacctgccccatctgcctggaccccttcgtggagcccgtgagcatcgagtgcggccacagcttctgccaggagtgcatcagccaggtgggcaagggcggcggcagcgtgtgccccgtgtgcagacagagattcctgctgaagaacctgagacccaacagacagctggccaacatggtgaacaacctgaaggagatcagccaggaggccagagagggcacccagggcgagagatgcgccgtgcacggcgagagactgcacctgttctgcgagaaggacggcaaggccctgtgctgggtgtgcgcccagagcagaaagcacagagaccacgccatggtgcccctggaggaggccgcccaggagtaccaggagaagctgcaggtggccctgggcgagctgagaagaaagcaggagctggccgagaagctggaggtggagatcgccatcaagagagccgactggaagaagaccgtggagacccagaagagcagaatccacgccgagttcgtgcagcagaagaacttcctggtggaggaggagcagagacagctgcaggagctggagaaggacgagagagagcagctgagaatcctgggcgagaaggaggccaagctggcccagcagagccaggccctgcaggagctgatcagcgagctggacagaagatgccacagcagcgccctggagctgctgcaggaggtgatcgtgctgggccccagaagcgagagctggaacctgaaggacctggacatcaccagccccgagctgagaagcgtgtgccacgtgcccggcctgaagaagatgctgagaacctgcgccgtgcacatcaccctggaccccgacaccgccaacccctggctgatcctgagcgaggacagaagacaggtgagactgggcgacacccagcagagcatccccggcaacgaggagagattcgacagctaccccatggtgctgggcgcccagcacttccacagcggcaagcactactgggaggtggacgtgaccggcaaggaggcctgggacctgggcgtgtgcagagacagcgtgagaagaaagggccacttcctgctgagcagcaagagcggcttctggaccatctggctgtggaacaagcagaagtacgaggccggcacctacccccagacccccctgcacctgcaggtgcccccctgccaggtgggcatcttcctggactacgaggccggcatggtgagcttctacaacatcaccgaccacggcagcctgatctacagcttcagcgagtgcgccttcaccggccccctgagacccttcttcagccccggcttcaacgacggcggcaagaacaccgcccccctgaccctgtgccccctgaacatcggcagccagggcagcaccgactactag

SEQ ID NO: 135555 - DNA, 1428 bp, Artificial Sequence
  derived and/or modified sequence
atggccagcgcagcgagactcactatgatgtgggaggaagtgacatgtcctatttgcctggatccttttgtggagccggtgtcgatagagtgtgggcacagtttttgccaagaatgcatcagccaggtgggtaagggaggcggcagcgtctgtcccgtctgtcgacaaagattcctcctgaagaacttgaggcctaaccgccaacttgctaatatggtaaacaacttaaaggagataagtcaggaggcaagagaaggcactcagggggaaaggtgtgctgtgcatggcgaaaggttgcatcttttttgtgaaaaggacggcaaggctctgtgttgggtgtgcgctcaaagtagaaaacaccgggaccatgctatggtaccactcgaggaggctgctcaggaataccaagagaagctgcaggtggccctgggagaactgaggaggaaacaagaactggcagagaaactcgaagtggaaattgccatcaaaagggcagattggaaaaaaacagttgaaacacagaagtctcgcattcatgctgagttcgtgcaacaaaagaacttcctagtggaggaggagcagcgccagctgcaggagttagaaaaggatgagagagagcagctgagaatcttgggagagaaggaggccaaactcgctcagcagtcccaggctctgcaggaactgatctccgagttggacaggaggtgccattcatctgctttggaactcttacaagaggttataatagtgctggagcgtagcgagtcatggaacctgaaggacctggatattacctccccagagctgaggtcagtgtgtcatgtcccgggactcaagaaaatgttgcgcacatgcgccgttcatattaccttggacccagatacagctaacccttggctgatactctctgaagatagacgacaggttcgcttaggggacactcagcagtcaattccgggcaatgaagagagatttgacagctaccccatggtgttgggagcgcagcatttccacagcggcaaacactactgggaggtggacgttaccgggaaggaggcatgggatctcggcgtgtgcagggattccgttagacgaaaaggccacttcctcctttcttcaaaaagcggcttttggaccatctggctctggaataagcaaaaatatgaggctggaacctatccccagacaccgctacatctgcaggttcctccatgtcaggtcggcattttccttgactacgaggctggcatggtgagcttttataacatcaccgatcacggtagcctgatctactcattttctgagtgcgccttcacgggccctctgcggccgttcttttccccaggctttaatgatggcggaaaaaacaccgctcctttgaccctgtgcccccttaatattgggagccagggctccacagattactag

SEQ ID NO: 135556 - DNA, 1428 bp, Artificial Sequence
  derived and/or modified sequence
atggcttctgccgctaggctgactatgatgtgggaagaagtgacgtgcccaatctgtttagacccgttcgtagagcctgtgtccatcgagtgtggacactccttctgtcaggagtgcatttcgcaggttggcaaaggtggtggttccgtgtgcccagtttgccggcagcggtttcttttaaaaaacctgaggccaaacaggcagctggcaaacatggtgaacaatctgaaggaaatctcccaggaagctagagaaggtacccagggtgaacgctgcgctgtgcacggagaaaggctgcacttgttctgcgaaaaagacggtaaggccttgtgttgggtttgcgctcagtcccgcaaacaccgcgaccatgcaatggtccctctggaggaggctgcccaagagtatcaggagaaactgcaggtagccctgggagagcttagaagaaagcaagaactcgccgaaaagctggaggtggaaatagccataaaacgggccgattggaaaaagaccgtagagacacaaaaatctcggatacacgccgagtttgtccagcaaaagaatttcctggttgaagaggagcaacggcaacttcaggaactcgaaaaggacgagagagaacagctgaggatcctcggcgagaaggaggcaaagctcgctcagcagagtcaggctctccaggaattgatatccgaacttgaccgacggtgtcactcttcagcccttgaactcctacaggaggtgatcgtgttgggccctcggtcagagtcttggaatctgaaggatctagacataacgtctcctgagttacggagcgtctgtcatgtgcccggattgaaaaaaatgttgcgaacatgtgctgtccatattacattggaccctgataccgccaatccctggcttattctctctgaagaccggcgccaagtgcgtctgggggacacccagcagagcattccaggcaatgaggagcgctttgactcatatccaatggtgctgggggcacagcactttcactctggcaagcattattgggaagtagatgtcactgggaaagaggcttgggatctgggagtgtgtcgagattctgtgcggcggaagggccatttcctgctttcctctaaatccggtttttggaccatttggctgtggaataagcaaaagtacgaagctgggacatatccacagactccactgcacctgcaagtccccccctgtcaggtgggtattttccttgactatgaggcaggcatggtgtccttttacaacattactgatcacggcagtctgatctatagtttctcggagtgcgcatttaccggcccactgcgcccgtttttctctccaggctttaacgacggaggcaagaatacagcccctttgacactgtgtcccctgaacataggcagtcagggaagtactgactactag

SEQ ID NO: 135557 - DNA, 1428 bp, Artificial Sequence
  derived and/or modified sequence
atggccagcgctgcccggctgaccatgatgtgggaggaggtgacctgccccatctgcctggacccctttgtggagcctgtgtccattgaatgtggccacagcttctgccaggagtgcatcagccaggtgggcaaaggaggcggctctgtgtgccctgtgtgccggcagcgcttcctgctgaagaacctgcggcccaaccggcagctggccaacatggtgaacaacctgaaggagatcagccaggaggcccgggagggcacccagggcgagcgctgtgctgtgcatggagagcggctgcacctgttctgtgagaaggatggcaaggccctgtgctgggtgtgtgcccagagcaggaagcaccgggaccacgccatggtgcccctggaggaggccgcccaggagtaccaggagaagctgcaggtggccctgggggagctgcggaggaagcaggagctggccgagaagctggaggtggagatcgccatcaagagagctgactggaagaagacagtggagacccagaagagccgcatccacgccgagtttgtgcagcagaagaacttcctggtggaggaggagcagaggcagctgcaggagctggagaaggatgagcgggagcagctgcgcatcctgggggagaaggaggccaagctggcccagcagagccaggccctgcaggagctgatcagcgagctggaccggcgctgccacagcagcgccctggagctgctgcaggaggtgatcatcgtgctggagaggtctgagagctggaacctgaaggacctggacatcaccagccctgagctgcggtctgtgtgccacgtgcccggcctgaagaagatgctgcggacctgtgctgtgcacatcaccctggaccctgacacagccaacccctggctgatcctgtctgaggaccggcggcaggtgcggctgggggacacccagcagagcatccctggaaatgaggagagatttgacagctaccccatggtgctgggcgcccagcacttccacagcggcaagcactactgggaggtggatgtgacaggcaaggaggcctgggacctgggcgtgtgccgggacagcgtgcggaggaagggccacttcctgctgagcagcaagagcggcttctggaccatctggctgtggaacaagcagaagtatgaggccggcacctacccccagacccccctgcacctgcaggtgcccccctgccaggtgggcatcttcctggactatgaagctggcatggtgtccttctacaacatcacagaccacggcagcctcatctacagcttctctgaatgtgccttcaccggccccctgcggcccttcttcagccctggcttcaatgatggcggcaagaacacagcccccctgaccctgtgccccctgaacatcggcagccagggcagcacagactactag

SEQ ID NO: 135558 - DNA, 1428 bp, Artificial Sequence
  derived and/or modified sequence
atggccagcgctgcccggctgaccatgatgtgggaggaggtgacctgccccatctgcctggacccctttgtggagcctgtgtccattgaatgtggccacagcttctgccaggagtgcatcagccaggtgggcaaaggaggcggctctgtgtgccctgtgtgccggcagcgcttcctgctgaagaacctgcggcccaaccggcagctggccaacatggtgaacaacctgaaggagatcagccaggaggcccgggagggcacccagggcgagcgctgtgctgtgcatggagagcggctgcacctgttctgtgagaaggatggcaaggccctgtgctgggtgtgtgcccagagcaggaagcaccgggaccacgccatggtgcccctggaggaggccgcccaggagtaccaggagaagctgcaggtggccctgggggagctgcggaggaagcaggagctggccgagaagctggaggtggagatcgccatcaagagagctgactggaagaagacagtggagacccagaagagccgcatccacgccgagtttgtgcagcagaagaacttcctggtggaggaggagcagaggcagctgcaggagctggagaaggatgagcgggagcagctgcgcatcctgggggagaaggaggccaagctggcccagcagagccaggccctgcaggagctgatcagcgagctggaccggcgctgccacagcagcgccctggagctgctgcaggaggtgattgtgctgggccccaggtctgagagctggaacctgaaggacctggacatcaccagccctgagctgcggtctgtgtgccacgtgcccggcctgaagaagatgctgcggacctgtgctgtgcacatcaccctggaccctgacacagccaacccctggctgatcctgtctgaggaccggcggcaggtgcggctgggggacacccagcagagcatccctggaaatgaggagagatttgacagctaccccatggtgctgggcgcccagcacttccacagcggcaagcactactgggaggtggatgtgacaggcaaggaggcctgggacctgggcgtgtgccgggacagcgtgcggaggaagggccacttcctgctgagcagcaagagcggcttctggaccatctggctgtggaacaagcagaagtatgaggccggcacctacccccagacccccctgcacctgcaggtgcccccctgccaggtgggcatcttcctggactatgaagctggcatggtgtccttctacaacatcacagaccacggcagcctcatctacagcttctctgaatgtgccttcaccggccccctgcggcccttcttcagccctggcttcaatgatggcggcaagaacacagcccccctgaccctgtgccccctgaacatcggcagccagggcagcacagactactag

SEQ ID NO: 135559 - DNA, 1428 bp, Artificial Sequence
  derived and/or modified sequence
atggccagcgccgcccggctgaccatgatgtgggaggaggtgacctgtcccatctgtctggatccatttgtagaacccgtctcgattgagtgcggacatagtttctgtcaggagtgcatttctcaggtgggcaagggcggcggctcggtgtgccccgtgtgcagacagcggtttctgttgaagaatttacgccccaataggcagctggccaatatggtcaacaacctgaaggagatatctcaggaggcaagagagggcacacaaggggagcgatgcgccgtccacggcgagagacttcacttattttgtgagaaggatggaaaagccttatgttgggtctgcgctcagtccaggaagcatagggaccacgcaatggtgcctctggaggaggccgctcaggaataccaggagaaactccaggtcgccttgggggagttgcgcaggaaacaggagctcgccgagaaattggaagtagaaattgccataaaaagagctgactggaaaaagaccgttgagacacagaagtccaggattcatgccgaatttgttcagcagaagaacttcttggtcgaagaggagcagcggcaactacaggagctggaaaaggacgagcgcgaacaactgagaattttgggcgagaaggaagcaaaactggcacagcagtcacaagctttgcaggaactcatctctgagctcgaccggcgttgccattccagtgctctcgagttgctacaggaggtaatcatcgtgctggagcggtcagaaagctggaacctcaaggatctcgatatcacaagccctgagttacgctccgtgtgccacgtgcctgggctcaagaagatgttgagaacatgtgctgtacacattaccttagacccagataccgcgaacccctggctcattctttccgaagaccggaggcaggtgcggctcggagacacccaacagtcgatcccagggaacgaggaacggtttgactcttaccctatggtactcggagcccagcatttccacagcggcaagcactactgggaagtcgacgttacggggaaggaagcttgggatcttggagtgtgtagagactcagtgaggcgcaaaggccatttcttgttgtcctcaaagtccggcttttggaccatctggctttggaacaagcagaagtatgaggccgggacttacccccagaccccactgcacctgcaagtaccgccctgccaagtgggcatcttccttgattacgaagcaggcatggtgtctttctacaacatcaccgatcatggctcgcttatatacagcttctctgagtgtgccttcactgggccgctcagaccgtttttcagccccggatttaacgacggaggaaagaatacagccccgctgacactttgtccgctgaacatcgggtcacagggtagtaccgattactag

SEQ ID NO: 135560 - DNA, 1428 bp, Artificial Sequence
  derived and/or modified sequence
atggccagcgccgcccggctgaccatgatgtgggaggaggtgacctgtcccatctgcttagatcctttcgtagaacccgtctccattgagtgcggccatagtttttgccaagagtgtatcagtcaagtcggaaaggggggcggatccgtgtgccccgtgtgtcgacagcgctttttgctgaagaatctgcggcccaacaggcagctcgcgaacatggtgaacaaccttaaagagatttcccaagaagcccgcgagggcacccagggtgaacggtgcgccgtgcacggtgagaggctccacttattttgtgaaaaggatggcaaggcactgtgctgggtgtgcgcccagagccgtaaacatcgggaccacgccatggtccccctggaggaagcagctcaggaatatcaggagaaactacaggtggcactcggggagttacggcggaagcaagagctcgccgaaaagttagaggtcgagatagcaattaagagggctgactggaagaagacggtggaaacacaaaagtccaggatacacgccgagtttgtgcagcagaaaaatttcctagtggaggaagagcagcgccagcttcaggaattggaaaaggatgagcgagaacagttgcgaattctgggggagaaagaagctaagctggcccaacagtcccaggctctccaggagctgatctcagagctagacagaagatgtcacagcagcgccctggagctcttacaggaagttatcgtgctgggccctcggagtgaaagctggaatcttaaagatcttgacatcaccagccccgaactacgttccgtgtgtcatgtgcctggtttgaaaaagatgctgcgtacctgtgctgtgcacatcaccctggatcccgatacagcaaacccctggctgatccttagtgaggacagaaggcaagtgcggttaggagatacacagcagagtatacctggaaacgaagagagattcgattcataccctatggtgctcggagctcagcacttccatagcggaaaacattattgggaagtcgacgtaaccggaaaggaggcatgggatctgggggtttgtagggactctgtccgcagaaaaggacattttttgctgagttcaaaaagcggcttctggaccatatggctctggaataaacagaagtacgaagccggaacatatccacagactcctttacatctgcaagtgccaccctgccaggtgggtatattccttgattatgaagccgggatggtgtccttctacaacatcacggatcatgggagccttatctacagcttcagcgaatgtgctttcaccgggcccttgcggccgttcttcagtccagggtttaatgatggcggtaagaacacggcgccactgactttgtgtcctttgaatattggatcgcaaggcagcacagattactag

SEQ ID NO: 135561 - DNA, 1428 bp, Artificial Sequence
  derived and/or modified sequence
atggcctctgcggctaggctgactatgatgtgggaagaggtaacatgtcccatttgcttggatcctttcgttgagccagttagcattgagtgcggccactcgttttgccaggaatgtatatctcaagttggcaaaggaggcggtagtgtgtgtcctgtatgcaggcaacggttcctgctaaaaaacctgagacccaatcgacagctggcaaatatggtcaacaatttaaaggaaatctcacaggaggccagagaaggtactcagggggaacggtgcgctgtgcatggagaacggttacatttgttctgcgagaaggatggtaaggctctgtgctgggtgtgcgcccagtcgaggaagcaccgcgatcacgctatggtcccacttgaagaagcggctcaggagtaccaggagaagctccaggtggccttaggagagctgcggaggaagcaggaacttgctgagaaacttgaagtcgagattgcgattaagcgggcagactggaagaaaaccgtggaaacacagaagagcagaatccatgcagaatttgtccaacaaaagaatttccttgtcgaggaggagcagagacagctgcaggaactggagaaggatgaaagggagcaactcagaatactcggggaaaaggaggcaaagctggctcagcagtctcaggccctgcaggaattgatctcagagttggatcgacgctgccactccagtgccttagaactgttgcaggaggtgataatcgtgctggagcggtccgagtcgtggaacctgaaggaccttgatatcacgagcccagaactcaggtctgtatgtcacgtgccaggactgaaaaagatgcttagaacgtgtgctgtacacattacgctggatcccgataccgctaatccctggctgatcctgagtgaggacagacggcaggttagactgggagacacccagcaaagtatcccgggaaacgaggagaggttcgactcataccccatggtactcggtgcccagcactttcactcgggcaagcactactgggaggtcgatgtcacgggaaaggaggcctgggatctcggagtgtgccgcgattctgtccgacggaagggccatttcctcctgtctagcaagagcggcttttggaccatttggttgtggaacaaacagaagtacgaggcaggtacatatccacagacccctctgcatctgcaggtacctccatgccaggtggggatctttctggattacgaagcgggaatggtgagtttctataacattacagaccacggtagtctcatctactctttctctgagtgtgcttttacaggccctctccggccattttttagccccggatttaacgatggaggcaaaaacaccgctccattgaccttatgcccactgaacatagggtcgcagggaagtaccgactactag

SEQ ID NO: 135562 - DNA, 1428 bp, Artificial Sequence
  derived and/or modified sequence
atggcctcagccgctcgtctgacaatgatgtgggaggaagtgacttgtccaatttgccttgatcctttcgtagaacccgtatcaatcgaatgcggtcatagcttctgtcaggagtgtatcagtcaggtcggaaaaggcggtgggtctgtatgcccagtatgtcgccaacgcttcctactgaaaaatctcaggcccaaccgccagcttgccaatatggtgaataatctgaaggagatatctcaggaagccagggaggggactcagggggaaagatgtgcagttcacggggagcgtctacatttattctgcgaaaaagacggcaaagctctatgttgggtttgtgctcagtctcgcaagcacagagatcacgccatggttcccctggaggaggctgcgcaggagtaccaggagaagttgcaggtcgccctgggggagctcaggcggaagcaggagctggccgagaagctggaagtagagatcgccatcaaacgcgctgactggaaaaaaactgtagagacccagaagtctagaatccacgcggagttcgtgcagcaaaaaaacttcctggtggaagaagagcagcgccaattgcaggagctggagaaggacgagcgggaacagctccgaattctgggggagaaggaagctaaactcgcacagcaatcacaggccctgcaggaactcattagcgagctagataggcggtgccattcatccgcactagagttattacaggaggtaatagtgctgggcccaaggtccgagagctggaacctgaaggacctggacattacttcacccgaacttaggtcggtgtgccacgtccccggtcttaagaaaatgctgagaacgtgcgctgtccatattacactggaccccgatacagctaacccatggctgattcttagcgaagacagacgacaggtgaggctgggggacactcagcagtcaattcccggtaatgaggaaaggttcgattcctacccaatggttctgggtgctcagcacttccactctgggaagcactattgggaggttgacgtgacaggtaaagaagcttgggatttgggcgtgtgtcgcgattccgtccggagaaagggacacttcctgttgagcagcaagagtgggttctggacaatctggctgtggaacaaacaaaagtatgaggctggcacatacccccagacacctctccatcttcaggtgcccccttgtcaagttgggatcttcctagattatgaggccggaatggtgtccttttataacatcacggaccacggcagtctgatctattcctttagcgaatgtgcattcactggcccactgcgacccttcttctctcccggattcaacgatggaggaaaaaacactgctccactcacactgtgccctcttaacatcggctcccagggcagtacggactattag

SEQ ID NO: 135563 - DNA, 1924 bp, Artificial Sequence
  derived and/or modified sequence
gcttctgagcggaaactgaaagtgaaatagggagctggctaccagcgttgagtcccctgtaaagccaaaccccctaaaggtctccacactgctgtttaacggcacacttgacaatggcttcagcagcacgcttgacaatgatgtgggaggaggtcacatgccctatctgcctggaccccttcgtggagcctgtgagcatcgagtgtggccacagcttctgccaggaatgcatctctcaggttgggaaaggtgggggcagcgtctgtcctgtgtgccggcagcgctttctgctcaagaatctccggcccaatcgacagctagccaacatggtgaacaaccttaaagaaatcagccaggaggccagagagggcacacagggggaacggtgtgcagtgcatggagagagacttcacctgttctgtgagaaagatgggaaggccctttgctgggtatgtgcccagtctcggaaacaccgtgaccacgccatggtccctcttgaggaggctgcacaggagtaccaggagaagctccaggtggcattaggggaactgagaagaaagcaggagttggctgagaagttggaagtggaaattgcaataaagagagcagactggaagaaaacagtggaaacacagaaatctaggattcacgcagagtttgtgcagcaaaaaaacttcctggttgaagaagaacagaggcagctgcaggagctggagaaggatgagagggagcagctgagaatcctgggggagaaagaggccaagctggcccagcagagccaggccctacaggagctcatctcagagctagatcgaaggtgccacagctcagcactggaactgctgcaggaggtgataattgtcctggaaaggagtgagtcctggaacctgaaggacctggatattacctctccagaactcaggagtgtgtgccatgtgccagggctgaagaagatgctgaggacatgtgcagtccacatcactctggatccagacacagccaatccgtggctgatactttcagaagatcggagacaagtgaggcttggagacacccagcagagcatacctggaaatgaagagagatttgatagttatcctatggtcctgggtgcccagcactttcactctggaaaacattactgggaggtagatgtgacaggaaaggaggcctgggacctgggtgtctgcagagactctgtgcgcaggaaggggcactttttgcttagttccaagagtggcttctggacaatttggttgtggaacaaacaaaaatatgaggctggcacctacccccagactcccctccaccttcaggtgcctccatgccaagttgggattttcctggactatgaggctggcatggtctccttctacaacatcactgaccatggctccctcatctactccttctctgaatgtgcctttacaggacctctgcggcccttcttcagtcctggtttcaatgatggaggaaaaaacacagcccctctaaccctctgtccactgaatattggatcacaaggatccactgactattgatggctttctctggacactgccactctccccattggcaccgcttctcagccacaaaccctgcctcttttccccatgaactctgaaccacctttgtctctgcagaggcatccggatcccagcaagcgagctttagcagggaagtcacttcaccatcaacattcctgccccagatggctttgtgattccctccagtgaagcagcctccttatatttggcccaaactcatcttgatcaaccaaaaacatgtttctgccttctttatgggacttaagttttttttttctcctctccatctctaggatgtcgtctttggtgagatctctattatatcttgtatggtttgcaaaagggcttcctaaaaataaaaaataaaatttaaaaaa

SEQ ID NO: 135564 - DNA, 1898 bp, Artificial Sequence
  derived and/or modified sequence
gcttctgagcggaaactgaaagtgaaatagggagctggctaccagcgttgagtcccctgtaaagccaaaccccctaaaggtctccacactgctgtttaacggcacacttgacaatggcttcagcagcacgcttgacaatgatgtgggaggaggtcacatgccctatctgcctggaccccttcgtggagcctgtgagcatcgagtgtggccacagcttctgccaggaatgcatctctcaggttgggaaaggtgggggcagcgtctgtcctgtgtgccggcagcgctttctgctcaagaatctccggcccaatcgacagctagccaacatggtgaacaaccttaaagaaatcagccaggaggccagagagggcacacagggggaacggtgtgcagtgcatggagagagacttcacctgttctgtgagaaagatgggaaggccctttgctgggtatgtgcccagtctcggaaacaccgtgaccacgccatggtccctcttgaggaggctgcacaggagtaccaggagaagctccaggtggcattaggggaactgagaagaaagcaggagttggctgagaagttggaagtggaaattgcaataaagagagcagactggaagaaaacagtggaaacacagaaatctaggattcacgcagagtttgtgcagcaaaaaaacttcctggttgaagaagaacagaggcagctgcaggagctggagaaggatgagagggagcagctgagaatcctgggggagaaagaggccaagctggcccagcagagccaggccctacaggagctcatctcagagctagatcgaaggtgccacagctcagcactggaactgctgcaggaggttatagtgttaggccccaggagtgagtcctggaacctgaaggacctggatattacctctccagaactcaggagtgtgtgccatgtgccagggctgaagaagatgctgaggacatgtgcagtccacatcactctggatccagacacagccaatccgtggctgatactttcagaagatcggagacaagtgaggcttggagacacccagcagagcatacctggaaatgaagagagatttgatagttatcctatggtcctgggtgcccagcactttcactctggaaaacattactgggaggtagatgtgacaggaaaggaggcctgggacctgggtgtctgcagagactctgtgcgcaggaaggggcactttttgcttagttccaagagtggcttctggacaatttggttgtggaacaaacaaaaatatgaggctggcacctacccccagactcccctccaccttcaggtgcctccatgccaagttgggattttcctggactatgaggctggcatggtctccttctacaacatcactgaccatggctccctcatctactccttctctgaatgtgcctttacaggacctctgcggcccttcttcagtcctggtttcaatgatggaggaaaaaacacagcccctctaaccctctgtccactgaatattggatcacaaggatccactgactattgatggctttctctggacactgccactctccccattggcaccgcttctcagccacaaaccctgcctcttttccccatgaactctgaaccacctttgtctctgcagaggcatccggatcccagcaagcgagctttagcagggaagtcacttcaccatcaacattcctgccccagatggctttgtgattccctccagtgaagcagcctccttatatttggcccaaactcatcttgatcaaccaaaaacatgtttctgccttctttatgggacttaagttttttttttctcctctccatctctaggatgtcgtctttggtgagatctctattatatcttgtatggtttgcaaaagggcttcct

SEQ ID NO: 135565 - protein, 408 aa, Artificial Sequence
  derived and/or modified sequence
MAENGDNEKMAALEAKICHQIEYYFGDFNLPRDKFLKEQIKLDEGWVPLEIMIKFNRLNRLTTDFNVIVEALSKSKAELMEISEDKTKIRRSPSKPLPEVTDEYKNDVKNRSVYIKGFPTDATLDDIKEWLEDKGQVLNIQMRRTLHKAFKGSIFVVFDSIESAKKFVETPGQKYKETDLLILFKDDYFAKKNEERKQNKVEAKLRAKQEQEAKQKLEEDAEMKSLEEKIGCLLKFSGDLDDQTCREDLHILFSNHGEIKWIDFVRGAKEGIILFKEKAKEALGKAKDANNGNLQLRNKEVTWEVLEGEVEKEALKKIIEDQQESLNKWKSKGRRFKGKGKGNKAAQPGSGKGKVQFQGKKTKFASDDEHDEHDENGATGPVKRAREETDKEEPASKQQKTENGAGDQ

SEQ ID NO: 135566 - protein, 361 aa, Artificial Sequence
  derived and/or modified sequence
MAENGDNEKMAALEAKICHQIEYYFGDFNLPRDKFLKEQIKLDEGWVPLEIMIKFNRLNRLTTDFNVIVEALSKSKAELMEISEDKTKIRRSPSKPLPEVTDEYKNDVKNRSVYIKGFPTDATLDDIKEWLEDKGQVLNIQMRRTLHKAFKGSIFVVFDSIESAKKFVETPGQKYKETDLLILFKDDYFAKKNEERKQNKVEAKLRAKQEQEAKQKLEEDAEMKSLEEKIGCLLKFSGDLDDQTCREDLHILFSNHGEIKWIDFVRGAKEGIILFKEKAKEALGKAKDANNGNLQLRNKEVTWEVLEGEVEKEALKKIIEDQQESLNKWKSKGPVKRAREETDKEEPASKQQKTENGAGDQ

SEQ ID NO: 135567 - protein, 134 aa, Artificial Sequence
  derived and/or modified sequence
MAENGDNEKMAALEAKICHQIEYYFGDFNLPRDKFLKEQIKLDEGWVPLEIMIKFNRLNRLTTDFNVIVEALSKSKAELMEISEDKTKIRRSPSKPLPEVTDEYKNDVKNRSVYISHPVAHVGVQWCDHGPLQS

SEQ ID NO: 135568 - protein, 120 aa, Artificial Sequence
  derived and/or modified sequence
MIKFNRLNRLTTDFNVIVEALSKSKAELMEISEDKTKIRRSPSKPLPEVTDEYKNDVKNRSVYIKGFPTDATLDDIKEWLEDKGQVLNIQMRRTLHKAFKGSIFVVFDSIESAKKFVETP

SEQ ID NO: 135569 - protein, 184 aa, Artificial Sequence
  derived and/or modified sequence
MAENGDNEKMAALEAKICHQIEYYFGDFNLPRDKFLKEQIKLDEGWVPLEIMIKFNRLNRLTTDFNVIVEALSKSKAELMEISEDKTKIRRSPSKPLPEVTDEYKNDVKNRSVYIKGFPTDATLDDIKEWLEDKGQVLNIQMRRTLHKAFKGSIFVVFDSIESAKKFVETPGQKYKETDLLILF

SEQ ID NO: 135570 - protein, 83 aa, Artificial Sequence
  derived and/or modified sequence
MRRTLHKAFKGSIFVVFDSIESAKKFVETPGQKYKETDLLILFKDDYFAKKNEERKQNKVEAKLRAKQEQEAKQKLEEDAEMK

SEQ ID NO: 135571 - DNA, 1227 bp, Artificial Sequence
  derived and/or modified sequence
atggccgagaacggcgacaacgagaagatggccgccctggaggccaagatctgccaccagatcgagtactacttcggcgacttcaacctgcccagagacaagttcctgaaggagcagatcaagctggacgagggctgggtgcccctggagatcatgatcaagttcaacagactgaacagactgaccaccgacttcaacgtgatcgtggaggccctgagcaagagcaaggccgagctgatggagatcagcgaggacaagaccaagatcagaagaagccccagcaagcccctgcccgaggtgaccgacgagtacaagaacgacgtgaagaacagaagcgtgtacatcaagggcttccccaccgacgccaccctggacgacatcaaggagtggctggaggacaagggccaggtgctgaacatccagatgagaagaaccctgcacaaggccttcaagggcagcatcttcgtggtgttcgacagcatcgagagcgccaagaagttcgtggagacccccggccagaagtacaaggagaccgacctgctgatcctgttcaaggacgactacttcgccaagaagaacgaggagagaaagcagaacaaggtggaggccaagctgagagccaagcaggagcaggaggccaagcagaagctggaggaggacgccgagatgaagagcctggaggagaagatcggctgcctgctgaagttcagcggcgacctggacgaccagacctgcagagaggacctgcacatcctgttcagcaaccacggcgagatcaagtggatcgacttcgtgagaggcgccaaggagggcatcatcctgttcaaggagaaggccaaggaggccctgggcaaggccaaggacgccaacaacggcaacctgcagctgagaaacaaggaggtgacctgggaggtgctggagggcgaggtggagaaggaggccctgaagaagatcatcgaggaccagcaggagagcctgaacaagtggaagagcaagggcagaagattcaagggcaagggcaagggcaacaaggccgcccagcccggcagcggcaagggcaaggtgcagttccagggcaagaagaccaagttcgccagcgacgacgagcacgacgagcacgacgagaacggcgccaccggccccgtgaagagagccagagaggagaccgacaaggaggagcccgccagcaagcagcagaagaccgagaacggcgccggcgaccagtag

SEQ ID NO: 135572 - DNA, 1086 bp, Artificial Sequence
  derived and/or modified sequence
atggccgagaacggcgacaacgagaagatggccgccctggaggccaagatctgccaccagatcgagtactacttcggcgacttcaacctgcccagagacaagttcctgaaggagcagatcaagctggacgagggctgggtgcccctggagatcatgatcaagttcaacagactgaacagactgaccaccgacttcaacgtgatcgtggaggccctgagcaagagcaaggccgagctgatggagatcagcgaggacaagaccaagatcagaagaagccccagcaagcccctgcccgaggtgaccgacgagtacaagaacgacgtgaagaacagaagcgtgtacatcaagggcttccccaccgacgccaccctggacgacatcaaggagtggctggaggacaagggccaggtgctgaacatccagatgagaagaaccctgcacaaggccttcaagggcagcatcttcgtggtgttcgacagcatcgagagcgccaagaagttcgtggagacccccggccagaagtacaaggagaccgacctgctgatcctgttcaaggacgactacttcgccaagaagaacgaggagagaaagcagaacaaggtggaggccaagctgagagccaagcaggagcaggaggccaagcagaagctggaggaggacgccgagatgaagagcctggaggagaagatcggctgcctgctgaagttcagcggcgacctggacgaccagacctgcagagaggacctgcacatcctgttcagcaaccacggcgagatcaagtggatcgacttcgtgagaggcgccaaggagggcatcatcctgttcaaggagaaggccaaggaggccctgggcaaggccaaggacgccaacaacggcaacctgcagctgagaaacaaggaggtgacctgggaggtgctggagggcgaggtggagaaggaggccctgaagaagatcatcgaggaccagcaggagagcctgaacaagtggaagagcaagggccccgtgaagagagccagagaggagaccgacaaggaggagcccgccagcaagcagcagaagaccgagaacggcgccggcgaccagtag

SEQ ID NO: 135573 - DNA, 405 bp, Artificial Sequence
  derived and/or modified sequence
atggccgagaacggcgacaacgagaagatggccgccctggaggccaagatctgccaccagatcgagtactacttcggcgacttcaacctgcccagagacaagttcctgaaggagcagatcaagctggacgagggctgggtgcccctggagatcatgatcaagttcaacagactgaacagactgaccaccgacttcaacgtgatcgtggaggccctgagcaagagcaaggccgagctgatggagatcagcgaggacaagaccaagatcagaagaagccccagcaagcccctgcccgaggtgaccgacgagtacaagaacgacgtgaagaacagaagcgtgtacatcagccaccccgtggcccacgtgggcgtgcagtggtgcgaccacggccccctgcagagctag

SEQ ID NO: 135574 - DNA, 363 bp, Artificial Sequence
  derived and/or modified sequence
atgatcaagttcaacagactgaacagactgaccaccgacttcaacgtgatcgtggaggccctgagcaagagcaaggccgagctgatggagatcagcgaggacaagaccaagatcagaagaagccccagcaagcccctgcccgaggtgaccgacgagtacaagaacgacgtgaagaacagaagcgtgtacatcaagggcttccccaccgacgccaccctggacgacatcaaggagtggctggaggacaagggccaggtgctgaacatccagatgagaagaaccctgcacaaggccttcaagggcagcatcttcgtggtgttcgacagcatcgagagcgccaagaagttcgtggagaccccctag

SEQ ID NO: 135575 - DNA, 555 bp, Artificial Sequence
  derived and/or modified sequence
atggccgagaacggcgacaacgagaagatggccgccctggaggccaagatctgccaccagatcgagtactacttcggcgacttcaacctgcccagagacaagttcctgaaggagcagatcaagctggacgagggctgggtgcccctggagatcatgatcaagttcaacagactgaacagactgaccaccgacttcaacgtgatcgtggaggccctgagcaagagcaaggccgagctgatggagatcagcgaggacaagaccaagatcagaagaagccccagcaagcccctgcccgaggtgaccgacgagtacaagaacgacgtgaagaacagaagcgtgtacatcaagggcttccccaccgacgccaccctggacgacatcaaggagtggctggaggacaagggccaggtgctgaacatccagatgagaagaaccctgcacaaggccttcaagggcagcatcttcgtggtgttcgacagcatcgagagcgccaagaagttcgtggagacccccggccagaagtacaaggagaccgacctgctgatcctgttctag

SEQ ID NO: 135576 - DNA, 252 bp, Artificial Sequence
  derived and/or modified sequence
atgagaagaaccctgcacaaggccttcaagggcagcatcttcgtggtgttcgacagcatcgagagcgccaagaagttcgtggagacccccggccagaagtacaaggagaccgacctgctgatcctgttcaaggacgactacttcgccaagaagaacgaggagagaaagcagaacaaggtggaggccaagctgagagccaagcaggagcaggaggccaagcagaagctggaggaggacgccgagatgaagtag

SEQ ID NO: 135577 - DNA, 1227 bp, Artificial Sequence
  derived and/or modified sequence
atggcggaaaatggtgacaacgaaaagatggcagcgttagaggctaaaatctgtcatcaaatcgaatactacttcggagattttaacctccctcgagacaaatttctcaaggaacagattaagctagatgaaggttgggtgccactcgagatcatgatcaagttcaacaggttaaaccgactgactaccgattttaatgtgatcgtcgaggccctatctaaaagcaaagcggagctgatggaaatctccgaggataagacaaaaatcaggagatctccctcaaagccactaccggaggtgacagacgagtacaagaatgacgtgaaaaaccgttctgtatatatcaagggttttccaacggatgctaccctcgatgatatcaaggaatggctggaggataaaggccaggtcctcaatatccagatgcggcgcactctccacaaggccttcaaaggttcgatctttgtggtgttcgacagcatcgagtctgccaagaagttcgtggaaacacctgggcaaaagtacaaggagaccgatctgcttatactgttcaaggatgactattttgcaaagaagaacgaggagagaaagcaaaacaaagtggaggcgaaactgcgggcaaagcaggagcaggaagctaaacagaagcttgaggaagacgcagaaatgaaatctctggaagagaagattgggtgtctcctgaagttttccggtgatctggacgatcagacctgtcgggaggacctgcatatccttttttctaaccatggggagatcaaatggatcgacttcgtacgaggtgcaaaggaaggtatcatattatttaaagaaaaagccaaggaggcactggggaaggccaaagatgcaaataacggtaatctgcagttaaggaataaagaagtaacttgggaagtgctggaaggcgaagtcgagaaagaggccttgaaaaagatcattgaggatcagcaggagtcccttaataaatggaaatccaaaggaagacggtttaaagggaagggtaaagggaacaaagccgcacaaccgggatccggtaaaggcaaggtgcagttccaaggcaagaagacaaagttcgcctccgacgacgagcacgacgaacacgacgaaaacggagccaccggccccgtgaagagagccagggaggagacggacaaagaagagcccgcgtccaaacagcagaagactgaaaacggagctggagaccagtag

SEQ ID NO: 135578 - DNA, 1086 bp, Artificial Sequence
  derived and/or modified sequence
atggccgagaacggggataacgagaagatggcggcactagaggccaaaatctgccaccagatcgaatactattttggtgactttaacctccctcgagacaaattcctgaaagaacaaattaagcttgacgagggctgggtgccccttgagattatgatcaagtttaaccggctcaacagactgactaccgattttaatgtcatcgtggaagccctctccaagtccaaggccgaactaatggagatttcagaagataaaacaaagattaggcggtccccaagcaaaccgttgccggaggtgacagatgagtataagaacgacgtgaagaaccgttcggtgtatataaagggctttcctacagacgctaccctggacgatatcaaagagtggctcgaggataaagggcaggttttgaatattcagatgaggcgtacgctgcacaaggcctttaaagggtccattttcgtcgtattcgactccattgagagcgcaaagaagtttgttgaaacccctggccaaaagtacaaagagactgatctgctgattctttttaaggatgattacttcgccaagaagaacgaagagcgtaaacaaaacaaagtagaagccaagttgcgggctaagcaggagcaagaggccaagcagaagctggaagaagatgcagaaatgaagtctttggaggagaagatcggctgcctcctgaagtttagtggggatctcgatgaccagacctgtagggaggatctgcacatccttttttcgaaccatggcgaaatcaaatggatagattttgtgcggggagccaaagagggaatcatcctctttaaagaaaaggcaaaagaagcgctcggaaaagcaaaagacgccaataatggcaacctgcaactgcgtaacaaagaggtgacctgggaagtcctggagggagaggtggagaaagaagcattgaagaaaatcattgaagaccagcaagaaagcctcaataagtggaagagcaagggacctgtcaaaagagctcgggaggagaccgacaaggaagaacccgcatccaaacagcagaaaaccgagaacggtgccggagaccagtag

SEQ ID NO: 135579 - DNA, 1227 bp, Artificial Sequence
  derived and/or modified sequence
atggcagagaacggtgacaatgagaagatggccgccttggaggccaagatttgtcaccagattgagtattattttggcgactttaacctgcctcgtgataaatttctgaaagagcagattaaactggacgaagggtgggttcccctggagattatgattaagttcaatcgtctcaatcggctcaccacagacttcaacgttatagtggaggccttgagcaaatcaaaagcagaactgatggagatctcggaagacaaaaccaagattagaaggagtccgagcaagccccttcccgaagtaaccgacgagtataagaacgacgtcaaaaatcggagcgtttatatcaaaggatttcccactgacgcgactctggacgacatcaaagagtggctggaggataaggggcaggtgctgaatatacagatgcgacggactctgcacaaagccttcaaggggtctatcttcgttgtcttcgacagtattgagagcgccaagaagtttgtggagactccggggcagaagtacaaggaaacagatctgctgatattattcaaagacgattattttgctaaaaagaatgaggagcgaaagcagaacaaagtggaagcaaaactccgcgctaaacaggaacaagaagctaagcagaaactggaagaagatgcagaaatgaagagtttggaagagaagatcggatgcctactgaaattctctggcgatcttgacgaccagacctgccgggaggatctacacatccttttcagcaatcacggtgagatcaagtggatcgatttcgtaaggggcgcaaaggagggaatcatcctattcaaggagaaggcaaaagaggccttaggaaaggctaaggatgcaaataacgggaatctgcagttgcgaaataaggaagttacgtgggaagtcctcgaaggggaggtcgaaaaggaggctctgaagaaaatcattgaagaccagcaggagtcactgaacaagtggaagtctaaaggacgaaggttcaagggcaaaggcaagggaaacaaggccgctcaacctggcagcgggaagggaaaggtgcaatttcagggcaagaagaccaagtttgcaagtgatgatgagcacgatgagcatgatgagaatggcgcaaccggccccgtgaagagagcccgagaggaaacagacaaggaggaaccggcctccaaacaacaaaaaaccgagaatggagctggggaccagtag

SEQ ID NO: 135580 - DNA, 405 bp, Artificial Sequence
  derived and/or modified sequence
atggccgagaacggggacaatgagaaaatggctgcactcgaggcgaagatctgccaccaaatcgaatattacttcggcgactttaatctgccaagggataaatttttgaaggaacagataaaactggacgagggctgggtaccactggagatcatgataaagtttaacagactaaatcggctcaccacggacttcaacgtgatcgtggaggccctgtccaagtctaaggcagaacttatggaaataagcgaggacaaaaccaaaataagacgcagcccaagcaaaccactccccgaggtgaccgacgagtataagaacgacgtcaagaataggtcagtctacatctcccacccagtggcacacgttggtgtgcagtggtgtgaccatgggccactccagagttag

SEQ ID NO: 135581 - DNA, 363 bp, Artificial Sequence
  derived and/or modified sequence
atgattaagttcaacaggctcaatcgcctgactacagacttcaacgtgatagtcgaagctctgagcaagtcaaaagctgaattaatggagatcagcgaggacaagaccaagattaggcgctccccttcaaaacctctcccagaagtgaccgatgagtataagaacgatgttaaaaatcggtctgtgtatattaaagggtttccaacagatgctacactagatgatatcaaggagtggttagaagacaagggacaagttctgaacattcagatgaggcgtacattacataaggcgttcaagggctcaattttcgtagtcttcgactccattgagagtgccaagaaatttgtggagaccccttag

SEQ ID NO: 135582 - DNA, 555 bp, Artificial Sequence
  derived and/or modified sequence
atggcagagaatggcgacaatgaaaagatggccgctctcgaagcaaaaatctgccatcagattgaatactactttggtgattttaatctcccccgtgacaagtttcttaaggaacagatcaagctggatgaaggatgggtgccactcgagattatgattaagtttaatcgcctcaatcgcttaaccactgattttaatgtcatagtggaagctctcagcaagtctaaggccgagctaatggagatctctgaggataagacgaaaatccgcaggagcccaagcaagccactgcccgaggtcactgatgagtacaagaatgacgtgaaaaaccgatcagtctatataaaaggatttcccacggacgccacgcttgatgatatcaaggagtggctcgaagataagggccaggtgttaaacatccagatgcgccggactctgcacaaagccttcaaggggagcatctttgttgttttcgactccatcgaaagcgcgaaaaagttcgtcgagacaccaggccagaagtacaaagaaactgacttgctgattctgttttag

SEQ ID NO: 135583 - DNA, 252 bp, Artificial Sequence
  derived and/or modified sequence
atgagaaggactctacacaaagccttcaagggttccatattcgtcgtgttcgacagcatcgagtccgcaaagaagtttgtggagacaccgggtcagaaatataaggagaccgatttgctgatactctttaaagacgactatttcgcaaagaaaaatgaagagagaaagcaaaataaagtagaggccaagttgcgcgctaagcaagagcaggaagccaaacagaaactggaggaggacgccgagatgaaatag

SEQ ID NO: 135584 - DNA, 1227 bp, Artificial Sequence
  derived and/or modified sequence
atggctgaaaatggagacaatgagaagatggccgccctggaggccaagatctgccaccagatcgagtactactttggagacttcaacctgccccgggacaagttcctgaaggagcagatcaagctggatgagggctgggtgcccctggagatcatgatcaagttcaaccggctgaaccggctgaccacagacttcaacgtcatcgtggaggccctgagcaagagcaaggccgagctgatggagatcagcgaggacaagaccaagatccgccgcagccccagcaagcccctgcctgaggtgacagatgagtacaagaatgatgtgaagaacagatctgtgtacatcaagggcttccccacagatgccaccctggatgacatcaaggagtggctggaggacaagggccaggtgctgaacatccagatgaggaggaccctgcacaaggccttcaagggcagcatctttgtggtgtttgacagcattgaaagtgccaagaagtttgtggagaccccaggccagaagtacaaggagacagacctgctgatcctcttcaaggatgactactttgccaagaagaatgaggagaggaagcagaacaaggtggaggccaagctgcgggccaagcaggagcaggaggccaagcagaagctggaggaggatgctgagatgaagagcctggaggagaagattggctgcctgctgaagttcagcggggacctggatgaccagacctgccgggaggacctgcacatcctcttcagcaaccacggggagatcaagtggattgactttgtgcggggggccaaggagggcatcatcctcttcaaggagaaggccaaggaggccctgggcaaggccaaggatgccaacaatggaaacctgcagctgaggaacaaggaggtgacctgggaggtgctggagggggaggtggagaaggaggccctgaagaagatcatcgaggaccagcaggagagcctgaacaagtggaagagcaagggccgccgcttcaagggcaaaggaaaaggaaacaaggccgcccagcccggcagcggcaagggcaaggtgcagttccagggcaagaagaccaagtttgccagtgatgatgaacatgatgaacatgatgaaaatggagccactggacctgtgaagagggcccgggaggagacagacaaggaggagcccgccagcaagcagcagaagacagaaaatggagctggggaccagtag

SEQ ID NO: 135585 - DNA, 1086 bp, Artificial Sequence
  derived and/or modified sequence
atggctgaaaatggagacaatgagaagatggccgccctggaggccaagatctgccaccagatcgagtactactttggagacttcaacctgccccgggacaagttcctgaaggagcagatcaagctggatgagggctgggtgcccctggagatcatgatcaagttcaaccggctgaaccggctgaccacagacttcaacgtcatcgtggaggccctgagcaagagcaaggccgagctgatggagatcagcgaggacaagaccaagatccgccgcagccccagcaagcccctgcctgaggtgacagatgagtacaagaatgatgtgaagaacagatctgtgtacatcaagggcttccccacagatgccaccctggatgacatcaaggagtggctggaggacaagggccaggtgctgaacatccagatgaggaggaccctgcacaaggccttcaagggcagcatctttgtggtgtttgacagcattgaaagtgccaagaagtttgtggagaccccaggccagaagtacaaggagacagacctgctgatcctcttcaaggatgactactttgccaagaagaatgaggagaggaagcagaacaaggtggaggccaagctgcgggccaagcaggagcaggaggccaagcagaagctggaggaggatgctgagatgaagagcctggaggagaagattggctgcctgctgaagttcagcggggacctggatgaccagacctgccgggaggacctgcacatcctcttcagcaaccacggggagatcaagtggattgactttgtgcggggggccaaggagggcatcatcctcttcaaggagaaggccaaggaggccctgggcaaggccaaggatgccaacaatggaaacctgcagctgaggaacaaggaggtgacctgggaggtgctggagggggaggtggagaaggaggccctgaagaagatcatcgaggaccagcaggagagcctgaacaagtggaagagcaagggccctgtgaagagggcccgggaggagacagacaaggaggagcccgccagcaagcagcagaagacagaaaatggagctggggaccagtag

SEQ ID NO: 135586 - DNA, 405 bp, Artificial Sequence
  derived and/or modified sequence
atggctgaaaatggagacaatgagaagatggccgccctggaggccaagatctgccaccagatcgagtactactttggagacttcaacctgccccgggacaagttcctgaaggagcagatcaagctggatgagggctgggtgcccctggagatcatgatcaagttcaaccggctgaaccggctgaccacagacttcaacgtcatcgtggaggccctgagcaagagcaaggccgagctgatggagatcagcgaggacaagaccaagatccgccgcagccccagcaagcccctgcctgaggtgacagatgagtacaagaatgatgtgaagaacagatctgtgtacatcagccaccctgtggcccacgtgggcgtgcagtggtgtgaccacggccccctgcagagctag

SEQ ID NO: 135587 - DNA, 363 bp, Artificial Sequence
  derived and/or modified sequence
atgatcaagttcaaccggctgaaccggctgaccacagacttcaacgtgattgtggaggccctgagcaagagcaaggccgagctgatggagatcagcgaggacaagaccaagatcagaagaagccccagcaagcccctgcctgaggtgacagatgagtacaagaatgatgtgaagaacagatctgtgtacatcaagggcttccccacagatgccaccctggatgacatcaaggagtggctggaggacaagggccaggtgctgaacatccagatgaggaggaccctgcacaaggccttcaagggcagcatctttgtggtgtttgacagcattgagagcgccaagaagtttgtggagaccccctag

SEQ ID NO: 135588 - DNA, 555 bp, Artificial Sequence
  derived and/or modified sequence
atggctgaaaatggagacaatgagaagatggccgccctggaggccaagatctgccaccagatcgagtactactttggagacttcaacctgccccgggacaagttcctgaaggagcagatcaagctggatgagggctgggtgcccctggagatcatgatcaagttcaaccggctgaaccggctgaccacagacttcaacgtcatcgtggaggccctgagcaagagcaaggccgagctgatggagatcagcgaggacaagaccaagatccgccgcagccccagcaagcccctgcctgaggtgacagatgagtacaagaatgatgtgaagaacagatctgtgtacatcaagggcttccccacagatgccaccctggatgacatcaaggagtggctggaggacaagggccaggtgctgaacatccagatgaggaggaccctgcacaaggccttcaagggcagcatctttgtggtgtttgacagcattgaaagtgccaagaagtttgtggagaccccaggccagaagtacaaggagacagacctgctgatcctcttctag

SEQ ID NO: 135589 - DNA, 252 bp, Artificial Sequence
  derived and/or modified sequence
atgaggaggaccctgcacaaggccttcaagggcagcatctttgtggtgtttgacagcattgagagcgccaagaagtttgtggagaccccaggccagaagtacaaggagacagacctgctgatcctcttcaaggatgactactttgccaagaagaatgaggagaggaagcagaacaaggtggaggccaagctgcgggccaagcaggagcaggaggccaagcagaagctggaggaggatgctgagatgaagtag

SEQ ID NO: 135590 - DNA, 1227 bp, Artificial Sequence
  derived and/or modified sequence
atggccgagaacggcgacaacgagaagatggccgccctggaggccaaaatatgtcaccaaatcgaatactacttcggagattttaaccttcctcgggataagtttctcaaggagcagatcaaactcgacgaggggtgggtgcctctggaaatcatgatcaaatttaaccgcctcaacagattgacaacagattttaatgtgatcgttgaggccctgagcaagtcgaaggcagagttaatggaaatatccgaagacaagaccaaaattcgcaggtccccatcaaagcctctgccagaagtgacggacgaatataagaatgacgtgaaaaaccgcagcgtttatatcaagggcttccctacagacgcaacacttgatgacataaaggagtggctcgaggacaagggacaggtgttgaacatccagatgcggcgtaccctgcataaggctttcaaagggtctatctttgtcgtctttgattcgattgagagtgccaagaaatttgtggaaactcctgggcagaaatacaaagaaactgacctcctgattttatttaaagacgattactttgctaagaagaatgaggaacggaagcagaacaaggtggaggcaaagttacgagccaaacaggagcaggaggcaaagcaaaagctggaggaggatgcagaaatgaagtctttggaggagaagattggctgcttgctcaaattcagtggagacttagacgatcagacctgccgggaagatcttcacattcttttttccaatcacggagagattaaatggatcgacttcgtacggggagcgaaggaaggaatcattctgtttaaagagaaagccaaggaggccttaggcaaagctaaggacgccaataacggcaacctgcagctcaggaacaaagaagtgacctgggaggtgctcgaaggagaggttgagaaagaggctctgaagaagatcatagaggatcaacaggaaagtctgaataagtggaaatctaaaggaaggaggttcaagggtaagggaaagggcaataaggcagcacagccggggagcggtaaaggaaaagttcaattccagggtaagaagaccaaattcgcctccgacgatgagcacgatgaacacgacgaaaacggcgccaccggccccgtcaagcgtgccagggaggaaaccgacaaggaggagcccgcgagtaaacaacagaaaacggaaaacggagccggggaccaatag

SEQ ID NO: 135591 - DNA, 1086 bp, Artificial Sequence
  derived and/or modified sequence
atggccgagaacggcgacaacgagaagatggccgccctggaggccaagatctgccaccaaatcgagtactacttcggggactttaacctaccacgggacaaatttttaaaggagcagataaaactggacgagggctgggtgcccctagaaataatgattaagtttaatagactgaatcgactgacgaccgattttaacgtcattgtggaggccctcagtaagtccaaggcagagctcatggagattagtgaggacaagacgaaaattcgcagatcacccagcaagcctctgcctgaggtcaccgacgagtacaaaaacgacgtgaagaacaggtccgtgtatatcaaaggtttccctaccgatgctaccctcgacgacatcaaggaatggcttgaggataagggtcaagtgctgaatatccaaatgaggcgtacgctgcacaaagcctttaaggggagcatttttgtggtattcgattctatcgaatccgctaaaaagtttgtggaaactcctggtcaaaagtacaaagagacagacttactcatcctatttaaggacgactattttgccaagaaaaatgaagagaggaagcagaataaggtggaggccaagttacgagctaagcaagagcaggaggctaaacagaagctggaggaagatgctgaaatgaagagccttgaagaaaagatcggttgcttactcaaattcagtggtgaccttgacgaccagacatgtcgtgaagacctccacatccttttctccaatcatggggaaatcaagtggatcgacttcgtaagaggtgccaaagagggcatcatccttttcaaggagaaggcgaaggaggccttaggcaaagccaaagatgcaaacaatggcaatttacaactgcggaataaggaagtgacgtgggaagtgctggagggagaggtggaaaaggaagcattgaaaaagatcattgaggaccagcaggaatcgctcaataaatggaagagcaaagggcccgtaaagcgggcccgggaagaaactgataaagaggaaccagcttctaagcagcaaaagaccgaaaatggagcgggcgatcagtag

SEQ ID NO: 135592 - DNA, 1227 bp, Artificial Sequence
  derived and/or modified sequence
atggccgagaacggcgacaacgagaagatggccgccctggaggccaaaatatgtcaccagattgaatactacttcggtgatttcaacttaccaagggacaaatttctgaaggaacaaatcaaactggacgagggctgggtcccattggaaattatgattaagttcaaccgcctgaatcgactcactacagattttaacgttatcgtggaagccctcagcaagtctaaggctgagctcatggagatctcagaagacaaaaccaaaatccgcagaagcccttccaagccactgcctgaggtaactgatgagtataagaacgatgtgaaaaacaggagcgtgtatatcaaaggctttccaacagacgccacccttgacgatattaaggagtggttggaagataaggggcaagtgcttaatatccagatgcggcgcacgctgcataaggctttcaaaggatctatctttgtcgttttcgatagcattgaaagcgctaagaaatttgtcgaaactcctggccagaagtacaaggaaaccgacctgctgattctgtttaaagacgactacttcgccaaaaagaacgaagagagaaaacagaacaaagttgaggcgaaacttcgcgccaaacaagagcaagaggccaaacagaaactggaagaggatgccgagatgaagtctctcgaggagaaaatcggctgcctgctaaagtttagcggcgacctggatgatcaaacctgcagagaggacctccatattttgttcagcaaccacggcgaaattaagtggattgattttgtacgaggagctaaggaagggatcatcctgtttaaggagaaggccaaagaagcattgggaaaagcaaaggacgcaaataatgggaaccttcaactgcggaacaaggaagtgacgtgggaagtcctcgaaggagaagtcgagaaagaggccttgaaaaagatcatcgaagaccaacaggaaagtctaaataagtggaagtcaaagggaagacgtttcaaaggaaagggcaaagggaacaaggctgcacaacctggctcaggtaagggcaaagttcagttccagggaaaaaagactaaatttgcaagtgacgatgagcacgacgaacatgacgagaatggagctactggtccggtgaagagggcgcgcgaggagacagataaggaagagcctgcatcaaagcagcagaagaccgagaacggcgccggagatcagtag

SEQ ID NO: 135593 - DNA, 405 bp, Artificial Sequence
  derived and/or modified sequence
atggccgagaacggcgacaacgagaagatggccgccctggaggccaagatatgtcaccaaatcgaatactattttggggattttaacttgccgcgggacaagttcctcaaggagcagatcaaactcgacgaaggctgggtgcccttggaaatcatgataaaattcaaccgactgaaccgcctgaccaccgattttaatgttatagtcgaggccctttcaaaatcaaaagccgaactcatggaaattagcgaggataagactaagatccgcaggtccccctccaaaccactgcccgaggtgaccgacgagtacaaaaacgacgtgaaaaacagaagtgtctatatctcacacccggtggctcatgtcggagtgcagtggtgcgaccacggccccttacagagctag

SEQ ID NO: 135594 - DNA, 363 bp, Artificial Sequence
  derived and/or modified sequence
atgatcaagttcaaccggctgaaccggctgaccaccgacttcaacgtgatcgtggaggctctgagcaaaagcaaagctgagctcatggagatttcagaagataagacgaagatcagaagaagcccatctaagccacttcccgaggtcacagacgaatacaaaaatgacgtgaaaaaccgtagcgtctatatcaagggtttcccgacggatgcgaccttggacgatattaaggagtggctggaagacaaggggcaggtattgaacattcagatgcgccgcactttacacaaagccttcaaaggaagcatatttgtggtgtttgattcaattgagtcagctaaaaaattcgttgaaaccccttag

SEQ ID NO: 135595 - DNA, 555 bp, Artificial Sequence
  derived and/or modified sequence
atggccgagaacggcgacaacgagaagatggccgccctggaggccaagatttgtcaccagatagagtattatttcggggacttcaacctgcctagggataagtttttaaaagaacagatcaagttagacgagggctgggtgcccctcgaaatcatgataaagttcaacagacttaatcgtctcacaaccgattttaacgtgatcgttgaggccttgtctaagagcaaggccgagctgatggaaatttcagaagataagaccaaaatccgacggtcccctagtaagccgttgccagaagttacggacgagtataaaaatgatgtgaagaacaggagtgtctatatcaaaggcttccccacagacgctaccctggacgatatcaaagaatggctcgaggataaaggccaggtgctaaacattcagatgcggaggaccctgcataaagcattcaaagggagcatctttgtggtatttgactccatcgaatctgctaaaaagttcgttgaaactcccgggcaaaaatataaggagacggatctgcttatcctcttctag

SEQ ID NO: 135596 - DNA, 252 bp, Artificial Sequence
  derived and/or modified sequence
atgcggcggaccctgcacaaggccttcaagggcagcatcttcgtggtgttcgactcaatcgagagcgccaaaaagtttgttgaaacccccggacaaaaatacaaagagacggacctgttaatcttgttcaaagacgattacttcgcaaaaaagaacgaagaacggaaacaaaataaagtggaggcgaaacttcgcgcaaaacaggagcaagaggctaagcagaaactggaggaagatgcagagatgaaatag

SEQ ID NO: 135597 - DNA, 1227 bp, Artificial Sequence
  derived and/or modified sequence
atggctgaaaatggggacaatgaaaaaatggccgcactcgaagcaaaaatttgccaccagatcgaatattacttcggcgatttcaacctccctagagataagtttctgaaggaacagataaaactagatgaaggctgggtgccccttgaaatcatgattaaattcaaccgtctgaatcgcttgacgacagactttaacgtgatcgtggaggctctgagtaaatccaaagccgagctgatggagatttctgaagataaaacaaaaattcggaggtcaccaagcaaaccgctgcccgaagtgactgacgagtataagaatgatgtcaaaaaccgtagcgtttacattaagggatttccaaccgatgctactctggatgatatcaaagagtggctcgaagataaaggccaagttctcaatatccagatgaggcggactttacataaagcgttcaagggtagcatttttgttgtctttgactcaatagaaagtgccaagaagtttgtagaaacacctgggcagaaatataaggaaactgacttactgatcctctttaaagacgattattttgcgaagaaaaatgaagagaggaagcagaacaaggtcgaggctaagctgagagcaaaacaggagcaggaagcaaagcagaagctagaagaggacgctgagatgaagagtcttgaggagaagattgggtgcctgctcaaattttctggtgatctggacgaccagacctgcagagaggacctgcacattctgtttagcaaccacggcgagatcaagtggattgatttcgtgcggggagccaaggagggcattatactcttcaaggaaaaagccaaagaggctttgggtaaggctaaggacgccaataatggtaatctgcagctccgcaataaagaggtaacctgggaagtactggagggcgaggtggagaaagaggccctgaaaaagatcatagaggatcagcaggaatcactcaacaagtggaaatcaaaggggagaagatttaagggaaaaggcaagggcaataaggctgctcaacccggttcggggaaaggcaaagtgcaattccagggaaagaaaactaaattcgcctctgacgacgaacacgatgagcatgatgaaaatggagcaacaggtcctgttaaaagggcacgagaggagacagacaaagaggaaccagctagcaagcagcagaagaccgagaacggcgctggggaccagtag

SEQ ID NO: 135598 - DNA, 1086 bp, Artificial Sequence
  derived and/or modified sequence
atggctgagaacggggataacgagaaaatggccgcacttgaagccaagatctgccaccagattgaatactacttcggcgatttcaaccttcccagagataaattcctgaaggagcaaattaaactggatgaaggctgggtaccgctcgagatcatgattaagttcaatcgactcaatcggttgaccactgacttcaatgtcatcgtagaggcactgtccaagagtaaagccgaactaatggagatttcagaagacaagactaaaattagaagatcccctagcaagcccctgcccgaagtgacagacgagtataagaacgatgtgaaaaatcggtcggtctacatcaaaggattcccaactgacgctacactagacgacattaaagagtggctggaagataaaggacaggtgctcaatatccaaatgagacggaccctgcataaggcattcaagggcagtatttttgtggtgtttgactccatagagtctgccaaaaagttcgtggagaccccgggtcagaaatacaaggaaacagatcttctaattctgtttaaagacgattatttcgcaaagaagaacgaggagagaaaacaaaataaagtcgaggcgaaacttcgagcaaaacaggagcaagaagctaaacaaaagcttgaagaggacgccgaaatgaagtccctcgaagagaagattggctgtttactcaagttttccggagatctagacgatcagacctgtcgggaagatttgcacattctattttcaaatcacggagagattaagtggatagatttcgtgcgcggagccaaagagggcattatcctgttcaaagaaaaggccaaggaggctctgggcaaagccaaggacgccaacaatggtaatttgcagttgagaaacaaggaagttacctgggaagtcttagagggcgaggtggaaaaagaggccctgaagaaaatcatagaagaccagcaagagtcgctgaataagtggaaaagtaagggacctgtgaagcgagccagggaggaaactgataaggaggaaccggcaagtaagcagcaaaaaaccgagaacggagctggtgaccaatag

SEQ ID NO: 135599 - DNA, 1227 bp, Artificial Sequence
  derived and/or modified sequence
atggctgaaaacggtgacaatgagaagatggccgctttggaggccaagatatgtcaccagattgagtactattttggcgatttcaacctgcctagagataaatttctgaaagaacaaatcaaactggatgaaggatgggtgccgttggagatcatgataaaattcaatcgcctgaatcgcctcaccacagattttaatgtgatagtggaggctctcagtaagtcaaaggcggagcttatggagatttctgaggataaaacaaagattcgccgatctccatcaaaaccccttcccgaggtcactgatgagtacaaaaacgacgtgaaaaaccggtcagtatacatcaaggggtttcccacagatgctaccttggacgatattaaagagtggcttgaggataaagggcaggtgttaaatatccagatgcggaggactctgcataaggccttcaaaggaagcatcttcgtagtgttcgactccatcgagtcggctaaaaaattcgtggagacaccaggacagaagtacaaggaaactgatctgctgattctgtttaaagatgactacttcgccaagaagaatgaagaaaggaagcagaacaaggtcgaggctaagctgagggcaaaacaagagcaggaggccaaacagaaactagaggaggacgctgaaatgaagagcttagaggaaaagattggatgcctacttaaatttagcggggatttggatgaccagacctgtcgggaggatcttcacatactgttctcgaaccacggcgaaatcaagtggatagacttcgttcgaggagcaaaggagggaattatcctcttcaaagagaaagcaaaagaggctctcggcaaggcaaaagacgccaataacggcaatttgcaactccggaacaaagaggtgacatgggaggttctcgaaggagaggtggaaaaagaggccttgaagaaaattattgaggatcagcaagaatccctaaacaagtggaagtctaagggccgaagatttaagggtaagggtaaagggaataaagctgctcagcccggatcgggaaagggtaaggtgcaatttcagggcaagaaaactaaattcgcctccgatgatgagcacgatgaacacgacgagaacggagccaccgggccagtgaagagggctcgggaagaaaccgacaaagaggagcccgcatccaagcagcagaagactgagaatggtgcgggtgatcagtag

SEQ ID NO: 135600 - DNA, 405 bp, Artificial Sequence
  derived and/or modified sequence
atggcagagaatggggataacgagaagatggctgcactcgaagctaaaatctgccatcagattgaatactattttggggactttaatcttcccagagacaaattccttaaggagcagattaaactggatgagggatgggtacctcttgaaataatgataaaattcaacaggctcaatagattgaccacggattttaatgtgatcgttgaagccctgtcaaaatctaaggcagagttgatggagatttccgaagataaaaccaaaattcgcagatccccaagcaagccactgccagaagtcaccgacgagtacaagaatgacgtcaaaaatcggagcgtttacatcagccaccctgtggctcatgttggagttcagtggtgtgatcacggccctctccagtcctag

SEQ ID NO: 135601 - DNA, 363 bp, Artificial Sequence
  derived and/or modified sequence
atgatcaagttcaatcgcctaaatcggcttacaactgacttcaacgttattgtagaggctttaagtaaaagcaaggcagaattgatggagatctcagaggacaagactaaaatccgcaggtctccctccaaacccctgccggaagtaactgacgagtacaagaatgatgtcaagaaccgttccgtgtatataaagggcttccccacagatgccacactggacgacattaaagagtggctagaagacaaggggcaggtcctgaacattcagatgcggaggacactccacaaagcattcaagggatccatttttgtcgtattcgacagcatcgagtcagccaaaaaatttgtggagacaccttag

SEQ ID NO: 135602 - DNA, 555 bp, Artificial Sequence
  derived and/or modified sequence
atggcagaaaacggcgacaacgagaaaatggccgctctggaggccaagatttgtcatcaaatcgagtactacttcggcgatttcaacctgcccagggacaaatttttgaaggagcagataaagctcgacgagggctgggtaccactcgagatcatgattaaattcaaccgcctgaatcgtctcactacagactttaacgtgattgttgaggcactctctaagtctaaggccgaactgatggagatttcggaggataagacaaagatcagacggagtccatctaagcctctgccagaagtgaccgacgaatataaaaatgatgtcaagaatcggagtgtgtacatcaaaggcttcccaactgacgcaaccctcgatgatatcaaagaatggttagaagataaaggacaggtcctgaacatacagatgagacggactctgcataaggcatttaaggggagcatttttgttgtgttcgattcaatcgagtctgccaaaaagttcgtcgagacccccggacaaaaatacaaagagacagacctgctgatcctgttctag

SEQ ID NO: 135603 - DNA, 252 bp, Artificial Sequence
  derived and/or modified sequence
atgagacggaccttgcataaggccttcaaaggatcgatcttcgtggtcttcgacagtattgagtccgccaagaagttcgtggagacccctgggcaaaagtataaggaaactgatttgctaatcctgtttaaggatgactacttcgccaagaagaatgaggaacgcaagcaaaataaagtggaggctaaactaagagccaagcaggaacaggaggcaaaacagaagttagaagaggacgcagagatgaagtag

SEQ ID NO: 135604 - DNA, 1709 bp, Artificial Sequence
  derived and/or modified sequence
gctccacctcgtccgtggccctgcccacccaggccgcaagagctgccgggacggtccccatcttcttggagcgctttaggctggccggcggcgctgggaggtggagtcgttgctgttgctgtttgtgagcctgtggcgcggcttctgtgggccggaaccttaaagatagccgcaatggctgaaaatggtgataatgaaaagatggctgccctggaggccaaaatctgtcatcaaattgagtattattttggcgacttcaatttgccacgggacaagtttctaaaggaacagataaaactggatgaaggctgggtacctttggagataatgataaaattcaacaggttgaaccgtctaacaacagactttaatgtaattgtggaagcattgagcaaatccaaggcagaactcatggaaatcagtgaagataaaactaaaatcagaaggtctccaagcaaacccctacctgaagtgactgatgagtataaaaatgatgtaaaaaacagatctgtttatattaaaggcttcccaactgatgcaactcttgatgacataaaagaatggttagaagataaaggtcaagtactaaatattcagatgagaagaacattgcataaagcatttaagggatcaatttttgttgtgtttgatagcattgaatctgctaagaaatttgtagagacccctggccagaagtacaaagaaacagacctgctaatacttttcaaggacgattactttgccaaaaaaaatgaagaaagaaaacaaaataaagtggaagctaaattaagagctaaacaggagcaagaagcaaaacaaaagttagaagaagatgctgaaatgaaatctctagaagaaaagattggatgcttgctgaaattttcgggtgatttagatgatcagacctgtagagaagatttacacatacttttctcaaatcatggtgaaataaaatggatagacttcgtcagaggagcaaaagaggggataattctatttaaagaaaaagccaaggaagcattgggtaaagccaaagatgcaaataatggtaacctacaattaaggaacaaagaagtgacttgggaagtactagaaggagaggtggaaaaagaagcactgaagaaaataatagaagaccaacaagaatccctaaacaaatggaagtcaaaaggtcgtagatttaaaggaaaaggaaagggtaataaagctgcccagcctgggtctggtaaaggaaaagtacagtttcagggcaagaaaacgaaatttgctagtgatgatgaacatgatgaacatgatgaaaatggtgcaactggacctgtgaaaagagcaagagaagaaacagacaaagaagaacctgcatccaaacaacagaaaacagaaaatggtgctggagaccagtagtttagtaaaccaattttttattcattttaaataggttttaaacgacttttgtttgcggggcttttaaaaggaaaaccgaattaggtccacttcaatgtccacctgtgagaaaggaaaaatttttttgttgtttaacttgtctttttgttatgcaaatgagatttctttgaatgtattgttctgtttgtgttatttcagatgattcaaatatcaaaaggaagattcttccattaaattgcctttgtaatatgagaatgtattagtacaaactaactaataaaatatatactatatgaaaagagcaaaaa

SEQ ID NO: 135605 - DNA, 1457 bp, Artificial Sequence
  derived and/or modified sequence
atcttcttggagcgctttaggctggccggcggcgctgggaggtggagtcgttgctgttgctgtttgtgagcctgtggcgcggcttctgtgggccggaaccttaaagatagccgcaatggctgaaaatggtgataatgaaaagatggctgccctggaggccaaaatctgtcatcaaattgagtattattttggcgacttcaatttgccacgggacaagtttctaaaggaacagataaaactggatgaaggctgggtacctttggagataatgataaaattcaacaggttgaaccgtctaacaacagactttaatgtaattgtggaagcattgagcaaatccaaggcagaactcatggaaatcagtgaagataaaactaaaatcagaaggtctccaagcaaacccctacctgaagtgactgatgagtataaaaatgatgtaaaaaacagatctgtttatattaaaggcttcccaactgatgcaactcttgatgacataaaagaatggttagaagataaaggtcaagtactaaatattcagatgagaagaacattgcataaagcatttaagggatcaatttttgttgtgtttgatagcattgaatctgctaagaaatttgtagagacccctggccagaagtacaaagaaacagacctgctaatacttttcaaggacgattactttgccaaaaaaaatgaagaaagaaaacaaaataaagtggaagctaaattaagagctaaacaggagcaagaagcaaaacaaaagttagaagaagatgctgaaatgaaatctctagaagaaaagattggatgcttgctgaaattttcgggtgatttagatgatcagacctgtagagaagatttacacatacttttctcaaatcatggtgaaataaaatggatagacttcgtcagaggagcaaaagaggggataattctatttaaagaaaaagccaaggaagcattgggtaaagccaaagatgcaaataatggtaacctacaattaaggaacaaagaagtgacttgggaagtactagaaggagaggtggaaaaagaagcactgaagaaaataatagaagaccaacaagaatccctaaacaaatggaagtcaaaaggacctgtgaaaagagcaagagaagaaacagacaaagaagaacctgcatccaaacaacagaaaacagaaaatggtgctggagaccagtagtttagtaaaccaattttttattcattttaaataggttttaaacgacttttgtttgcggggcttttaaaaggaaaaccgaattaggtccacttcaatgtccacctgtgagaaaggaaaaatttttttgttgtttaacttgtctttttgttatgcaaatgagatttctttgaatgtattgttctgtttgtgttatttcagatgattcaaatatcaaaaggaagattcttccattaaattgcctttgtaatatgagaat

SEQ ID NO: 135606 - DNA, 1782 bp, Artificial Sequence
  derived and/or modified sequence
ttttttttttttttttttttttacctccaccgccttctagtctcaccgaaggcttgtggccatctctgtaaagtttctggggaggtgggcacggggtaaacgccggagggttctgtggagcctatgggactgactggaggccaaagaactttgggccgcagatgtacaccagcgtcactcttttggtctgttagggccttcatcgctcacatcaggtttcagtgtgaaacgggaaaacatagccgcaatggctgaaaatggtgataatgaaaagatggctgccctggaggccaaaatctgtcatcaaattgagtattattttggcgacttcaatttgccacgggacaagtttctaaaggaacagataaaactggatgaaggctgggtacctttggagataatgataaaattcaacaggttgaaccgtctaacaacagactttaatgtaattgtggaagcattgagcaaatccaaggcagaactcatggaaatcagtgaagataaaactaaaatcagaaggtctccaagcaaacccctacctgaagtgactgatgagtataaaaatgatgtaaaaaacagatctgtttatattaaaggcttcccaactgatgcaactcttgatgacataaaagaatggttagaagataaaggtcaagtactaaatattcagatgagaagaacattgcataaagcatttaagggatcaatttttgttgtgtttgatagcattgaatctgctaagaaatttgtagagacccctggccagaagtacaaagaaacagacctgctaatacttttcaaggacgattactttgccaaaaaaaatgaagaaagaaaacaaaataaagtggaagctaaattaagagctaaacaggagcaagaagcaaaacaaaagttagaagaagatgctgaaatgaaatctctagaagaaaagattggatgcttgctgaaattttcgggtgatttagatgatcagacctgtagagaagatttacacatacttttctcaaatcatggtgaaataaaatggatagacttcgtcagaggagcaaaagaggggataattctatttaaagaaaaagccaaggaagcattgggtaaagccaaagatgcaaataatggtaacctacaattaaggaacaaagaagtgacttgggaagtactagaaggagaggtggaaaaagaagcactgaagaaaataatagaagaccaacaagaatccctaaacaaatggaagtcaaaaggtcgtagatttaaaggaaaaggaaagggtaataaagctgcccagcctgggtctggtaaaggaaaagtacagtttcagggcaagaaaacgaaatttgctagtgatgatgaacatgatgaacatgatgaaaatggtgcaactggacctgtgaaaagagcaagagaagaaacagacaaagaagaacctgcatccaaacaacagaaaacagaaaatggtgctggagaccagtagtttagtaaaccaattttttattcattttaaataggttttaaacgacttttgtttgcggggcttttaaaaggaaaaccgaattaggtccacttcaatgtccacctgtgagaaaggaaaaatttttttgttgtttaacttgtctttttgttatgcaaatgagatttctttgaatgtattgttctgtttgtgttatttcagatgattcaaatatcaaaaggaagattcttccattaaattgcctttgtaatatgagaatgtattagtacaaactaactaataaaatatatactatatgaaaagagcaaaaa

SEQ ID NO: 135607 - DNA, 674 bp, Artificial Sequence
  derived and/or modified sequence
ggagcgctttaggctggccggcggcgctgggaggtggagtcgttgctgttgctgtttgtgagcctgtggcgcggcttctgtgggccggaaccttaaagatagccgcaatggctgaaaatggtgataatgaaaagatggctgccctggaggccaaaatctgtcatcaaattgagtattattttggcgacttcaatttgccacgggacaagtttctaaaggaacagataaaactggatgaaggctgggtacctttggagataatgataaaattcaacaggttgaaccgtctaacaacagactttaatgtaattgtggaagcattgagcaaatccaaggcagaactcatggaaatcagtgaagataaaactaaaatcagaaggtctccaagcaaacccctacctgaagtgactgatgagtataaaaatgatgtaaaaaacagatctgtttatatttctcatcctgttgctcacgttggagtgcagtggtgtgatcatggcccactgcagtcttgacctcctgggctcaagtgatcctcccacctcagcctcctgagtagctgggactacagaaaggcttcccaactgatgcaactcttgatgacataaaagaatggttagaagataaaggtcaagtactaaatattcagatgagaagaacattgcataaagcattta

SEQ ID NO: 135608 - DNA, 545 bp, Artificial Sequence
  derived and/or modified sequence
ggagcgctttaggctggccggcggcgctgggaggtggagtcgttgctgttgctgtttgtgagcctgtggcgcggcttctgtgggccggaaccttaaagtattattttggcgacttcaatttgccacgggacaagtttctaaaggaacagataaaactggatgaaggctgggtacctttggagataatgataaaattcaacaggttgaaccgtctaacaacagactttaatgtaattgtggaagcattgagcaaatccaaggcagaactcatggaaatcagtgaagataaaactaaaatcagaaggtctccaagcaaacccctacctgaagtgactgatgagtataaaaatgatgtaaaaaacagatctgtttatattaaaggcttcccaactgatgcaactcttgatgacataaaagaatggttagaagataaaggtcaagtactaaatattcagatgagaagaacattgcataaagcatttaagggatcaatttttgttgtgtttgatagcattgaatctgctaagaaatttgtagagacccct

SEQ ID NO: 135609 - DNA, 2463 bp, Artificial Sequence
  derived and/or modified sequence
aacagaaatgagtgcagaagacatggagaagaacgttcagaatagctttattcataacagcaaaaaactagaaacaacaaaatggtcagaaacagaagaatgggccagacgtcgtggctcactcctgtaatcccagcactttgggaggccaaggtggatggatcccttgaggtcagaagtttgaaacaagcctggccaacatggcaaaaccctgtctctacttaaaacagtacaaaaattagccatgcatggtggcaggcacctataatcccagctacttgggatattgaggcacgagaatcacttgaacccaggggggtagaggttgcggtgagccgagattgcgccactgcactctagcctgtgcaacagagtgagcctctgtctcaaaaaaaggaaaagaaatggaagaatggataaatcagttgtggtatgtgcgtataccacatgttgtggactgtttgtagttccccaaaattcatacattgacatcctaacctccagtgggatggtattaggaagtggggcctttgggaggtaataagatcatgatggtagaattctacctcatgaatgggatttagtgccttgtaagaagagactggagagtttacttcctttctgcttttcaccatgtaaggatacatgaagaagatggccatctgcaaaccaggaagcaggtcatcatgagacaccagatctaacagcatcttgatcttggacttctcagccttcaaaactgcgagcaataaatttctgttgtttaagacacccagtctatgatattttgttatagctgtccaaactgagacccagatatatacatactacatgacctagaacaggcaaagctaatcaatggtagttacttttaaggagggtattgactgagagaggagcccaaaggaactttctggagtgctgaaatgttctatatctcaatctggatggtaattacaaggtggtgttcacttgtgaaacttcattgagcacttaaaattcatgcaccttatagtttgtgtgatataattcaattaaaaaaatgtttagcccccaaaggcccttcttttctctttatctgtcacagttattttattttacatgaagtcttggtaaagaatctgtgctgttttatcaacttccatgtactgtcttctatagaagatctacttatcattttatgcatgctgatctcgtccacttgccaaatatagcaaattgacccaagtaaatttggctgttcacaattattagataatttagaggatagtggaggtcaccaattgttagacataggggtgggctctaggtctccccttaataacctcactttcatatgacttattacaatgaaggaagtttttgtagacaagattcaccttcaaacatctattagcaagaaaacacaaaagtagtcctacaatctattcccaaaattcagggagaccctagatttctggcttttaggcaatctgatattcatcttgcgcgcgcgcgtgcgcgcgcacacacacacacacacacacacacagaaatagaaaaacttagcaagcctagcagccttcagagtggtactcttggcctggagttttgatttagttgagttttctgccccttagtgatgaattctctcaattgccctaaccaaaagtctaaaatattataatcatctgccttgaataatttttcatggatttttttccccctcgcatttaaagtccaggttagaatgataagtccattctacgaagccatcagagttggtatggaactacaggatgttgggacttggcttccttctatcttgctgctttgccacacctatggtgtttccttcatttgcttggtccagttttgctcatcatccacatctagctagttgaagaaaagagaaagtgagatagccgcaatggctgaaaatggtgataatgaaaagatggctgccctggaggccaaaatctgtcatcaaattgagtattattttggcgacttcaatttgccacgggacaagtttctaaaggaacagataaaactggatgaaggctgggtacctttggagataatgataaaattcaacaggttgaaccgtctaacaacagactttaatgtaattgtggaagcattgagcaaatccaaggcagaactcatggaaatcagtgaagataaaactaaaatcagaaggtctccaagcaaacccctacctgaagtgactgatgagtataaaaatgatgtaaaaaacagatctgtttatattaaaggcttcccaactgatgcaactcttgatgacataaaagaatggttagaagataaaggtcaagtactaaatattcagatgagaagaacattgcataaagcatttaagggatcaatttttgttgtgtttgatagcattgaatctgctaagaaatttgtagagacccctggccagaagtacaaagaaacagacctgctaatacttttcaa

SEQ ID NO: 135610 - DNA, 672 bp, Artificial Sequence
  derived and/or modified sequence
atggctgaaaatggtgataatgaaaagatggctgccctggaggccaaaatctgtcatcaaattgagtattattttggcgacttcaatttgccacgggacaagtttctaaaggaacagataaaactggatgaaggctgggtacctttggagataatgataaaattcaacaggttgaaccgtctaacaacagactttaatgtaattgtggaagcattgagcaaatccaaggcagaactcatggaaatcagtgaagataaaactaaaatcagaaggtctccaagcaaacccctacctgaagtgactgatgagtataaaaatgatgtaaaaaacagatctgtttatattaaaggcttcccaactgatgcaactcttgatgacataaaagaatggttagaagataaaggtcaagtactaaatattcagatgagaagaacattgcataaagcatttaagggatcaatttttgttgtgtttgatagcattgaatctgctaagaaatttgtagagacccctggccagaagtacaaagaaacagacctgctaatacttttcaaggacgattactttgccaaaaaaaatgaagaaagaaaacaaaataaagtggaagctaaattaagagctaaacaggagcaagaagcaaaacaaaagttagaagaagatgctgaaatgaaa

SEQ ID NO: 135611 - protein, 286 aa, Artificial Sequence
  derived and/or modified sequence
MRLLPRLLLLLLLVFPATVLFRGGPRGLLAVAQDLTEDEETVEDSIIEDEDDEAEVEEDEPTDLVEDKEEEDVSGEPEASPSADTTILFVKGEDFPANNIVKFLVGFTNKGTEDFIVESLDASFRYPQDYQFYIQNFTALPLNTVVPPQRQATFEYSFIPAEPMGGRPFGLVINLNYKDLNGNVFQDAVFNQTVTVIEREDGLDGETIFMYMFLAGLGLLVIVGLHQLLESRKRKRPIQKVEMGTSSQNDVDMSWIPQETLNQINKASPRRLPRKRAQKRSVGSDE

SEQ ID NO: 135612 - protein, 259 aa, Artificial Sequence
  derived and/or modified sequence
MRLLPRLLLLLLLVFPATVLFRGGPRGLLAVAQDLTEDEETVEDSIIEDEDDEAEVEEDEPTDLVKYFPANNIVKFLVGFTNKGTEDFIVESLDASFRYPQDYQFYIQNFTALPLNTVVPPQRQATFEYSFIPAEPMGGRPFGLVINLNYKDLNGNVFQDAVFNQTVTVIEREDGLDGETIFMYMFLAGLGLLVIVGLHQLLESRKRKRPIQKVEMGTSSQNDVDMSWIPQETLNQINKASPRRLPRKRAQKRSVGSDE

SEQ ID NO: 135613 - DNA, 861 bp, Artificial Sequence
  derived and/or modified sequence
atgagactgctgcccagactgctgctgctgctgctgctggtgttccccgccaccgtgctgttcagaggcggccccagaggcctgctggccgtggcccaggacctgaccgaggacgaggagaccgtggaggacagcatcatcgaggacgaggacgacgaggccgaggtggaggaggacgagcccaccgacctggtggaggacaaggaggaggaggacgtgagcggcgagcccgaggccagccccagcgccgacaccaccatcctgttcgtgaagggcgaggacttccccgccaacaacatcgtgaagttcctggtgggcttcaccaacaagggcaccgaggacttcatcgtggagagcctggacgccagcttcagatacccccaggactaccagttctacatccagaacttcaccgccctgcccctgaacaccgtggtgcccccccagagacaggccaccttcgagtacagcttcatccccgccgagcccatgggcggcagacccttcggcctggtgatcaacctgaactacaaggacctgaacggcaacgtgttccaggacgccgtgttcaaccagaccgtgaccgtgatcgagagagaggacggcctggacggcgagaccatcttcatgtacatgttcctggccggcctgggcctgctggtgatcgtgggcctgcaccagctgctggagagcagaaagagaaagagacccatccagaaggtggagatgggcaccagcagccagaacgacgtggacatgagctggatcccccaggagaccctgaaccagatcaacaaggccagccccagaagactgcccagaaagagagcccagaagagaagcgtgggcagcgacgagtag

SEQ ID NO: 135614 - DNA, 780 bp, Artificial Sequence
  derived and/or modified sequence
atgagactgctgcccagactgctgctgctgctgctgctggtgttccccgccaccgtgctgttcagaggcggccccagaggcctgctggccgtggcccaggacctgaccgaggacgaggagaccgtggaggacagcatcatcgaggacgaggacgacgaggccgaggtggaggaggacgagcccaccgacctggtgaagtacttccccgccaacaacatcgtgaagttcctggtgggcttcaccaacaagggcaccgaggacttcatcgtggagagcctggacgccagcttcagatacccccaggactaccagttctacatccagaacttcaccgccctgcccctgaacaccgtggtgcccccccagagacaggccaccttcgagtacagcttcatccccgccgagcccatgggcggcagacccttcggcctggtgatcaacctgaactacaaggacctgaacggcaacgtgttccaggacgccgtgttcaaccagaccgtgaccgtgatcgagagagaggacggcctggacggcgagaccatcttcatgtacatgttcctggccggcctgggcctgctggtgatcgtgggcctgcaccagctgctggagagcagaaagagaaagagacccatccagaaggtggagatgggcaccagcagccagaacgacgtggacatgagctggatcccccaggagaccctgaaccagatcaacaaggccagccccagaagactgcccagaaagagagcccagaagagaagcgtgggcagcgacgagtag

SEQ ID NO: 135615 - DNA, 861 bp, Artificial Sequence
  derived and/or modified sequence
atgcggctgttaccacggttacttctgctgctcttactggtgttcccagccactgttctgtttcgcggtggaccacggggactgctggccgtcgcccaggacctaaccgaagacgaggagactgtggaggacagtatcatcgaggacgaagatgacgaagctgaggtcgaggaggacgaacctacagacttggtggaggataaggaggaagaggacgtgtccggggagcctgaagcttccccctctgccgatactactattctgttcgtgaagggagaggactttcctgctaataatatagttaagttcttggttggttttactaataagggaacagaggactttattgtcgaaagtctcgatgcaagcttcagataccctcaggactaccagttttacatacagaattttacagcactgccactcaataccgtggtaccacctcagcgacaagccacattcgagtattcattcatccccgcagagcccatggggggtaggccattcggcctggtgatcaatctgaactataaagacctgaacggcaatgtcttccaggacgccgtgtttaaccagacagtaacagtgatcgagcgcgaggatggtcttgacggcgagacaatcttcatgtacatgtttctcgccggactcggactactcgttatcgtgggcctgcaccagcttttagaatctaggaagagaaaacgtccaatacaaaaagtcgaaatgggaacttcatctcagaatgatgtcgacatgtcttggattccacaggagaccctcaatcagataaataaggcctccccaaggcgactgcccagaaagcgcgctcagaaacgcagcgtaggctcggacgagtag

SEQ ID NO: 135616 - DNA, 780 bp, Artificial Sequence
  derived and/or modified sequence
atgagactcctccctcggctgcttctcctcttactcctggtatttccggctacagtcctgttccggggtggcccgcggggcctgctagccgtcgcgcaggacctcaccgaggacgaagagaccgtcgaggattctattatcgaggatgaggacgacgaggccgaggtggaagaggatgagcctaccgatctagttaagtactttccagccaataatatcgtaaaatttttggtcgggttcactaataagggtacagaagattttatagtagagagtctggatgccagctttaggtatcctcaggattatcagttttacatccagaatttcactgctctgcccctcaacactgttgttccaccgcagcggcaggctacctttgaatactcatttattcccgccgaacccatgggagggaggccgtttggtctggtcatcaatctcaattacaaggatctgaatggtaatgttttccaagacgcggtttttaaccagaccgtgaccgtaattgagagagaggatggtctggacggggagactatcttcatgtacatgttccttgccgggttgggattactggttatagtggggctccaccagctgctggaaagcaggaaaaggaaacgccccatccagaaggttgagatgggtactagcagccagaacgatgtggacatgtcctggatcccccaagagactctgaaccaaattaataaagcttctcccagaagactgccccggaaacgagcacagaaaagaagcgtgggcagcgacgaatag

SEQ ID NO: 135617 - DNA, 861 bp, Artificial Sequence
  derived and/or modified sequence
atgaggctgctgccccggctgctgctgctgctgctgctggtgtttcctgccaccgtgctcttccggggcggcccccggggcctgctggccgtggcccaggacctgacagaagatgaggagaccgtggaggacagcatcattgaagatgaagatgatgaggccgaggtggaggaggatgagcccacagacctggtggaggacaaggaggaggaggatgtgtctggagagcctgaggccagccccagcgctgacaccaccatcctgtttgtgaagggggaggacttccctgccaacaacatcgtgaagttcctggtgggcttcaccaacaagggcacagaggacttcatcgtggagagcctggatgccagcttccgctacccccaggactaccagttctacatccagaacttcaccgccctgcccctgaacacagtggtgcccccccagaggcaggccacctttgagtacagcttcatcccagctgagcccatgggcggccggcccttcggcctggtgatcaacctgaactacaaggacctgaatggaaatgtgttccaggatgctgtgttcaaccagacagtgacagtgattgagcgggaggatggcctggatggagagaccatcttcatgtacatgttcctggccggcctgggcctgctggtgattgtgggcctgcaccagctgctggagagcaggaagaggaagaggcccatccagaaggtggagatgggcaccagcagccagaatgatgtggacatgtcctggatcccccaggagaccctgaaccagatcaacaaggccagcccccggcggctgcccaggaagagggcccagaagaggtctgtgggcagtgatgaatag

SEQ ID NO: 135618 - DNA, 780 bp, Artificial Sequence
  derived and/or modified sequence
atgaggctgctgccccggctgctgctgctgctgctgctggtgtttcctgccaccgtgctcttccggggcggcccccggggcctgctggccgtggcccaggacctgacagaagatgaggagaccgtggaggacagcatcattgaagatgaagatgatgaggccgaggtggaggaggatgagcccacagacctggtgaagtacttccctgccaacaacatcgtgaagttcctggtgggcttcaccaacaagggcacagaggacttcatcgtggagagcctggatgccagcttccgctacccccaggactaccagttctacatccagaacttcaccgccctgcccctgaacacagtggtgcccccccagaggcaggccacctttgagtacagcttcatcccagctgagcccatgggcggccggcccttcggcctggtgatcaacctgaactacaaggacctgaatggaaatgtgttccaggatgctgtgttcaaccagacagtgaccgtcatcgagagagaagatggcctggatggagagaccatcttcatgtacatgttcctggccggcctgggcctgctggtgattgtgggcctgcaccagctgctggagagcaggaagaggaagaggcccatccagaaggtggagatgggcaccagcagccagaatgatgtggacatgtcctggatcccccaggagaccctgaaccagatcaacaaggccagcccccggcggctgcccaggaagagggcccagaagaggtctgtgggcagtgatgaatag

SEQ ID NO: 135619 - DNA, 861 bp, Artificial Sequence
  derived and/or modified sequence
atgcggctgctgccccggctgctgctgctgctgctgctggtgttcccggccactgttctgttcaggggaggcccccggggcctcctcgccgttgcccaggacctgacagaggacgaagaaacggttgaagactctatcatcgaggacgaggacgacgaggctgaagtcgaggaggacgagcctactgatctggtcgaagacaaagaggaagaagacgtgagtggcgagcctgaggctagtccatctgccgacacaacaatactatttgtcaaaggcgaggatttccccgctaataacatcgtcaaatttctggtaggcttcacaaataagggaacagaagattttattgtagaatctttggacgcaagtttccggtatccccaggactatcagttctatattcaaaatttcaccgcgctcccactgaacaccgtggtgccaccccagcggcaagcaacctttgagtactcatttatcccagccgaacctatgggcgggagaccttttggtctggttatcaatctcaattacaaggatcttaacggaaacgtattccaggatgccgtgttcaatcagacagtcacggtcattgagcgcgaagatggcttagacggagaaactatctttatgtacatgtttttggcaggcctcgggctgctggttatcgtgggattgcaccagcttctcgagtcccgaaaacgcaagcgccccattcaaaaggttgaaatgggaacttcatctcaaaacgatgtcgacatgagttggataccccaggaaacactgaaccagataaataaagctagccccaggagactgcctcgcaaacgggcacaaaagcggagcgtaggctctgacgagtag

SEQ ID NO: 135620 - DNA, 780 bp, Artificial Sequence
  derived and/or modified sequence
atgcggctgctgccccggctgctgctgctgctgctgctggtgttcccagctactgtgctatttcgggggggcccacggggccttctagcagtcgcccaggaccttaccgaagacgaagaaaccgtagaggatagcatcatagaagacgaagacgacgaggctgaagtcgaagaagacgaacccaccgatttggtcaagtatttccccgctaacaacattgtcaagttcctcgtgggctttacaaataagggtactgaagacttcattgtggagtccttggatgcctcctttcgttatccacaggattatcagttttacatacaaaacttcaccgcactcccccttaatactgtcgtcccgccacagcgacaggccacctttgagtactcgttcataccggcagaaccgatggggggtagaccatttggtttggtaatcaatctgaactacaaagacctcaacggcaacgtgttccaggacgccgtcttcaatcagactgtaaccgtgatcgagagggaggacggattggacggcgaaactattttcatgtacatgttccttgccgggctgggattactggtgattgtgggactccaccaactgctcgagtctaggaaaagaaaacgccctattcagaaggtggagatgggcacctcttcccagaatgatgttgatatgtcatggattccccaggaaactcttaaccagatcaacaaagctagcccacgaaggctgccacgcaagagagcgcagaagcgcagcgtcgggtcagatgagtag

SEQ ID NO: 135621 - DNA, 861 bp, Artificial Sequence
  derived and/or modified sequence
atgcgcctcctcccaaggctgctcttactgctgttacttgtttttccagcaacagtactgttcaggggcggtcctagaggtcttctggccgtggcccaggacctaacagaagatgaggagacggtggaagactcaattattgaggacgaggacgacgaggcagaggtagaggaggatgagcctaccgatctggtcgaagataaggaagaggaagatgttagtggcgaacctgaagcgtctcccagtgcagatacaacaatcctcttcgtgaagggagaggatttccccgctaataatatcgtcaagtttctggtgggcttcaccaacaaggggaccgaagactttattgtggaatcgctggatgcctcattccgatatccacaggattatcagttctacatacagaatttcaccgccctaccactcaacacagtcgtgccaccccagaggcaggccacatttgagtacagcttcattcccgcagagccaatgggcggtcgaccctttgggctggtaatcaaccttaattacaaagatttgaatggtaatgtcttccaggatgctgtattcaatcagaccgtaactgtcattgagagggaagatggtcttgatggcgaaacaatcttcatgtatatgtttcttgcgggattgggactgctagtcattgtcgggttgcatcagctgctggaaagcaggaaacgcaagagaccgatccagaaggttgagatgggcacctccagtcagaacgatgtggacatgtcatggattccccaggaaacactcaaccagattaataaagcctcgccgaggcgactccctagaaaacgcgcacagaagagatccgttgggtccgacgaatag

SEQ ID NO: 135622 - DNA, 780 bp, Artificial Sequence
  derived and/or modified sequence
atgaggctcttgcctagattgcttcttctactccttctggtgttccctgcgacagtgctgttccgagggggaccgagaggcttgctggccgtggcccaagatttgaccgaagatgaggagacagtggaagatagcatcatagaagacgaagacgatgaagccgaggtggaggaagacgagccaactgacctggtgaagtacttccctgctaataacatagttaaattcctggtcgggttcaccaacaaggggaccgaggactttattgtcgagagcctcgatgccagcttccgctacccacaggactaccagttttacatccaaaatttcacagcgctaccactgaacacagtggttcctccacaacgtcaggcaacattcgagtacagcttcattccagctgaaccaatgggcggaagaccttttggattggtaatcaacctgaattataaggatctcaatggaaacgtgttccaagacgctgtctttaatcaaacagtgactgtaattgagagggaggacgggctggatggggagaccattttcatgtatatgtttctagccggactcgggctgctcgtgatagtggggttacaccagctgctggagagtagaaagcggaaacggcctattcaaaaagtggagatgggcacctccagtcagaacgatgtggatatgtcgtggatcccacaggagactctgaaccagataaataaggcctctccccgacggttaccaaggaaacgggctcaaaagcggtcagtggggtccgacgagtag

SEQ ID NO: 135623 - DNA, 9669 bp, Artificial Sequence
  derived and/or modified sequence
cggagcccggatgaagagtaacgccattaccgccggagccgccgagagccttagccgacggaaactggacactggaccggcagcgccatgagactcctcccccgcttgctgctgcttctcttactcgtgttccctgccactgtcttgttccgaggcggccccagaggcttgttagcagtggcacaagatcttacagaggatgaagaaacagtagaagattccataattgaggatgaagatgatgaagccgaggtagaagaagatgaacccacagatttggtagaagataaagaggaagaagatgtgtctggtgaacctgaagcttcaccgagtgcagatacaactatactgtttgtaaaaggagaagattttccagcaaataacattgtgaagttcctggtaggctttaccaacaagggtacagaagattttattgttgaatccttagatgcctcattccgttatcctcaggactaccagttttatatccagaatttcacagctcttcctctgaacactgtagtgccaccccagagacaggcaacttttgagtactctttcattcctgcagagcccatgggcggacgaccatttggtttggtcatcaatctgaactacaaagatttgaacggcaatgtattccaagatgcagtcttcaatcaaacagttacagttattgaaagagaggatgggttagatggagaaacaatctttatgtatatgttccttgctggtcttgggcttctggttattgttggccttcatcaactcctagaatctagaaagcgtaagagacccatacagaaagtagaaatgggtacatcaagtcagaatgatgttgacatgagttggattcctcaggaaacattgaatcaaatcaataaagcttcaccaagaaggttgcccaggaaacgggcacagaagagatcagtgggatctgatgagtaaatgttcctttgtgcaacaattcggtctttacttaacctgccctaatatttttcggcctgatgggaattagtgcagagaagccatgtcaccatagaaggcaactcctacttgtgtgtggactgagcaatcagagtctgtggcgataatattgctgaaaatgcactgcattcatttttctaaagtaacaaatttggtttttttttaaaccattaaaatctatgtgtgtgcgtgtgtatgtatgtgagcagttggtcttaccagaatcattgttgaactacctgaaacaagtctttagaatactaaatataatgctgttgtctcttcctttttgacattttctgattttttcccccaaaactcagttaatatttacccactatgattattgatgtcctgccttgaacagttttaaagaaaacaatttttggaatagctcaaatttcaattgatggcacaaatcagcattttgttgttgttactgtattacaattagtattctaaaggcagaagcagaagtagctgctttttagcaatagaattgtttcagtattttgctgctgtttaatgcgcatcttcagaaaacttcccagtggcttcaaggaatttggggatctctctggcaacaaattgtgaaacatgaaatttctgctgactttaatatatgaaacctaatcctacccccttttttaacaaaaagaaactagtacatttgtgaaaattgtgttgtgttgtccattgttgctctagttctgacccagaggtagctctggagtgattttagacctactcactcagttgtgtgtaggtttttttgttttgttttgagagagaatttttctctccttaatagaagcatcctttttaaagagaagttgccttggtccacacactaagcagaaaaccaagttatcaggacagagatatttcccagttactcctaatcaatgaagaaagtgagttggatatttttaaagcagttaactaattttttcttacctaatcttttgggagttttgcttgttgatataacctttttagttaacctgaaagattccaaaaattgttcttaagtgcttgagactggaaccaaaattaaattgtacttcataaaatcctcttatagagttactcttgccctagattgtaaattaagtttggcattattgtcagactggatggagggtgaagtaaaatagtatgaacaattaagaggctctccccctcttgtctttaagccatattctcctacatgtattttataagaaaatgttaagtcaaattttagtggctctttaattcctgacctcttcattctccttttcagtataacctcccctatgctcatgcccacacagacaaaaaaacaaaacgaaatacacacagaaaaaagtctttccaaactgtttaagtatttaaacatctgagccaaagcagatagaagttattgtataattgttaatcactttgcaaataggggctatcaaattacctatattggcattgctggattataaactctatatctgtaatataaagtgtttgagtttttaattgggctgttatgatcagtagttgattttgagaaagctctatgagctctaagtaactgcatggttttttgtttaatgtaatataggagacccttcacattcccaaggaatatattccaaaacatttttgtgaatatctaagtttgtgaaactactagggcatgatacagtaaggtgtaattacagaatttacgaaatgtaaatggcctctacagagttttatggaatacctggtactaacgtaggcagctgcaaaaccacactgagttacagctgtcagccctcctcattcctaaataacttgccttacatatcagccctcccacttctgaagttcaaattagtgcctcggaaatgtagaatttattatttgtcatttttttttttttagcatagattgagaacagttgaactcttaaatcctcagatgccaggggtctgctctagcatcagtaagtatttagcagaaactaactccgtaatgaatggaattcaattccacacatggtttgttcaagcacacttaataagtagcctattttttaaatgtctttttaaaatgtaaatatttggatgaagtttttctttgttttgatatattcatttgctacaccaactatgttttcagaattcatcttttgaacaacttggtttcagaatatgtaaaatgactttaaggatcttgtgtatcaaacctatccccggatgtgtgagaataatgtgttcataaagcatggatctcgctttggttgtatagcttcctcatttacttcatggtcttacatagctggtgactttcagggctaatctgccctctaaagcattgtcccaggagaggaaaaggaaatgggacctcagaagtagaagcctcagggaaggagtaaagtagaaatcagaagaaaagaagcttcacttgatagtaataaggtttttaacttcaagtaccttcagaaaatgtgattttgataagaggaaagggcaaatttagaccttaaaaaatatggaagaactactgccttaaaagtgcatttgtggcacatcagcctagaactgtatcatggctgtgctggggagaagtaaatggtggtaatgtaacattgccacctttacttaatgatgtgttattttcgaggtacagtagatcaatatagtaataggcgagcctcatatatagcattcatcttgtacaatgatatccatacccttgatatgaaggaaaattgacttggtttgtgcatttgaatactgaaataattttttaaaactcagtgacacataccatctcttgccaagactagaccctgtattttagttcctaaattagatgtttaaatttaaaaacattttcagatgtacttaagtacttccatagtacttttttttttttttttttttttgccccctgagacggagtctctgtgtcacccaggctggagtgcagtggtgcgatctcggctcactgcaacttctgcctcttgggttcaagcagttctccctgtctcagcctcctgagtagcttggattacaggcgcccgtcaccgcacctgcctaatttttgcatttttagtagagacggggtttcgtcatttggccaggctggtcttgaactcctgaccacaggtgatacgcctgccttggcctcccaaagtgtgctgggattacaggcgtgagccactgtgcccggcccactgttcactttttgaatggcatcattttatagctgtagaactaaaatcaatgtttgccccaattttcttaagtaaaactctactttgagctcttacctccaacttagtaaaaagcagcttcacacacaaacaagattcttactggtggaatgttaggtttcgttgttaagttaatctgtctataagctcatccttagaggatatttgaggaggaagaacaccttgcagctgacttgcaaacatctaaataatttatttcgggtgcttatgaatgttactaatggattttgtatgaatttttatcccttttcatttatacaaaaacctgggcttttatgttaattatatcatctgaggttctaaggttttttttttagattttgaaatttagggataatagctcttaggtttgggtaccactttgctgcagtttaagaaagggggaagggaactcatttattaaacatcaatcacgtgctgtgttctgtttgttttctagtcatcatatcacacacctttacgacagctcactgaaggaaggtgatactgttcccattttgtagatggaatagacaaaacctgaatttaagtagcttgctcaaggttccatattgaatatggaaagttcaaatcatctcagtaatgaatataccatatatacttgctgtattgtatctatgataattcagttacccacaatacccttttaaatttctgttaatgacatacctttaaatgtctccttgatgaacagaatcatggtctttaaaaacattttcatgggttgattgcattttcaagctctaaaggattgaaagataaatcttcacgttaaaggtaagagtgaagtatctgctcttgggttacagaaccagatagtactagaactaagattacagggtaaagctgcttttatcttttttctttttctttttctttttttttttgacatggggtctcactgtattgcccaggctggaatgcagtggcatgatctcagctcacggcagcctctgcctcttgggctcaagcgattctcctgcttcagctttccaagtatttgggaccacaggcgcacaccacaggcctggctaatgtttttgttttgtttttggtagagacggggtttcaccatgttgccaggctggtctcgaactcctgagctcaagtgattcacccaccttggcctcacaaagtgtcaggcttacaggcgtgagccactgcgcccggctcacagggtaaggcttctgtctggtgtgttgtattacggattttgcttaataggcacagtgaggcattaaaaagaaaattcagtatgcctgtagaaaggataatccttgtttaaagtctccaaattgcagtcaaagatgttttgactgtgcctttttttgttcccctgctgtcccttatgtagacttctgtcagtacccatggcagcctgtcatcttgttgacatctccttctggactgtgagctctgtatctggcttgtttttcatccccagcttctagttcacaattaggtagaaccctattactctttgaagaaggaacaagaaaatgtgggccagttttcatttgccattcttccatgtgagttagtatggttcgtaagtattcctggtgatacgctagtattggcaattctgtgaggttgaacaaaggggtggtatggtgtgctagcgtgggaattaggagacctctgggtcttgacagtgccctggccactaagcaaaggcagttcatccttggagtctcaatgtgcttttttgttaattgagatatgcttgaagtatcagccctaaatagtctgattctgtgacctacaaacccttacttaattcagtgttactataaatgattcttcccttaaacctactttttacttagcaaaagagaaaaaaaaaaaaaggaaacgctcatgtcaggctgcctgggtttgaaccccagatcccctcttagttggaggcaagttgtatgatgcttcagcttttggttcctgcctcctaaggttgttaggagttactgtgtgtagctgcttagaacattgcctgggtctcagtaagccgcttaagtgactgctctcattttcgctgtaaagcaccatactgtaataacatcccatgaagcatggggcggggaagagtatatggtaccttatggactttgatgtggtggggtagtaggtaaattctgaatatgtaagctacatagtattctttttgtaactaaaggataaaagttttaagatgggcatgtaatatggctagcactggattttaatgatgagccagagtaataaggctggcaaggggagtttttgttttgtaataaatctcttacacctgcacatccagttctttttaaaaacacgtttgaagaggctccatatttctcagtgaagctgttggggttcatgttatttttgaaaatcatcttgcaatttatttcagcatcagactgaaccacccaaagaaaattagtctatttctgaacagttttttcagaaaccatattggtctgatcacccaacatttatagaaataggcgcttaaggcctagaggcatttcagaaaggagaatgagaaatactgtggtcaagagtagtgttcagatggagaacatcaagcatctgctctgcccttccacacacatcctcatttcatcttcacaactgccctaggtaaccttgttatctgtaatgaaacagcctcaaggagcacagaggcactcactcctcacgtttggtctgttgccatttccggcttggttggaatagggtaggagccttttggcagggagcacattctcagtaatgcagagtgcactcacctgggttctagcttcaacacttaggatttgcttgatattttgtattctctgaggcactgcctgtatttgtttctgctatcacagtccagagtcaagcttcatttataaagactgggcagggcatggtggctcactcctgtaattccagcactttgggaggctgaggtgggtggatcactttaggtcaggagttcaagaccagcctggccaacatggtgaaaccccatctctactaaaaaatacaaaaaggccgggcacggtggctcacacctgtaatcccaacactttgggaggccaaggtgggcagaacacctgaggtcaggagttcaagaccatcctggcgaacatagtgaaacctcgcctctactaaaaatacaaaaattagccaggtgtggtggtgcatgcctgtaatcccagctacttgggaggctgaggcaggagaattgcttaaacctgggaggtggagattgtggtgagctgagatcgtgccactgcactccagcctgggagatagaacgagactccatctcaaaaaagaacaaaaacaattagccgagcgaggtggtgcacgcctgtaatcccagctactcatgaggctgaggcaggagaatcacttgaacccaggaggaggaggttgtagtgagtcaaggttgcaccactgcactccagcctgggtgacagagtgagactgtctcaaaaaataagtacataaataataagtaaaagctactaacaattaaaaaataaataaataaagacaagactgtctggaaaatggctctcctaaaaggaccagttgccatcatccacagtggaagattcaaagcagttggtccttggtacgtatgagaagcggatttcattcccttgaattctacagagcagtttattagagtgaatgcattttaaggccttgcatttgatatgtcatccagttcataatcaagttgcctttttctggctaaaacataatgattatgtatttttctcatttggtcctacaagctgctggccctttgtccctccactgtgggaatcagatctagaggaggctgagcctgcagacacagcagtggccaaaaggtcactctaagtgttttgtcttgactccttacttgaagtccacccagctagcacacatctggtttatactgaagccccctgcctagaaatactcatttcaggaaccaccagtaagcatctgtgaccacacaggctttttgactgatggcttcccggatctggtttcaagggataaccccgtctgtgtgcatctatggtcttctctctacagcgaggactttgcagtgctgcttgtggtccacacaaggggctcagagctgagtctgaactgcttcatggtcaccagctcctgtcccttccagtcttgagaggcttttttctccagatggaacctttccttcccgccgttttctcggtctctggctgtttttctcttgtgcccgtctaattggacacctcctggcttccatctctgtggttctcctgcctcacttcctgttctgttgtttttccgttttgtcaaaatatctcctatgttcttggcttccttttcgtcgccaggttttcagctttcctttagctcttcttctaatatggcttctgcccacaaaagcctgctctgtcaggatctcatggttctccacttgccagaaccttcttcagcctcagttcctcggcctcaacttgtacgtttaacccattgaccaccaccccccaaattcaccttcatttctttgaccctgctcctcactccttttctgttgaggaatctgttgactaactccaggctcactcaggctcaccgtcctgctctctgcaccagcctttccagagcgtgccagttctcatggcttcatctgttaactgttgatcacttcagtcctgatttttagacctaaatggtttccttaacgccattctaactgcctgtgactcattttcacttacagtgtttattgtaacgccaaaccaacaaatcacaggtgcttgcttctctccataaatctccccagtctaactttttgtcattcaacatgactcgtttatccaacctgaaatcgcatatagccccaagtatggtgttttgtacacaggtatttaataagtgacttccagttttggctctgctatgaataaaaagagatttcagttctcttcactttgaaatctaacaactcagagaacattgaagaaattggaatttagttgggatgaaatacttgtggtttaaaatatttctgttcatattttctaatttgttgccggaggtcttgggttttctatttgagtgcttgcaaactcaatgtgatttctgtcagcatatcttaggtttgtttgttatgaaacttatgcagtgtgaggttctatctgaaaatgttatttagctatcttctgggactatttaatgaaagtggggtcatgaatccttaaaattcttgtgcagctttgagaaacatttctgttatttgggtatcagtttgtaagtgtggtaaagccaagatggaaacgagcactttgctttcttggttgttgttactggtctaacctcctgcttgaactagtctgctgtcctgtcaaatgcatctttttatttacatgtcccttaaattaaagctgatcatgaaagta

SEQ ID NO: 135624 - DNA, 3155 bp, Artificial Sequence
  derived and/or modified sequence
cccggatgaagagtaacgccattaccgccggagccgccgagagccttagccgacggaaactggacactggaccggcagcgccatgagactcctcccccgcttgctgctgcttctcttactcgtgttccctgccactgtcttgttccgaggcggccccagaggcttgttagcagtggcacaagatcttacagaggatgaagaaacagtagaagattccataattgaggatgaagatgatgaagccgaggtagaagaagatgaacccacagatttggtaaaatattttccagcaaataacattgtgaagttcctggtaggctttaccaacaagggtacagaagattttattgttgaatccttagatgcctcattccgttatcctcaggactaccagttttatatccagaatttcacagctcttcctctgaacactgtagtgccaccccagagacaggcaacttttgagtactctttcattcctgcagagcccatgggcggacgaccatttggtttggtcatcaatctgaactacaaagatttgaacggcaatgtattccaagatgcagtcttcaatcaaacagttacagttattgaaagagaggatgggttagatggagaaacaatctttatgtatatgttccttgctggtcttgggcttctggttattgttggccttcatcaactcctagaatctagaaagcgtaagagacccatacagaaagtagaaatgggtacatcaagtcagaatgatgttgacatgagttggattcctcaggaaacattgaatcaaatcaataaagcttcaccaagaaggttgcccaggaaacgggcacagaagagatcagtgggatctgatgagtaaatgttcctttgtgcaacaattcggtctttacttaacctgccctaatatttttcggcctgatgggaattagtgcagagaagccatgtcaccatagaaggcaactcctacttgtgtgtggactgagcaatcagagtctgtggcgataatattgctgaaaatgcactgcattcatttttctaaagtaacaaatttggtttttttttaaaccattaaaatctatgtgtgtgcgtgtgtatgtatgtgagcagttggtcttaccagaatcattgttgaactacctgaaacaagtctttagaatactaaatataatgctgttgtctcttcctttttgacattttctgattttttcccccaaaactcagttaatatttacccactatgattattgatgtcctgccttgaacagttttaaagaaaacaatttttggaatagctcaaatttcaattgatggcacaaatcagcattttgttgttgttactgtattacaattagtattctaaaggcagaagcagaagtagctgctttttagcaatagaattgtttcagtattttgctgctgtttaatgcgcatcttcagaaaacttcccagtggcttcaaggaatttggggatctctctggcaacaaattgtgaaacatgaaatttctgctgactttaatatatgaaacctaatcctacccccttttttaacaaaaagaaactagtacatttgtgaaaattgtgttgtgttgtccattgttgctctagttctgacccagaggtagctctggagtgattttagacctactcactcagttgtgtgtaggtttttttgttttgttttgagagagaatttttctctccttaatagaagcatcctttttaaagagaagttgccttggtccacacactaagcagaaaaccaagttatcaggacagagatatttcccagttactcctaatcaatgaagaaagtgagttggatatttttaaagcagttaactaattttttcttacctaatcttttgggagttttgcttgttgatataacctttttagttaacctgaaagattccaaaaattgttcttaagtgcttgagactggaaccaaaattaaattgtacttcataaaatcctcttatagagttactcttgccctagattgtaaattaagtttggcattattgtcagactggatggagggtgaagtaaaatagtatgaacaattaagaggctctccccctcttgtctttaagccatattctcctacatgtattttataagaaaatgttaagtcaaattttagtggctctttaattcctgacctcttcattctccttttcagtataacctcccctatgctcatgcccacacagacaaaaaaacaaaacgaaatacacacagaaaaaagtctttccaaactgtttaagtatttaaacatctgagccaaagcagatagaagttattgtataattgttaatcactttgcaaataggggctatcaaattacctatattggcattgctggattataaactctatatctgtaatataaagtgtttgagtttttaattgggctgttatgatcagtagttgattttgagaaagctctatgagctctaagtaactgcatggttttttgtttaatgtaatataggagacccttcacattcccaaggaatatattccaaaacatttttgtgaatatctaagtttgtgaaactactagggcatgatacagtaaggtgtaattacagaatttacgaaatgtaaatggcctctacagagttttatggaatacctggtactaacgtaggcagctgcaaaaccacactgagttacagctgtcagccctcctcattcctaaataacttgccttacatatcagccctcccacttctgaagttcaaattagtgcctcggaaatgtagaatttattatttgtcatttttttttttttagcatagattgagaacagttgaactcttaaatcctcagatgccaggggtctgctctagcatcagtaagtatttagcagaaactaactccgtaatgaatggaattcaattccacacatggtttgttcaagcacacttaataagtagcctattttttaaatgtctttttaaaatgtaaatatttggatgaagtttttctttgttttgatatattcatttgctacaccaactatgttttcagaattcatcttttgaacaacttggtttcagaatatgtaaaatgactttaaggatcttgtgtatcaaacctatccccggatgtgtgagaataatgtgttcataaagcatggatctcg

SEQ ID NO: 135625 - protein, 709 aa, Artificial Sequence
  derived and/or modified sequence
MAETLEFNDVYQEVKGSMNDGRLRLSRQGIIFKNSKTGKVDNIQAGELTEGIWRRVALGHGLKLLTKNGHVYKYDGFRESEFEKLSDFFKTHYRLELMEKDLCVKGWNWGTVKFGGQLLSFDIGDQPVFEIPLSNVSQCTTGKNEVTLEFHQNDDAEVSLMEVRFYVPPTQEDGVDPVEAFAQNVLSKADVIQATGDAICIFRELQCLTPRGRYDIRIYPTFLHLHGKTFDYKIPYTTVLRLFLLPHKDQRQMFFVISLDPPIKQGQTRYHFLILLFSKDEDISLTLNMNEEEVEKRFEGRLTKNMSGSLYEMVSRVMKALVNRKITVPGNFQGHSGAQCITCSYKASSGLLYPLERGFIYVHKPPVHIRFDEISFVNFARGTTTTRSFDFEIETKQGTQYTFSSIEREEYGKLFDFVNAKKLNIKNRGLKEGMNPSYDEYADSDEDQHDAYLERMKEEGKIREENANDSSDDSGEETDESFNPGEEEEDVAEEFDSNASASSSSNEGDSDRDEKKRKQLKKAKMAKDRKSRKKPVEVKKGKDPNAPKRPMSAYMLWLNASREKIKSDHPGISITDLSKKAGEIWKGMSKEKKEEWDRKAEDARRDYEKAMKEYEGGRGESSKRDKSKKKKKVKVKMEKKSTPSRGSSSKSSSRQLSESFKSKEFVSSDESSSGENKSKKKRRRSEDSEEEELASTPPSSEDSASGSDE

SEQ ID NO: 135626 - DNA, 2825 bp, Artificial Sequence
  derived and/or modified sequence
gtacggcttccggtggcgggacgcggggccgcgcacgcgggaaaagcttccccggtgtccccccatccccctccccgcgccccccccgcgtccccccagcgcgcccacctctcgcgccggggccctcgcgaggccgcagcctgaggagattcccaacctgctgagcatccgcacacccactcaggagttggggcccagctcccagtttacttggtttcccttgtgcagcctggggctctgcccaggccaccacaggcaggggtcgacatggcagagacactggagttcaacgacgtctatcaggaggtgaaaggttccatgaatgatggtcgactgaggttgagccgtcagggcatcatcttcaagaatagcaagacaggcaaagtggacaacatccaggctggggagttaacagaaggtatctggcgccgtgttgctctgggccatggacttaaactgcttacaaagaatggccatgtctacaagtatgatggcttccgagaatcggagtttgagaaactctctgatttcttcaaaactcactatcgccttgagctaatggagaaggacctttgtgtgaagggctggaactgggggacagtgaaatttggtgggcagctgctttcctttgacattggtgaccagccagtctttgagatacccctcagcaatgtgtcccagtgcaccacaggcaagaatgaggtgacactggaattccaccaaaacgatgacgcagaggtgtctctcatggaggtgcgcttctacgtcccacccacccaggaggatggtgtggaccctgttgaggcctttgcccagaatgtgttgtcaaaggcggatgtaatccaggccacgggagatgccatctgcatcttccgggagctgcagtgtctgactcctcgtggtcgttatgacattcggatctaccccacctttctgcacctgcatggcaagacctttgactacaagatcccctacaccacagtactgcgtctgtttttgttaccccacaaggaccagcgccagatgttctttgtgatcagcctggatcccccaatcaagcaaggccaaactcgctaccacttcctgatcctcctcttctccaaggacgaggacatttcgttgactctgaacatgaacgaggaagaagtggagaagcgctttgagggtcggctcaccaagaacatgtcaggatccctctatgagatggtcagccgggtcatgaaagcactggtaaaccgcaagatcacagtgccaggcaacttccaagggcactcaggggcccagtgcattacctgttcctacaaggcaagctcaggactgctctacccgctggagcggggcttcatctacgtccacaagccacctgtgcacatccgcttcgatgagatctcctttgtcaactttgctcgtggtaccactactactcgttcctttgactttgaaattgagaccaagcagggcactcagtataccttcagcagcattgagagggaggagtacgggaaactgtttgattttgtcaacgcgaaaaagctcaacatcaaaaaccgaggattgaaagagggcatgaacccaagctacgatgaatatgctgactctgatgaggaccagcatgatgcctacttggagaggatgaaggaggaaggcaagatccgggaggagaatgccaatgacagcagcgatgactcaggagaagaaaccgatgagtcattcaacccaggtgaagaggaggaagatgtggcagaggagtttgacagcaacgcctctgccagctcctccagtaatgagggtgacagtgaccgggatgagaagaagcggaaacagctcaaaaaggccaagatggccaaggaccgcaagagccgcaagaagcctgtggaggtgaagaagggcaaagaccccaatgcccccaagaggcccatgtctgcatacatgctgtggctcaatgccagccgagagaagatcaagtcagaccatcctggcatcagcatcacggatctttccaagaaggcaggcgagatctggaagggaatgtccaaagagaagaaagaggagtgggatcgcaaggctgaggatgccaggagggactatgaaaaagccatgaaagaatatgaagggggccgaggcgagtcttctaagagggacaagtcaaagaagaagaagaaagtaaaggtaaagatggaaaagaaatccacgccctctaggggctcatcatccaagtcgtcctcaaggcagctaagcgagagcttcaagagcaaagagtttgtgtctagtgatgagagctcttcgggagagaacaagagcaaaaagaagaggaggaggagcgaggactctgaagaagaagaactagccagtactccccccagctcagaggactcagcgtcaggatccgatgagtagaaacggaggaaggttctctttgcgcttgccttctcacaccccccgactccccacccatattttggtaccagtttctcctcatgaaatgcagtccctggattctgtgccatctgaacatgctctcctgttggtgtgtatgtcactagggcagtggggagacgtcttaactctgctgcttcccaaggatggctgtttataatttggggagagatagggtgggaggcagggcaatgcaggatccaaatcctcatcttactttcccgaccttaaggatgtagctgctgcttgtcctgttcaagttgctggagcaggggtcatgtgaggccaggcctgtagctcctacctggggcctatttctactttcattttgtatttctggtctgtgaaaatgatttaataaagggaactgactttggaaaccaaaaaaa

SEQ ID NO: 135627 - DNA, 2130 bp, Artificial Sequence
  derived and/or modified sequence
atggccgagaccctggagttcaacgacgtgtaccaggaggtgaagggcagcatgaacgacggcagactgagactgagcagacagggcatcatcttcaagaacagcaagaccggcaaggtggacaacatccaggccggcgagctgaccgagggcatctggagaagagtggccctgggccacggcctgaagctgctgaccaagaacggccacgtgtacaagtacgacggcttcagagagagcgagttcgagaagctgagcgacttcttcaagacccactacagactggagctgatggagaaggacctgtgcgtgaagggctggaactggggcaccgtgaagttcggcggccagctgctgagcttcgacatcggcgaccagcccgtgttcgagatccccctgagcaacgtgagccagtgcaccaccggcaagaacgaggtgaccctggagttccaccagaacgacgacgccgaggtgagcctgatggaggtgagattctacgtgccccccacccaggaggacggcgtggaccccgtggaggccttcgcccagaacgtgctgagcaaggccgacgtgatccaggccaccggcgacgccatctgcatcttcagagagctgcagtgcctgacccccagaggcagatacgacatcagaatctaccccaccttcctgcacctgcacggcaagaccttcgactacaagatcccctacaccaccgtgctgagactgttcctgctgccccacaaggaccagagacagatgttcttcgtgatcagcctggacccccccatcaagcagggccagaccagataccacttcctgatcctgctgttcagcaaggacgaggacatcagcctgaccctgaacatgaacgaggaggaggtggagaagagattcgagggcagactgaccaagaacatgagcggcagcctgtacgagatggtgagcagagtgatgaaggccctggtgaacagaaagatcaccgtgcccggcaacttccagggccacagcggcgcccagtgcatcacctgcagctacaaggccagcagcggcctgctgtaccccctggagagaggcttcatctacgtgcacaagccccccgtgcacatcagattcgacgagatcagcttcgtgaacttcgccagaggcaccaccaccaccagaagcttcgacttcgagatcgagaccaagcagggcacccagtacaccttcagcagcatcgagagagaggagtacggcaagctgttcgacttcgtgaacgccaagaagctgaacatcaagaacagaggcctgaaggagggcatgaaccccagctacgacgagtacgccgacagcgacgaggaccagcacgacgcctacctggagagaatgaaggaggagggcaagatcagagaggagaacgccaacgacagcagcgacgacagcggcgaggagaccgacgagagcttcaaccccggcgaggaggaggaggacgtggccgaggagttcgacagcaacgccagcgccagcagcagcagcaacgagggcgacagcgacagagacgagaagaagagaaagcagctgaagaaggccaagatggccaaggacagaaagagcagaaagaagcccgtggaggtgaagaagggcaaggaccccaacgcccccaagagacccatgagcgcctacatgctgtggctgaacgccagcagagagaagatcaagagcgaccaccccggcatcagcatcaccgacctgagcaagaaggccggcgagatctggaagggcatgagcaaggagaagaaggaggagtgggacagaaaggccgaggacgccagaagagactacgagaaggccatgaaggagtacgagggcggcagaggcgagagcagcaagagagacaagagcaagaagaagaagaaggtgaaggtgaagatggagaagaagagcacccccagcagaggcagcagcagcaagagcagcagcagacagctgagcgagagcttcaagagcaaggagttcgtgagcagcgacgagagcagcagcggcgagaacaagagcaagaagaagagaagaagaagcgaggacagcgaggaggaggagctggccagcaccccccccagcagcgaggacagcgccagcggcagcgacgagtag

SEQ ID NO: 135628 - DNA, 2130 bp, Artificial Sequence
  derived and/or modified sequence
atggctgaaaccctcgaattcaacgacgtatatcaggaagtcaaggggtccatgaatgacggcagattacgcctatcacgccaaggaataatattcaagaattcaaagactggaaaagtcgacaatatccaggcgggagagctaacagagggcatttggcgccgtgtggccctcggacacggcctgaagcttctgacaaagaacggacacgtctacaagtacgacgggtttagggagagtgagtttgagaagttgagcgacttttttaagactcattatcggttggaattgatggagaaagatctttgcgtaaagggctggaattggggcactgtgaaattcgggggccaactgctgagcttcgatattggggaccagcctgtatttgaaatccctcttagtaacgttagtcagtgcaccaccggcaaaaatgaagtcaccttggagttccatcagaacgacgatgcggaagtctccctgatggaggtgcgcttttacgttccacccacacaagaggacggcgtggaccctgtggaggcatttgctcaaaacgtcctatccaaagcagatgtcattcaggcgacaggcgacgccatttgcatctttcgtgagctgcagtgtctgacgccaaggggccgttatgatatcaggatctacccaacatttctgcatttgcatggcaagacctttgattataaaatcccttataccaccgtcctgcgtctttttttactcccccataaggatcaacgacaaatgtttttcgtaatatcgctggacccgcccattaaacaggggcaaactaggtaccacttcctgattcttctgttcagtaaggacgaggatatcagcctgacactgaacatgaacgaagaggaggtcgagaaacggtttgagggtaggcttacgaaaaacatgtcaggttccctctacgagatggtctcccgagttatgaaagctttagttaaccggaagatcactgtacccgggaattttcagggacattccggtgctcagtgcataacatgctcttataaggcctcttctggactattgtaccccttggaaaggggatttatctatgtgcataagccccccgtccacatccggttcgacgaaatctccttcgtcaactttgcaaggggaaccaccaccaccagatctttcgacttcgaaatagaaactaagcaaggcacccagtatactttcagcagcattgagcgggaggaatatggcaagctgttcgattttgtgaacgccaaaaagctcaatatcaagaaccgggggctcaaggagggtatgaatccctcatacgatgagtatgccgactccgatgaagatcagcacgacgcctatctcgaacgaatgaaggaggaaggtaagatccgggaagaaaatgccaacgatagctctgatgactctggtgaagaaactgacgaaagctttaacccaggcgaggaagaggaagatgtcgccgaagagtttgactctaatgcctcagcctcctcctcttctaacgagggcgatagcgacagagacgaaaagaaaaggaaacagttgaaaaaagcgaaaatggccaaggatagaaaatcaaggaagaagcctgtggaagttaagaaagggaaggaccccaatgcccccaagcgtcctatgtcagcttatatgctgtggttgaacgccagcagagagaagataaagagtgatcacccggggatcagcatcacagatcttagtaagaaagccggagagatttggaaaggtatgtccaaagaaaagaaggaagagtgggaccgtaaggcagaggacgcgcgtcgggactacgaaaaagctatgaaagaatatgaaggtggcaggggcgaaagtagcaagcgagataaaagtaaaaaaaagaagaaagtcaaagtcaagatggaaaagaagtcaacgccctcgcggggaagcagttcaaagagctcaagccgtcagctctccgaatcgtttaaaagtaaagagtttgtttcatcggatgagagctcgagcggcgagaacaaatccaagaagaaaaggcggcgctctgaagacagtgaggaagaagagctcgcaagcacgcctcctagcagtgaagacagtgcctccggctccgatgagtag

SEQ ID NO: 135629 - DNA, 2130 bp, Artificial Sequence
  derived and/or modified sequence
atggccgagaccctggagttcaatgatgtgtaccaggaggtgaagggctccatgaatgatggccgcctgcggctgagccggcagggcatcatcttcaagaacagcaagacaggcaaggtggacaacatccaggccggggagctgacagagggcatctggaggagagtggccctgggccacggcctgaagctgctgaccaagaatggccacgtgtacaagtatgatggcttccgggagagcgagtttgagaagctgagtgacttcttcaagacccactaccgcctggagctgatggagaaggacctgtgtgtgaagggctggaactggggcaccgtgaagtttggaggccagctgctgagctttgatattggagaccagcctgtgtttgagatccccctgagcaatgtgtcccagtgcaccaccgggaagaatgaggtgaccctggagttccaccagaatgatgatgctgaggtgtccctgatggaggtgcgcttctacgtgccccccacccaggaggatggagtggaccctgtggaggcctttgcccagaatgtgctgagcaaggcagatgtgatccaggccactggagatgccatctgcatcttccgggagctgcagtgcctgaccccccggggccgctatgacatccgcatctaccccaccttcctgcacctgcacggcaagacctttgactacaagatcccctacaccaccgtgctgcggctcttcctgctgccccacaaggaccagaggcagatgttctttgtgatcagcctggacccccccatcaagcagggccagacccgctaccacttcctgatcctgctcttcagcaaggatgaggacatcagcctgaccctgaacatgaatgaggaggaggtggagaagagatttgagggccgcctgaccaagaacatgagcggcagcctgtatgagatggtgtcccgggtgatgaaggccctggtgaacaggaagatcaccgtgcccggcaacttccagggccacagcggggcccagtgcatcacctgcagctacaaggccagcagcggcctgctgtaccccctggagcggggcttcatctacgtgcacaagccccctgtgcacatccgctttgatgagatcagctttgtgaactttgcccggggcaccaccaccaccaggagctttgattttgaaattgagaccaagcagggcacccagtacaccttcagcagcattgaaagagaggagtatggcaagctgtttgattttgtgaatgccaagaagctgaacatcaagaacagaggcctgaaggagggcatgaaccccagctatgatgaatatgctgacagtgatgaggaccagcatgatgcctacctggagaggatgaaggaggagggcaagatccgggaggagaatgccaatgacagcagtgatgacagcggggaggagacagatgagagcttcaaccctggagaggaggaggaggatgtggccgaggagtttgacagcaatgccagcgccagcagcagcagcaatgaaggagacagcgacagagatgagaagaagaggaagcagctgaagaaggccaagatggccaaggacaggaagagcaggaagaagcctgtggaggtgaagaagggcaaggaccccaatgcccccaagaggcccatgtctgcctacatgctgtggctgaatgccagccgggagaagatcaagagtgaccaccctggcatcagcatcacagacctgagcaagaaggccggggagatctggaagggcatgagcaaggagaagaaggaggagtgggacaggaaggcagaagatgcccggcgggactatgagaaggccatgaaggagtatgagggcggccgcggggagagcagcaagagggacaagagcaagaagaagaagaaggtgaaggtgaagatggagaagaagagcacccccagccggggcagcagcagcaagagcagcagccggcagctgtctgagagcttcaagagcaaggagtttgtgtccagtgatgagagcagcagtggagagaacaagagcaagaagaagagaagaagaagtgaggacagcgaggaggaggagctggccagcaccccacccagcagtgaagattctgccagcggcagtgatgaatag

SEQ ID NO: 135630 - DNA, 2130 bp, Artificial Sequence
  derived and/or modified sequence
atggccgagaccctggagttcaacgacgtgtaccaggaggtgaaggggtctatgaacgacgggcgccttcggctttcacggcagggcatcatcttcaaaaacagcaagaccggtaaagtggacaacatccaggcaggagaactgacggaaggtatctggagaagggtggcgttgggacatggactgaaacttttgaccaaaaacggccacgtgtacaaatacgatggcttcagggagagtgaatttgagaaacttagcgatttctttaaaacccactaccgattggaactgatggagaaagatctgtgcgtcaagggctggaactggggcaccgtgaaattcggaggacaactgctctcttttgacataggagatcagcccgtcttcgaaatacccctgagtaatgtttcccagtgcacaacgggcaaaaatgaggtgacccttgaatttcatcaaaacgacgacgccgaagtgagcttaatggaggttcgcttttacgtgccacccacccaggaagacggcgttgatccagtcgaagcgttcgcccagaatgtcttgtccaaagccgacgtcatccaagccacaggggatgctatctgtatatttagagagttacagtgtctgaccccacggggtcggtacgacatcaggatttaccctacattcctacacttgcatggaaagacatttgattacaagataccctatactaccgtgttacggctgttcctcttaccccacaaggaccagcgccagatgttctttgtgatcagtttggacccccccataaagcagggacaaacaagatatcactttcttattctgctgttctctaaggatgaggatattagccttacacttaatatgaatgaggaggaggttgagaagcggtttgagggccggctgaccaagaacatgagcgggagcctatacgagatggtgtcaagggttatgaaagccctggttaacagaaagatcactgtgcctgggaattttcagggacacagcggggctcaatgtatcacttgtagctataaagcatcgtcagggctcttatacccacttgaaagagggttcatctacgttcacaagcctcctgtccatattcgcttcgacgagatttcttttgtaaacttcgcgaggggaacaactaccacacgatcttttgattttgagattgagaccaaacaggggacgcagtatacgttttcctctatcgagagagaagagtatggcaaactcttcgactttgtgaacgccaagaagctgaatattaaaaacaggggcctaaaggaaggaatgaatcccagctatgacgaatatgctgattcagatgaggatcagcacgatgcctaccttgaacggatgaaagaagaagggaaaatccgagaggagaacgcgaacgacagctctgatgattccggcgaagagaccgatgaaagctttaacccgggtgaggaggaagaagacgttgctgaggaattcgactccaacgctagtgcctcctctagttcaaatgagggggactctgatcgtgatgagaagaagcgcaagcagcttaaaaaggccaagatggctaaagaccggaagtcccggaagaaaccagtcgaggtgaagaaaggcaaggaccccaacgcccctaagcgcccgatgtcagcatacatgttatggcttaacgccagcagggaaaaaattaaatccgatcaccccgggataagcatcacagatttatccaagaaggccggagagatctggaaaggtatgtctaaagaaaagaaagaagaatgggaccgaaaagccgaggatgctaggcgcgactatgaaaaggcaatgaaggagtatgaaggaggacgaggcgaatccagtaagagagacaaatccaaaaagaagaagaaggtgaaagtcaaaatggaaaagaagagtacaccttcacgcggctccagcagcaaaagcagcagcaggcagttatcagagtcttttaaatcaaaggaattcgtctcgtccgacgaaagcagctcgggggagaataagtccaaaaagaaaagacggcgctccgaggacagcgaggaggaggagttggctagcactcccccctcaagcgaggattccgcttcaggaagtgacgagtag

SEQ ID NO: 135631 - DNA, 2130 bp, Artificial Sequence
  derived and/or modified sequence
atggctgagacactggagtttaatgatgtataccaagaggtcaaagggtctatgaacgatggcagactacggttgagccgccaaggcattatcttcaagaactctaagacagggaaggtggataatattcaagccggtgaactgacagaaggcatctggcgacgtgtggccctcgggcacgggcttaagctcctaacaaagaacgggcacgtgtataaatacgatggcttcagagaatcggagtttgaaaaattgagcgacttcttcaagacacactatcggttggaacttatggaaaaagacttgtgtgtgaaggggtggaattggggaaccgtcaaattcggcggacagttactgtccttcgacatcggggaccagcccgtgttcgagatacctttatctaacgtctcacagtgtaccaccggaaaaaacgaggtgactcttgaattccatcagaacgatgacgccgaggtgtctcttatggaagtgcggttttatgtgccccctacgcaagaggatggtgttgatccggtagaggccttcgcccaaaacgtcttgtctaaggcagacgtaatccaggccaccggcgatgcaatttgtatcttccgcgagctacagtgcttgactcccaggggacgctatgacatacgaatctacccaacatttctccacttacacggtaagaccttcgactacaagataccgtacactacagtgctgcgcctgtttctcctgccacataaagaccagcgtcagatgttctttgtaatttctttagaccccccaatcaaacaggggcagacccggtaccacttcttaatcctcctcttcagcaaggacgaggacatctctctcaccttgaacatgaatgaagaagaggtcgaaaagcggtttgaagggaggctgactaagaatatgtctggctctctgtatgagatggtttcacgagtgatgaaagcattggtcaatcgtaagattaccgttcctggaaattttcagggtcactcaggcgctcaatgtatcacttgttcttacaaagcttcgtctggactgctgtaccccctggagagaggatttatatatgtgcataagccccctgtccacatccgattcgatgaaattagttttgtgaattttgcgagaggtacaaccaccactcgctctttcgactttgaaattgagacaaagcaggggacgcagtacacgttttctagtattgaacgtgaagagtacggcaaattattcgacttcgtcaatgctaaaaaactgaacatcaaaaatcgagggctaaaggaagggatgaatccatcctacgatgagtatgccgattcagacgaagaccagcacgatgcatacctcgaacgcatgaaagaggaagggaagattcgggaagagaatgctaacgatagctccgatgattccggcgaggaaactgatgagtccttcaatcccggagaagaggaggaggacgttgcagaggaattcgactcaaatgctagcgcgtcttctagtagtaatgaaggcgatagcgacagggacgagaagaaaagaaagcagctcaaaaaggctaaaatggccaaggatcgcaagagccgcaaaaagccagtcgaggtcaagaagggcaaagaccccaacgccccaaaacgccctatgtccgcttatatgttatggttaaacgcctcaagggagaagattaagtccgaccatccaggtatctccatcacagacttgtcaaaaaaagcgggagaaatttggaaaggcatgtctaaggagaagaaggaagaatgggatcgcaaagcagaagatgcacggcgagactatgagaaagctatgaaagagtacgaggggggaaggggcgagagctccaaacgcgacaagtctaagaaaaagaagaaagtgaaggtaaaaatggaaaaaaaatcaaccccaagtcgcggtagctccagcaagtcctcctcaaggcagttaagcgagagctttaagagtaaagaattcgtgtcttccgacgaaagctctagcggtgagaacaaatcaaaaaaaaaacgtagacggagcgaggattctgaggaagaagagctggcttccacccctcctagtagcgaagacagtgctagcggcagcgacgagtag

SEQ ID NO: 135632 - DNA, 2819 bp, Artificial Sequence
  derived and/or modified sequence
gtacggcttccggtggcgggacgcggggccgcgcacgcgggaaaagcttccccggtgtccccccatccccctccccgcgccccccccgcgtccccccagcgcgcccacctctcgcgccggggccctcgcgaggccgcagcctgaggagattcccaacctgctgagcatccgcacacccactcaggagttggggcccagctcccagtttacttggtttcccttgtgcagcctggggctctgcccaggccaccacaggcaggggtcgacatggcagagacactggagttcaacgacgtctatcaggaggtgaaaggttccatgaatgatggtcgactgaggttgagccgtcagggcatcatcttcaagaatagcaagacaggcaaagtggacaacatccaggctggggagttaacagaaggtatctggcgccgtgttgctctgggccatggacttaaactgcttacaaagaatggccatgtctacaagtatgatggcttccgagaatcggagtttgagaaactctctgatttcttcaaaactcactatcgccttgagctaatggagaaggacctttgtgtgaagggctggaactgggggacagtgaaatttggtgggcagctgctttcctttgacattggtgaccagccagtctttgagatacccctcagcaatgtgtcccagtgcaccacaggcaagaatgaggtgacactggaattccaccaaaacgatgacgcagaggtgtctctcatggaggtgcgcttctacgtcccacccacccaggaggatggtgtggaccctgttgaggcctttgcccagaatgtgttgtcaaaggcggatgtaatccaggccacgggagatgccatctgcatcttccgggagctgcagtgtctgactcctcgtggtcgttatgacattcggatctaccccacctttctgcacctgcatggcaagacctttgactacaagatcccctacaccacagtactgcgtctgtttttgttaccccacaaggaccagcgccagatgttctttgtgatcagcctggatcccccaatcaagcaaggccaaactcgctaccacttcctgatcctcctcttctccaaggacgaggacatttcgttgactctgaacatgaacgaggaagaagtggagaagcgctttgagggtcggctcaccaagaacatgtcaggatccctctatgagatggtcagccgggtcatgaaagcactggtaaaccgcaagatcacagtgccaggcaacttccaagggcactcaggggcccagtgcattacctgttcctacaaggcaagctcaggactgctctacccgctggagcggggcttcatctacgtccacaagccacctgtgcacatccgcttcgatgagatctcctttgtcaactttgctcgtggtaccactactactcgttcctttgactttgaaattgagaccaagcagggcactcagtataccttcagcagcattgagagggaggagtacgggaaactgtttgattttgtcaacgcgaaaaagctcaacatcaaaaaccgaggattgaaagagggcatgaacccaagctacgatgaatatgctgactctgatgaggaccagcatgatgcctacttggagaggatgaaggaggaaggcaagatccgggaggagaatgccaatgacagcagcgatgactcaggagaagaaaccgatgagtcattcaacccaggtgaagaggaggaagatgtggcagaggagtttgacagcaacgcctctgccagctcctccagtaatgagggtgacagtgaccgggatgagaagaagcggaaacagctcaaaaaggccaagatggccaaggaccgcaagagccgcaagaagcctgtggaggtgaagaagggcaaagaccccaatgcccccaagaggcccatgtctgcatacatgctgtggctcaatgccagccgagagaagatcaagtcagaccatcctggcatcagcatcacggatctttccaagaaggcaggcgagatctggaagggaatgtccaaagagaagaaagaggagtgggatcgcaaggctgaggatgccaggagggactatgaaaaagccatgaaagaatatgaagggggccgaggcgagtcttctaagagggacaagtcaaagaagaagaagaaagtaaaggtaaagatggaaaagaaatccacgccctctaggggctcatcatccaagtcgtcctcaaggcagctaagcgagagcttcaagagcaaagagtttgtgtctagtgatgagagctcttcgggagagaacaagagcaaaaagaagaggaggaggagcgaggactctgaagaagaagaactagccagtactccccccagctcagaggactcagcgtcaggatccgatgagtagaaacggaggaaggttctctttgcgcttgccttctcacaccccccgactccccacccatattttggtaccagtttctcctcatgaaatgcagtccctggattctgtgccatctgaacatgctctcctgttggtgtgtatgtcactagggcagtggggagacgtcttaactctgctgcttcccaaggatggctgtttataatttggggagagatagggtgggaggcagggcaatgcaggatccaaatcctcatcttactttcccgaccttaaggatgtagctgctgcttgtcctgttcaagttgctggagcaggggtcatgtgaggccaggcctgtagctcctacctggggcctatttctactttcattttgtatttctggtctgtgaaaatgatttaataaagggaactgactttggaaacca

SEQ ID NO: 135633 - protein, 402 aa, Artificial Sequence
  derived and/or modified sequence
MIPPSSPREDGVDGLPKEAVGAEQPPSPASTSSQESKLQKLKRSLSFKTKSLRSKSADNFFQRTNSEDMKLQAHMVAEISPSSSPLPAPGSLTSTPARAGLHPGGKAHAFQEYIFKKPTFCDVCNHMIVGTNAKHGLRCKACKMSIHHKCTDGLAPQRCMGKLPKGFRRYYSSPLLIHEQFGCIKEVMPIACGNKVDPVYETLRFGTSLAQRTKKGSSGSGSDSPHRTSTSDLVEVPEEANGPGGGYDLRKRSNSVFTYPENGTDDFRDPAKNINHQGSLSKDPLQMNTYVALYKFVPQENEDLEMRPGDIITLLEDSNEDWWKGKIQDRIGFFPANFVQRLQQNEKIFRCVRTFIGCKEQGQITLKENQICVSSEEEQDGFIRVLSGKKKGLIPLDVLENI

SEQ ID NO: 135634 - protein, 334 aa, Artificial Sequence
  derived and/or modified sequence
MKLQAHMVAEISPSSSPLPAPGSLTSTPARAGLHPGGKAHAFQEYIFKKPTFCDVCNHMIVGTNAKHGLRCKACKMSIHHKCTDGLAPQRCMGKLPKGFRRYYSSPLLIHEQFGCIKEVMPIACGNKVDPVYETLRFGTSLAQRTKKGSSGSGSDSPHRTSTSDLVEVPEEANGPGGGYDLRKRSNSVFTYPENGTDDFRDPAKNINHQGSLSKDPLQMNTYVALYKFVPQENEDLEMRPGDIITLLEDSNEDWWKGKIQDRIGFFPANFVQRLQQNEKIFRCVRTFIGCKEQGQITLKENQICVSSEEEQDGFIRVLSGKKKGLIPLDVLENI

SEQ ID NO: 135635 - DNA, 1209 bp, Artificial Sequence
  derived and/or modified sequence
atgattccacccagttctcctcgcgaagatggcgtggacggattaccaaaggaggccgtgggagccgagcagcccccatccccggctagcacatcaagtcaggagtccaagttacagaaattaaagcgctccctgagctttaagaccaagagcctgagatcgaagtccgccgataacttctttcaacgcactaactctgaggacatgaagttgcaggcacatatggtggccgaaattagcccctccagctcacctctacccgctccggggtccctgaccagcactcctgcaagagctggcctgcatccaggcgggaaagcacacgctttccaggagtatatattcaagaagcctactttctgcgatgtctgtaaccatatgatcgtagggaccaatgccaaacacgggctgagatgtaaggcttgtaaaatgtccatccatcataagtgcactgacgggctggctccccagagatgcatgggtaaattgcctaaaggctttcggcgctactattcttcacctctgctgatccacgaacagttcggctgcataaaggaagtgatgcccattgcttgtggcaacaaggttgacccagtttatgagaccctgagatttgggacaagtctagctcagaggacaaaaaaaggctcctcaggttccgggtctgactccccccatcggaccagtactagtgatctggttgaagtgcccgaggaggctaacggacctggcggtggctacgacttacgtaagcgcagtaacagcgtctttacctatccagagaacgggacggatgatttccgggaccccgccaagaatattaatcaccagggctccctctctaaggaccccctgcagatgaacacttacgtggcactctacaagtttgtgcctcaggaaaatgaggacttggaaatgcgaccaggggacatcatcaccttactggaagactcgaacgaagattggtggaaaggcaaaatccaggaccgaattgggtttttccccgcaaacttcgtacagagactgcagcaaaatgaaaaaatatttagatgtgtcaggactttcattggctgtaaagagcagggccagatcactctaaaagagaatcaaatttgtgtttcttcagaagaggaacaggacggtttcatcagggtcctgagcggcaaaaagaaaggccttattccccttgacgtgttggagaacatctag

SEQ ID NO: 135636 - DNA, 1209 bp, Artificial Sequence
  derived and/or modified sequence
atgatcccccccagcagccccagagaagatggagtggatggcctgcccaaggaggccgtgggcgctgagcagccccccagccctgccagcaccagcagccaggagagcaagctgcagaagctgaagaggagcctgtccttcaagaccaagagcctgcggagcaagtctgctgacaacttcttccagaggaccaacagcgaggacatgaagctgcaggcccacatggtggccgagatcagccccagcagcagccccctgcctgcccctggcagcctgaccagcaccccagcccgggccggcctgcaccctgggggcaaggcccacgccttccaggagtacatcttcaagaagcccaccttctgtgatgtgtgcaaccacatgattgtgggcaccaatgccaagcacggcctgcgctgcaaggcctgcaagatgagcatccaccacaagtgcacagatggcctggccccccagcgctgcatgggcaagctgcccaagggcttccgccgctactacagcagccccctgctgatccacgagcagtttggctgcatcaaggaggtgatgcccatcgcctgtggcaacaaggtggaccctgtgtatgagaccctgcgcttcggcaccagcctggcccagaggaccaagaagggcagcagcggcagcggcagtgacagcccccacaggaccagcaccagtgacctggtggaggtgcctgaggaggccaatggacctgggggcggctatgacctgaggaagaggagcaacagcgtcttcacctacccagaaaatggaacagatgacttccgggaccctgccaagaacatcaaccaccagggcagcctgagcaaggaccccctgcagatgaacacctacgtggccctgtacaagtttgtgccccaggagaatgaagacctggagatgaggcctggggacatcatcaccctgctggaggacagcaatgaagactggtggaagggcaagatccaggacagaattggcttcttccctgccaactttgtgcagaggctgcagcagaatgagaagatcttccgctgtgtgaggaccttcatcggctgcaaggagcagggccagatcaccctgaaggagaaccagatctgtgtgtcctctgaggaggagcaggacggcttcatccgggtgctgagcggcaagaagaagggcctcatccccctggatgtgctggagaacatctag

SEQ ID NO: 135637 - DNA, 1209 bp, Artificial Sequence
  derived and/or modified sequence
atgatcccccccagcagcccccgggaggacggcgtggacggcctgcccaaggaagccgttggtgccgagcagcctcccagccccgccagcaccagtagccaggaatctaaattacagaagctgaaacggagcctttcctttaaaaccaagtcgctcaggtcaaaatccgcagacaacttttttcagcggacgaactccgaggatatgaagctgcaggctcacatggtggctgaaatcagtccatcgtcgtctcctctgcctgcacccggctcactgacctccaccccggcacgagcgggcctccaccctggagggaaggcacacgccttccaggaatatattttcaagaaaccaactttttgcgacgtctgtaaccatatgattgtgggcacgaatgctaagcacggcttaagatgtaaggcgtgcaagatgagcatccaccacaagtgtaccgatggcctagccccccagcgatgtatgggcaagctgccaaaggggttccgaagatactattcttcgccactcctgatccacgagcagttcgggtgtatcaaagaggtcatgccgattgcatgtggtaataaggtggaccccgtgtacgaaactctgcgattcggcactagcctcgcacagagaaccaagaaagggagttctgggtccggctccgacagcccgcataggacatctaccagcgatctggtcgaagttcctgaagaggcgaacggaccaggcggcggttacgatctgaggaagagaagtaacagcgtgtttacttacccagagaacggcacggatgattttcgagacccagccaaaaacatcaatcaccaggggtccctctctaaggatccattgcagatgaatacatacgtagccttatacaagtttgtcccgcaggagaacgaagacttagaaatgagaccaggggacatcattactctattagaggattcaaacgaggattggtggaagggaaaaattcaggaccggatcggatttttcccagctaactttgtccaaaggctgcaacaaaatgaaaagatctttagatgcgtgaggacctttatcggatgtaaagagcagggccaaatcacgctgaaggaaaatcagatctgcgtctcttctgaggaggagcaagacggcttcatccgagtcctgagcggcaagaagaagggccttattcccctggatgtgcttgagaacatctag

SEQ ID NO: 135638 - DNA, 1209 bp, Artificial Sequence
  derived and/or modified sequence
atgataccacccagtagtcctagagaggatggagtcgacggcctgcccaaggaggcagtgggggcagaacagccgccaagccccgcttcaacaagctcccaggaaagtaagcttcagaagctgaagcggagcctatcgttcaaaaccaagagtctccgaagtaaaagtgccgacaacttttttcaacggaccaattccgaagatatgaaactccaagcgcacatggtggccgaaatttctccctcctctagtcccctaccagcccctggatcgcttacctccacacccgctagggctgggctgcaccctggtggaaaggcacacgcatttcaggagtatatcttcaaaaagcccacattctgtgacgtgtgcaatcatatgatcgtggggaccaatgccaagcacggactccggtgtaaagcatgtaaaatgtcaatacatcataagtgtacagatggtcttgccccacagcggtgcatgggaaagttacccaaaggattcagacggtactatagtagcccgttgctgatccatgagcaatttggctgtataaaggaggtcatgcccattgcctgcggtaacaaagttgaccctgtctacgagactttaagatttggaaccagtctggctcagaggaccaaaaaaggatcctctggttccggttcagactccccacacaggacatctaccagcgatctagttgaagtccccgaagaggccaatgggcctgggggagggtatgacttgcgtaaacgatcaaattcggtgttcacgtatcccgagaatggcacagacgacttccgggatcctgctaagaatatcaaccatcagggcagtctgtcaaaggaccccctgcagatgaacacctatgtggcactgtacaaattcgtgccccaggaaaatgaagacctggaaatgagaccaggggatattatcaccttgctggaggacagtaacgaagattggtggaaggggaaaatccaagacaggattgggtttttcccagctaattttgtccaaagacttcaacagaatgagaaaatttttcgttgcgtcagaacattcatcggctgtaaagaacaaggccagataacactgaaggaaaatcagatctgcgtgtccagcgaggaagagcaggacggtttcatccgagttctgtcaggaaagaaaaagggcctaatccctctggatgtcttagagaacatttag

SEQ ID NO: 135639 - DNA, 3227 bp, Artificial Sequence
  derived and/or modified sequence
agaagcccgctcgcccgctgccgagtggcagtcacgactgtgaggtcgccggcgaggtggccgcgggcgcggcggggcggggcagggcgcactctcctccacgcccgcggaagtgccggggaggtgggcagggcggggagggagagggagcgaggctggaggagggcacgtcggcgcctcggcgaggatgggagtccccaggacccggagctgagcagcctggcgcgcggcgggcagggcgcgcaggacagaagcctcgctgttcctccgggagcccaacaccgttcccgcgcggccacgatgatccctccgagcagcccccgcgaggacggcgtggacgggctgcccaaggaggcggtgggcgccgagcaaccgccctctcctgcatccaccagcagccaggaatccaagctccagaaactaaaacgatcactttctttcaagaccaagagtttacggagcaaaagtgctgacaacttcttccagcgaaccaacagcgaagacatgaaactgcaagcacacatggtggctgagatcagccccagctccagcccactccctgctccaggaagcctgacgtccacacccgccagggctggtctgcatccaggtggcaaggctcatgcctttcaggaatacatcttcaagaagcccactttctgtgatgtctgcaaccacatgatagtgggaacaaatgctaagcatggactgcgctgcaaagcctgtaagatgagcatccaccacaagtgcacagatggcctggcaccccagcggtgcatgggcaagctgccaaaggggtttcggcgttactacagctcccccttgctcattcatgaacagtttggctgcattaaagaagttatgcccattgcctgtggcaataaggtggaccctgtctacgagaccctccgcttcggcacctccctggcccagaggacaaagaagggcagctccggcagtggctctgactcacctcacagaacctctacttcagatcttgtggaggttcctgaggaagccaatgggccaggaggcgggtatgacctaaggaaacgcagcaacagcgtgtttacatatccagaaaatggcactgatgatttcagagatccagcgaagaacataaaccaccagggatctctttccaaagacccattacagatgaacacctatgttgccttgtacaaatttgtaccacaggagaatgaagatttggaaatgaggccaggagacataattactcttttagaggattccaatgaagactggtggaaagggaaaattcaagacagaattggcttctttccagccaactttgttcagagactacaacaaaatgagaagatttttagatgtgttagaaccttcattgggtgtaaggaacaggggcagataacactgaaagagaatcagatctgcgtgagttctgaagaagaacaagatggttttatcagagtcctcagtggaaaaaagaaaggcctcatcccccttgatgtactagaaaacatctgattgctggctcctcctccgtttgcagtaggcaagctctgctgcgatgcctctgcctcatctcacactgcgtcaacccaaaggagctgccgcactgacccagccccccaggaaacagtgagacaagaatcaagtatctgagactgtggagtaatagccacaaaacagagggcccactgcacagcatatccaggctgccacaggtggggacgaggctgagagagtcagcaggcagagccagatgccatgcttggcagcagcagtaggactataaaccacagctgtcccccaggatcccactcctttcctgtctgtgtggtgtaagttaacacactggagtgtgctccagtttgcagggtagcccagtgcaaggttcagatccatgtagctaagtattatcctgcttccagacctatgtcaccagtaccaatcagtcagtgtcatcacatttcaggccccaagcaatctctgtgcaaagcatcagaaagacctgcttcccagcccccagcattccagtgctctccaggcttcctctctttgtgattgtgctgtccagagtgtccagcttgttctttctttctcttcagtcctctgagtacatctggtggtgtgcattagatgtgagggctatgttgacatggcatcacctccaaagacctgacctgcctaaagactgatgacaggccatccttcctgctgttctaggtactggcctgggtgacagagcaggacatgagacatagatacagtggggaggagaagtggggaaaggtggagcagagagttcttacttattgaagattatacagccctttcggttatgaagtccctgcttgaaggcaatggacctggggaagagactatcacaaaaagtctccattttcattttacatcctctctattggaggcagcacttttccctcatgctgtcctataggactccactttgaaggttgtgcctacgttgcagggaactaggaacatggaggggaaccaacaacagcatcttagaagaaatgtagccaaattggagtccattcttctttagggcagtatatgaaatcctagcagatgtaaaatggaaaagaatcctaatgcttcttccttcagaaagtagaggaactaggggcccaattagcatcatctaggggaatctctattactctgtacttatactaatgtttacaagaatgcaatatactgtgatgccttcctactcaagcctcctagcattcaaacttccatcctattagtcattaacatggttaaacttcaattcacaatcaccttggaatcaatgtcagtttgatttattttgttacagagcaataaaatcattagaacaatggtttttaaaagacttaagtggatgcatcctatgcatgtaagcattatttcccaaaccaaagcatcattcatctccatttatttcttttgttcccgctcagtgtgaagttgggaactgagaggggatggctgctggtttcacagaagtttggatgccttactcttatcttaaagccagcatccagaatttcctccctctctgatgccacatgcaaaaccaggtgtacgatgtcaagatggattctttgagagccagggtagatcatatgactgcctttctgtaaaattggatgcctagtacaaatgctctttgcctctaattcagtattccatttaataaaaacaatacagtggctggaaaggagcatcagaaa

SEQ ID NO: 135640 - DNA, 1630 bp, Artificial Sequence
  derived and/or modified sequence
gcgaggatgggagtccccaggacccggagctgagcagcctggcgcgcggcgggcagggcgcgcaggacagaagcctcgctgttcctccgggagcccaacaccgttcccgcgcggccacgatgatccctccgaggcggtgggcgccgagcaaccgccctctcctgcatccaccagcagccaggaatccaagctccagaaactaaaacgatcactttctttcaagaccaagagtttacggagcaaaagtgctgacaacttcttccagcgaaccaacagcgaagacatgaaactgcaagcacacatggtggctgagatcagccccagctccagcccactccctgctccaggaagcctgacgtccacacccgccagggctggtctgcatccaggtggcaaggctcatgcctttcaggaatacatcttcaagaagcccactttctgtgatgtctgcaaccacatgatagtgggaacaaatgctaagcatggactgcgctgcaaagcctgtaagatgagcatccaccacaagtgcacagatggcctggcaccccagcggtgcatgggcaagctgccaaaggggtttcggcgttactacagctcccccttgctcattcatgaacagtttggctgcattaaagaagttatgcccattgcctgtggcaataaggtggaccctgtctacgagaccctccgcttcggcacctccctggcccagaggacaaagaagggcagctccggcagtggctctgactcacctcacagaacctctacttcagatcttgtggaggttcctgaggaagccaatgggccaggaggcgggtatgacctaaggaaacgcagcaacagcgtgtttacatatccagaaaatggcactgatgatttcagagatccagcgaagaacataaaccaccagggatctctttccaaagacccattacagatgaacacctatgttgccttgtacaaatttgtaccacaggagaatgaagatttggaaatgaggccaggagacataattactcttttagaggattccaatgaagactggtggaaagggaaaattcaagacagaattggcttctttccagccaactttgttcagagactacaacaaaatgagaagatttttagatgtgttagaaccttcattgggtgtaaggaacaggggcagataacactgaaagagaatcagatctgcgtgagttctgaagaagaacaagatggttttatcagagtcctcagtggaaaaaagaaaggcctcatcccccttgatgtactagaaaacatctgattgctggctcctcctccgtttgcagtaggcaagctctgctgcgatgcctctgcctcatctcacactgcgtcaacccaaaggagctgccgcactgacccagccccccaggaaacagtgagacaagaatcaagtatctgagactgtggagtaatagccacaaaacagagggcccactgcacagcatatccaggctgccacaggtggggacgaggctgagagagtcagcaggcagagccagatgccatgcttggcagcagcagtaggactataaaccacagctgtcccccaggatcccactcctttcctgtctgtgtggtgtaagttaacacactggagtgtgct

SEQ ID NO: 135641 - DNA, 1209 bp, Artificial Sequence
  derived and/or modified sequence
atgatcccccccagcagccccagagaggacggcgtggacggcctgcccaaggaggccgtgggcgccgagcagccccccagccccgccagcaccagcagccaggagagcaagctgcagaagctgaagagaagcctgagcttcaagaccaagagcctgagaagcaagagcgccgacaacttcttccagagaaccaacagcgaggacatgaagctgcaggcccacatggtggccgagatcagccccagcagcagccccctgcccgcccccggcagcctgaccagcacccccgccagagccggcctgcaccccggcggcaaggcccacgccttccaggagtacatcttcaagaagcccaccttctgcgacgtgtgcaaccacatgatcgtgggcaccaacgccaagcacggcctgagatgcaaggcctgcaagatgagcatccaccacaagtgcaccgacggcctggccccccagagatgcatgggcaagctgcccaagggcttcagaagatactacagcagccccctgctgatccacgagcagttcggctgcatcaaggaggtgatgcccatcgcctgcggcaacaaggtggaccccgtgtacgagaccctgagattcggcaccagcctggcccagagaaccaagaagggcagcagcggcagcggcagcgacagcccccacagaaccagcaccagcgacctggtggaggtgcccgaggaggccaacggccccggcggcggctacgacctgagaaagagaagcaacagcgtgttcacctaccccgagaacggcaccgacgacttcagagaccccgccaagaacatcaaccaccagggcagcctgagcaaggaccccctgcagatgaacacctacgtggccctgtacaagttcgtgccccaggagaacgaggacctggagatgagacccggcgacatcatcaccctgctggaggacagcaacgaggactggtggaagggcaagatccaggacagaatcggcttcttccccgccaacttcgtgcagagactgcagcagaacgagaagatcttcagatgcgtgagaaccttcatcggctgcaaggagcagggccagatcaccctgaaggagaaccagatctgcgtgagcagcgaggaggagcaggacggcttcatcagagtgctgagcggcaagaagaagggcctgatccccctggacgtgctggagaacatctag

SEQ ID NO: 135642 - protein, 769 aa, Artificial Sequence
  derived and/or modified sequence
MAQWNQLQQLDTRYLEQLHQLYSDSFPMELRQFLAPWIESQDWAYAASKESHATLVFHNLLGEIDQQYSRFLQESNVLYQHNLRRIKQFLQSRYLEKPMEIARIVARCLWEESRLLQTAATAAQQGGQANHPTAAVVTEKQQMLEQHLQDVRKRVQDLEQKMKVVENLQDDFDFNYKTLKSQGDMQDLNGNNQSVTRQKMQQLEQMLTALDQMRRSIVSELAGLLSAMEYVQKTLTDEELADWKRRQQIACIGGPPNICLDRLENWITSLAESQLQTRQQIKKLEELQQKVSYKGDPIVQHRPMLEERIVELFRNLMKSAFVVERQPCMPMHPDRPLVIKTGVQFTTKVRLLVKFPELNYQLKIKVCIDKDSGDVAALRGSRKFNILGTNTKVMNMEESNNGSLSAEFKHLTLREQRCGNGGRANCDASLIVTEELHLITFETEVYHQGLKIDLETHSLPVVVISNICQMPNAWASILWYNMLTNNPKNVNFFTKPPIGTWDQVAEVLSWQFSSTTKRGLSIEQLTTLAEKLLGPGVNYSGCQITWAKFCKENMAGKGFSFWVWLDNIIDLVKKYILALWNEGYIMGFISKERERAILSTKPPGTFLLRFSESSKEGGVTFTWVEKDISGKTQIQSVEPYTKQQLNNMSFAEIIMGYKIMDATNILVSPLVYLYPDIPKEEAFGKYCRPESQEHPEADPGAAPYLKTKFICVTPTTCSNTIDLPMSPRTLDSLMQFGNNGEGAEPSAGGQFESLTFDMELTSECATSPM

SEQ ID NO: 135643 - DNA, 4953 bp, Artificial Sequence
  derived and/or modified sequence
ggtttccggagctgcggcggcgcagactgggagggggagccgggggttccgacgtcgcagccgagggaacaagccccaaccggatcctggacaggcaccccggcttggcgctgtctctccccctcggctcggagaggcccttcggcctgagggagcctcgccgcccgtccccggcacacgcgcagccccggcctctcggcctctgccggagaaacaggatggcccaatggaatcagctacagcagcttgacacacggtacctggagcagctccatcagctctacagtgacagcttcccaatggagctgcggcagtttctggccccttggattgagagtcaagattgggcatatgcggccagcaaagaatcacatgccactttggtgtttcataatctcctgggagagattgaccagcagtatagccgcttcctgcaagagtcgaatgttctctatcagcacaatctacgaagaatcaagcagtttcttcagagcaggtatcttgagaagccaatggagattgcccggattgtggcccggtgcctgtgggaagaatcacgccttctacagactgcagccactgcggcccagcaagggggccaggccaaccaccccacagcagccgtggtgacggagaagcagcagatgctggagcagcaccttcaggatgtccggaagagagtgcaggatctagaacagaaaatgaaagtggtagagaatctccaggatgactttgatttcaactataaaaccctcaagagtcaaggagacatgcaagatctgaatggaaacaaccagtcagtgaccaggcagaagatgcagcagctggaacagatgctcactgcgctggaccagatgcggagaagcatcgtgagtgagctggcggggcttttgtcagcgatggagtacgtgcagaaaactctcacggacgaggagctggctgactggaagaggcggcaacagattgcctgcattggaggcccgcccaacatctgcctagatcggctagaaaactggataacgtcattagcagaatctcaacttcagacccgtcaacaaattaagaaactggaggagttgcagcaaaaagtttcctacaaaggggaccccattgtacagcaccggccgatgctggaggagagaatcgtggagctgtttagaaacttaatgaaaagtgcctttgtggtggagcggcagccctgcatgcccatgcatcctgaccggcccctcgtcatcaagaccggcgtccagttcactactaaagtcaggttgctggtcaaattccctgagttgaattatcagcttaaaattaaagtgtgcattgacaaagactctggggacgttgcagctctcagaggatcccggaaatttaacattctgggcacaaacacaaaagtgatgaacatggaagaatccaacaacggcagcctctctgcagaattcaaacacttgaccctgagggagcagagatgtgggaatgggggccgagccaattgtgatgcttccctgattgtgactgaggagctgcacctgatcacctttgagaccgaggtgtatcaccaaggcctcaagattgacctagagacccactccttgccagttgtggtgatctccaacatctgtcagatgccaaatgcctgggcgtccatcctgtggtacaacatgctgaccaacaatcccaagaatgtaaacttttttaccaagcccccaattggaacctgggatcaagtggccgaggtcctgagctggcagttctcctccaccaccaagcgaggactgagcatcgagcagctgactacactggcagagaaactcttgggacctggtgtgaattattcagggtgtcagatcacatgggctaaattttgcaaagaaaacatggctggcaagggcttctccttctgggtctggctggacaatatcattgaccttgtgaaaaagtacatcctggccctttggaacgaagggtacatcatgggctttatcagtaaggagcgggagcgggccatcttgagcactaagcctccaggcaccttcctgctaagattcagtgaaagcagcaaagaaggaggcgtcactttcacttgggtggagaaggacatcagcggtaagacccagatccagtccgtggaaccatacacaaagcagcagctgaacaacatgtcatttgctgaaatcatcatgggctataagatcatggatgctaccaatatcctggtgtctccactggtctatctctatcctgacattcccaaggaggaggcattcggaaagtattgtcggccagagagccaggagcatcctgaagctgacccaggcgctgccccatacctgaagaccaagtttatctgtgtgacaccaacgacctgcagcaataccattgacctgccgatgtccccccgcactttagattcattgatgcagtttggaaataatggtgaaggtgctgaaccctcagcaggagggcagtttgagtccctcacctttgacatggagttgacctcggagtgcgctacctcccccatgtgaggagctgagaacggaagctgcagaaagatacgactgaggcgcctacctgcattctgccacccctcacacagccaaaccccagatcatctgaaactactaactttgtggttccagattttttttaatctcctacttctgctatctttgagcaatctgggcacttttaaaaatagagaaatgagtgaatgtgggtgatctgcttttatctaaatgcaaataaggatgtgttctctgagacccatgatcaggggatgtggcggggggtggctagagggagaaaaaggaaatgtcttgtgttgttttgttcccctgccctcctttctcagcagctttttgttattgttgttgttgttcttagacaagtgcctcctggtgcctgcggcatccttctgcctgtttctgtaagcaaatgccacaggccacctatagctacatactcctggcattgcactttttaaccttgctgacatccaaatagaagataggactatctaagccctaggtttctttttaaattaagaaataataacaattaaagggcaaaaaacactgtatcagcatagcctttctgtatttaagaaacttaagcagccgggcatggtggctcacgcctgtaatcccagcactttgggaggccgaggcggatcataaggtcaggagatcaagaccatcctggctaacacggtgaaaccccgtctctactaaaagtacaaaaaattagctgggtgtggtggtgggcgcctgtagtcccagctactcgggaggctgaggcaggagaatcgcttgaacctgagaggcggaggttgcagtgagccaaaattgcaccactgcacactgcactccatcctgggcgacagtctgagactctgtctcaaaaaaaaaaaaaaaaaaaagaaacttcagttaacagcctccttggtgctttaagcattcagcttccttcaggctggtaatttatataatccctgaaacgggcttcaggtcaaacccttaagacatctgaagctgcaacctggcctttggtgttgaaataggaaggtttaaggagaatctaagcattttagacttttttttataaatagacttattttcctttgtaatgtattggccttttagtgagtaaggctgggcagagggtgcttacaaccttgactccctttctccctggacttgatctgctgtttcagaggctaggttgtttctgtgggtgccttatcagggctgggatacttctgattctggcttccttcctgccccaccctcccgaccccagtccccctgatcctgctagaggcatgtctccttgcgtgtctaaaggtccctcatcctgtttgttttaggaatcctggtctcaggacctcatggaagaagagggggagagagttacaggttggacatgatgcacactatggggccccagcgacgtgtctggttgagctcagggaatatggttcttagccagtttcttggtgatatccagtggcacttgtaatggcgtcttcattcagttcatgcagggcaaaggcttactgataaacttgagtctgccctcgtatgagggtgtatacctggcctccctctgaggctggtgactcctccctgctggggccccacaggtgaggcagaacagctagagggcctccccgcctgcccgccttggctggctagctcgcctctcctgtgcgtatgggaacacctagcacgtgctggatgggctgcctctgactcagaggcatggccggatttggcaactcaaaaccaccttgcctcagctgatcagagtttctgtggaattctgtttgttaaatcaaattagctggtctctgaattaagggggagacgaccttctctaagatgaacagggttcgccccagtcctcctgcctggagacagttgatgtgtcatgcagagctcttacttctccagcaacactcttcagtacataataagcttaactgataaacagaatatttagaaaggtgagacttgggcttaccattgggtttaaatcatagggacctagggcgagggttcagggcttctctggagcagatattgtcaagttcatggccttaggtagcatgtatctggtcttaactctgattgtagcaaaagttctgagaggagctgagccctgttgtggcccattaaagaacagggtcctcaggccctgcccgcttcctgtccactgccccctccccatccccagcccagccgagggaatcccgtgggttgcttacctacctataaggtggtttataagctgctgtcctggccactgcattcaaattccaatgtgtacttcatagtgtaaaaatttatattattgtgaggttttttgtcttttttttttttttttttttttggtatattgctgtatctactttaacttccagaaataaacgttatataggaaccgtaaaaa

SEQ ID NO: 135644 - DNA, 2310 bp, Artificial Sequence
  derived and/or modified sequence
atggcccagtggaaccagctgcagcagctggacaccagatacctggagcagctgcaccagctgtacagcgacagcttccccatggagctgagacagttcctggccccctggatcgagagccaggactgggcctacgccgccagcaaggagagccacgccaccctggtgttccacaacctgctgggcgagatcgaccagcagtacagcagattcctgcaggagagcaacgtgctgtaccagcacaacctgagaagaatcaagcagttcctgcagagcagatacctggagaagcccatggagatcgccagaatcgtggccagatgcctgtgggaggagagcagactgctgcagaccgccgccaccgccgcccagcagggcggccaggccaaccaccccaccgccgccgtggtgaccgagaagcagcagatgctggagcagcacctgcaggacgtgagaaagagagtgcaggacctggagcagaagatgaaggtggtggagaacctgcaggacgacttcgacttcaactacaagaccctgaagagccagggcgacatgcaggacctgaacggcaacaaccagagcgtgaccagacagaagatgcagcagctggagcagatgctgaccgccctggaccagatgagaagaagcatcgtgagcgagctggccggcctgctgagcgccatggagtacgtgcagaagaccctgaccgacgaggagctggccgactggaagagaagacagcagatcgcctgcatcggcggcccccccaacatctgcctggacagactggagaactggatcaccagcctggccgagagccagctgcagaccagacagcagatcaagaagctggaggagctgcagcagaaggtgagctacaagggcgaccccatcgtgcagcacagacccatgctggaggagagaatcgtggagctgttcagaaacctgatgaagagcgccttcgtggtggagagacagccctgcatgcccatgcaccccgacagacccctggtgatcaagaccggcgtgcagttcaccaccaaggtgagactgctggtgaagttccccgagctgaactaccagctgaagatcaaggtgtgcatcgacaaggacagcggcgacgtggccgccctgagaggcagcagaaagttcaacatcctgggcaccaacaccaaggtgatgaacatggaggagagcaacaacggcagcctgagcgccgagttcaagcacctgaccctgagagagcagagatgcggcaacggcggcagagccaactgcgacgccagcctgatcgtgaccgaggagctgcacctgatcaccttcgagaccgaggtgtaccaccagggcctgaagatcgacctggagacccacagcctgcccgtggtggtgatcagcaacatctgccagatgcccaacgcctgggccagcatcctgtggtacaacatgctgaccaacaaccccaagaacgtgaacttcttcaccaagccccccatcggcacctgggaccaggtggccgaggtgctgagctggcagttcagcagcaccaccaagagaggcctgagcatcgagcagctgaccaccctggccgagaagctgctgggccccggcgtgaactacagcggctgccagatcacctgggccaagttctgcaaggagaacatggccggcaagggcttcagcttctgggtgtggctggacaacatcatcgacctggtgaagaagtacatcctggccctgtggaacgagggctacatcatgggcttcatcagcaaggagagagagagagccatcctgagcaccaagccccccggcaccttcctgctgagattcagcgagagcagcaaggagggcggcgtgaccttcacctgggtggagaaggacatcagcggcaagacccagatccagagcgtggagccctacaccaagcagcagctgaacaacatgagcttcgccgagatcatcatgggctacaagatcatggacgccaccaacatcctggtgagccccctggtgtacctgtaccccgacatccccaaggaggaggccttcggcaagtactgcagacccgagagccaggagcaccccgaggccgaccccggcgccgccccctacctgaagaccaagttcatctgcgtgacccccaccacctgcagcaacaccatcgacctgcccatgagccccagaaccctggacagcctgatgcagttcggcaacaacggcgagggcgccgagcccagcgccggcggccagttcgagagcctgaccttcgacatggagctgaccagcgagtgcgccaccagccccatgtag

SEQ ID NO: 135645 - DNA, 2310 bp, Artificial Sequence
  derived and/or modified sequence
atggcacagtggaaccagctccagcagttggatacacggtatctggaacagctccatcagctctactccgactctttccctatggaactaagacagttcttggcaccttggatcgagagccaagactgggcctacgctgccagtaaggaatcccatgctacgctggttttccataatttactgggcgagatagaccaacagtacagccgatttttacaggagtccaacgtgctgtatcagcacaatctgcgccggatcaagcaatttctgcagtcacgatatctggagaagccaatggagattgctcgcatagtggcaaggtgcctgtgggaggaaagcaggttgttgcagaccgccgccaccgcagcgcaacagggcggccaggccaaccaccccacagctgcggtggttacggagaaacagcagatgctagagcagcaccttcaggacgttcgcaaacgagtgcaggacttggaacaaaaaatgaaggtcgtggagaacctgcaagatgacttcgatttcaactataagactctgaaaagccagggggacatgcaggacttaaatgggaacaaccagagtgtaactcggcaaaagatgcagcagttggagcagatgttgacagctctcgaccagatgagacggtcgattgtgagcgagctcgcaggactgttgagcgcaatggagtatgtacagaagactctgaccgatgaggagctggctgattggaagcgtagacagcagatcgcatgtatcggcggtcccccgaatatctgcctcgaccggctagagaactggattacatcacttgctgagtcacaacttcagactagacagcagataaagaaactggaggaactgcagcagaaagtgagttacaaaggcgatcccatcgttcagcacagaccaatgctcgaagaaaggattgtcgaactatttcggaacctcatgaaatccgcattcgtggtggagaggcagccatgtatgccaatgcacccggatcgtcccctggtgattaaaacaggcgttcagtttactacaaaggtgcggctcttggtgaagtttcccgagctgaattatcagcttaagataaaagtgtgcatagataaggattccggtgatgtggctgctctacgcggcagtagaaagtttaacatcctgggtacaaacaccaaagtcatgaacatggaggaaagtaacaacggctctttgtcagctgaatttaagcacctgacattgagagagcaaagatgtggtaatgggggacgcgcaaattgtgatgcgtcattgatcgtgactgaggaactgcacctgattacatttgagaccgaggtgtatcaccagggccttaagattgacttggaaacccacagtctccctgtggtggtgatcagcaatatctgccagatgccgaatgcctgggccagtatcttatggtacaacatgcttactaacaatcctaagaatgtgaattttttcactaagccacctatcggaacctgggatcaagtagccgaagtcctgtcttggcagttcagcagcaccaccaagcgtggcttgtcaatagaacaactaactacactagctgagaaactcctgggcccgggggttaattactccggatgccagatcacttgggcaaagttctgtaaagagaacatggcaggtaaggggttctccttctgggtgtggttggacaacataatcgaccttgttaagaaatatatcctggccctctggaatgagggctatattatgggtttcataagtaaggagcgggaaagggcaatcctctctaccaagccacccggtacattcctgctccggttcagcgagagctccaaagaagggggagtgacattcacctgggtggagaaggacattagtgggaagacgcaaattcagagtgtggagccctacactaaacagcaactgaacaacatgtcctttgcggaaattattatgggttataagattatggatgccaccaacatcttggtgagccctctcgtgtacttgtaccccgatattcctaaggaggaagcatttgggaagtactgtcgtcctgagtctcaagaacaccctgaggctgaccccggggccgccccttacctaaagacaaaattcatctgtgtgacacccactacatgttctaataccatcgacctgccaatgtccccgcgaacactcgactccctgatgcaatttggaaacaatggtgaaggtgctgagccaagtgctggtgggcaattcgaatcgttaactttcgacatggagctaacaagcgagtgtgcaacgagccccatgtag

SEQ ID NO: 135646 - DNA, 2310 bp, Artificial Sequence
  derived and/or modified sequence
atggcccagtggaaccagctgcagcagctggacacccgctacctggagcagctgcaccagctgtacagcgacagcttccccatggagctgcggcagttcctggccccctggattgagagccaggactgggcctatgctgccagcaaggagagccacgccaccctggtgttccacaacctgctgggggagattgaccagcagtacagccgcttcctgcaggagagcaatgtgctgtaccagcacaacctgcggcgcatcaagcagttcctgcagagccgctacctggagaagcccatggagatcgcccgcatcgtggcccgctgcctgtgggaggagagccggctgctgcagacagctgccacagctgcccagcagggcggccaggccaaccaccccacagctgctgtggtgacagagaagcagcagatgctggagcagcacctgcaggatgtgaggaagagggtgcaggacctggagcagaagatgaaggtggtggagaacctgcaggatgactttgacttcaactacaagaccctgaagagccagggcgacatgcaggacctgaatggaaacaaccagagcgtgacccggcagaagatgcagcagctggagcagatgctgacagccctggaccagatgaggaggagcatcgtgtctgagctggccggcctgctgagcgccatggagtatgtgcagaagaccctgacagatgaggagctggccgactggaagaggcggcagcagatcgcctgcatcggcggcccccccaacatctgcctggaccggctggagaactggatcaccagcctggccgagagccagctgcagacccggcagcagatcaagaagctggaggagctgcagcagaaggtgtcctacaagggggaccccatcgtgcagcaccggcccatgctggaggagagaattgtggagctgttcaggaacctgatgaagagcgcctttgtggtggagcggcagccctgcatgcccatgcacccagaccggcccctggtgatcaagacaggagtgcagttcaccaccaaggtgcggctgctggtgaagtttcctgagctgaactaccagctgaagatcaaggtgtgcatcgacaaggacagcggagatgtggccgccctgcggggcagcaggaagttcaacatcctgggcaccaacaccaaggtgatgaacatggaggagagcaacaacggcagcctgtctgctgagttcaagcacctgaccctgcgggagcagagatgtggaaatggaggccgggccaactgtgatgccagcctgattgtgacagaggagctgcacctgatcacctttgaaacagaggtgtaccaccagggcctgaagattgacctggagacccacagcctgcctgtggtggtgatcagcaacatctgccagatgcccaatgcctgggccagcatcctgtggtacaacatgctgaccaacaaccccaagaatgtgaacttcttcaccaagccacccatcggcacctgggaccaggtggccgaggtgctgtcctggcagttcagcagcaccaccaagaggggcctgagcattgagcagctgaccaccctggccgagaagctgctgggccctggggtgaactacagcggctgccagatcacctgggccaagttctgcaaggagaacatggccggcaagggcttctccttctgggtgtggctggacaacatcatcgacctggtgaagaagtacatcctggccctgtggaatgaaggctacatcatgggcttcatcagcaaggagcgggagcgggccatcctgagcaccaagcccccaggcaccttcctgctgcgcttcagcgagagcagcaaggagggcggcgtgaccttcacctgggtggagaaggacatcagcggcaagacccagatccagagcgtggagccctacaccaagcagcagctgaacaacatgagctttgctgagatcatcatgggctacaagatcatggatgccaccaacatcctggtgagccccctggtgtacctgtacccagacatccccaaggaggaggccttcggcaagtactgcaggcctgagagccaggagcaccctgaggccgaccctggagctgccccctacctgaagaccaagttcatctgtgtgacccccaccacctgcagcaacaccatcgacctgcccatgagccccaggaccctggacagcctgatgcagtttggaaataatggagagggcgctgagcccagcgctgggggccagtttgagagcctgacctttgacatggagctgaccagtgaatgtgccaccagccccatgtag

SEQ ID NO: 135647 - DNA, 2310 bp, Artificial Sequence
  derived and/or modified sequence
atggcccagtggaaccagctgcagcagctggacacccggtacctggagcagctgcatcagctgtacagtgacagcttccctatggaactgaggcagttcctagccccctggatcgagagccaagattgggcttacgccgcttctaaagagagccatgccacgttggtgtttcataaccttctgggcgagatcgaccaacagtatagccgttttctccaggaaagcaatgttctctaccagcataacctccggaggataaagcagtttctccagtcacgttacctggaaaagccaatggagatcgcccggatcgttgcacgctgcctgtgggaagaatcaagactgctgcaaaccgccgcaacagccgcccagcagggagggcaggccaatcatccgaccgctgctgtcgtcacggagaagcaacagatgctagagcagcacttgcaggatgtgcgcaagagagttcaggacctggagcaaaagatgaaagtggtcgaaaacctgcaggatgactttgacttcaattataagactctcaagagccaaggtgatatgcaagatttgaatggtaataaccagtccgtaactcgccagaaaatgcaacaactggaacagatgcttacagcactcgaccaaatgagacggagtattgtgtctgagcttgccggattgctttctgcaatggagtatgtgcagaagacactgacggatgaggagctcgcagattggaaaaggaggcaacaaatcgcttgcattggtggcccacccaatatctgtctcgaccgcttagaaaattggattaccagcttagccgagtcccagttacagaccagacaacagatcaagaaactggaagaattacagcagaaggtgtcctacaagggggatccaatcgttcaacaccgtcctatgctggaggaaagaatcgttgagttgtttagaaacctgatgaagagcgctttcgttgtggaaaggcagccatgcatgcccatgcacccagaccgacctctcgtgatcaagaccggcgttcagtttacgactaaagttagactgctagttaaattccctgagttaaactaccagcttaaaataaaagtgtgtatagacaaggattctggcgacgtggcagctctgcgtgggagccggaagtttaatattctaggcaccaacactaaagtcatgaatatggaggaaagcaacaacgggtctctgtccgcagaatttaaacatctcacattacgcgagcagagatgcggcaacggcggacgggcgaactgtgacgcgagtctcatcgtgacagaggagttacacttaatcacatttgaaacagaggtctatcatcaagggctaaaaatcgatctagagacccattcgctgcccgttgtggtgatctccaatatttgtcagatgccaaatgcttgggcgagtatcctgtggtacaacatgctcaccaacaacccaaaaaacgtgaactttttcacaaagcccccaataggcacttgggatcaggtggcagaagtcctgtcgtggcagttttccagcacaaccaaaaggggactgagcatcgagcagctcacgacattggcagaaaagctactgggtcccggtgtcaactacagcggctgtcagattacatgggccaaattttgtaaggagaacatggcaggcaagggtttcagtttctgggtttggctggataatatcatagatctcgtaaaaaagtatatactcgcgctgtggaacgaaggatacataatgggatttattagtaaagagcgagagcgggccattctctcgaccaaacctccaggcacctttctcttacggttctccgagtcttctaaagaaggcggagtcacctttacctgggtggagaaggacatctctggcaagacgcagattcaaagtgtggagccttacacaaagcagcagctcaacaatatgagttttgcggaaatcattatgggctataagataatggacgctaccaatattctggttagcccacttgtgtatttataccccgacatcccaaaggaggaggctttcggaaaatattgtcgaccagaaagtcaggaacatccagaggccgatcccggcgctgccccttaccttaaaaccaagttcatttgtgtaacacccacgacgtgctcgaacacaattgacttgccgatgtcccctagaaccctagacagtttaatgcagttcggcaacaacggggaaggagcagaacccagcgcaggagggcagtttgaatctctaacatttgatatggagctcactagcgaatgtgcgacttcaccaatgtag

SEQ ID NO: 135648 - DNA, 2310 bp, Artificial Sequence
  derived and/or modified sequence
atggcacaatggaaccagctgcagcagctagatactaggtacctcgagcagctccatcagctgtattccgattcctttcccatggagttaaggcagttcctggccccttggatcgagagtcaagattgggcatacgcagccagcaaagaatctcacgccacactcgtgttccataacctcctgggtgaaatcgaccagcaatacagccggtttcttcaagaaagcaatgttctgtaccagcacaaccttcgacgcatcaagcagtttctgcagtctagatatctggagaaaccgatggaaatcgctaggattgtggccaggtgcctgtgggaggagagtcggcttctacaaacggccgcaactgccgcacagcaggggggacaggccaatcatccaacagccgcagtagtgacggaaaaacagcagatgttggaacagcatctgcaggacgtccgaaaacgcgttcaggaccttgagcaaaagatgaaggtcgtagaaaacctgcaggacgattttgattttaactataaaacactcaaaagccagggggatatgcaggatctgaatggtaacaaccagtctgtaactcggcagaaaatgcagcagcttgaacaaatgctcactgccttggaccagatgcgcagatccatcgttagtgaactcgctggcctgttgtcagctatggaatacgtgcagaagactctgacagacgaagagctggctgattggaagaggcgccagcaaattgcgtgtatcgggggaccccctaatatctgccttgataggctggagaattggatcacttcactagccgaaagtcaactgcaaaccagacaacagattaagaaactggaagagttgcaacagaaagtgtcctacaaaggcgatccgatcgtgcagcatcgacccatgctcgaggaacggattgtagaactgttccgcaacctaatgaagtccgccttcgtggttgagcgacagccttgtatgccgatgcaccctgacagaccattagtgatcaagacaggagtgcagtttaccactaaagtgcggttattggttaaatttcctgagctgaattaccaacttaagattaaggtctgtattgataaggatagtggtgatgttgccgctctcagggggtccagaaaattcaacatcctcggaactaataccaaggtcatgaatatggaggagagcaataacggcagcctttctgcagaattcaagcacttaacactgcgtgagcagagatgtggaaatggcggacgggcaaactgtgacgcctccctcatagtgaccgaggagttgcatctgatcactttcgagactgaggtgtatcatcaaggactgaagatcgatctcgaaactcatagcctgcccgtcgtcgtcatatccaacatttgccagatgcctaacgcttgggctagcattctctggtacaacatgctcacaaataatccgaaaaacgtgaacttctttaccaagccacccatcggcacgtgggaccaggtggctgaagtactctcgtggcagttcagctctactactaaacggggactgagcatcgaacaacttactactttagccgagaagctgttgggccctggagtgaattacagcggatgccagattacttgggccaaattttgtaaggagaacatggccggaaagggcttttctttttgggtctggctggataatatcatcgatctagttaaaaagtacatacttgctctgtggaatgaaggttatatcatgggctttatcagcaaggaaagggaaagagcaatcctgtcgaccaagccaccaggcacctttttactgcgcttctcggagtcttcgaaagaaggaggcgttacattcacttgggtggaaaaagacataagcggtaaaacgcagatccaatcggtggaaccctacacaaagcaacagttaaataatatgtcctttgccgaaatcatcatgggttacaaaataatggacgccactaatattctcgtgtctccactggtgtatctctacccagacatccccaaagaagaagcattcggcaagtactgcaggccggaatctcaagaacaccccgaggccgatcccggagccgcaccatacctcaagactaaattcatatgcgtcacaccaacaacatgttcaaatacgatcgatctgcctatgagccctcggactctggattcactaatgcagtttggtaacaatggcgaaggggctgaacccagcgcgggtggtcagttcgagtcactgacattcgatatggaacttaccagcgaatgtgccacatcccctatgtag

SEQ ID NO: 135649 - DNA, 2633 bp, Artificial Sequence
  derived and/or modified sequence
ggatcctggacaggcaccccggcttggcgctgtctctccccctcggctcggagaggcccttcggcctgagggagcctcgccgcccgtccccggcacacgcgcagccccggcctctcggcctctgccggagaaacaggatggcccaatggaatcagctacagcagcttgacacacggtacctggagcagctccatcagctctacagtgacagcttcccaatggagctgcggcagtttctggccccttggattgagagtcaagattgggcatatgcggccagcaaagaatcacatgccactttggtgtttcataatctcctgggagagattgaccagcagtatagccgcttcctgcaagagtcgaatgttctctatcagcacaatctacgaagaatcaagcagtttcttcagagcaggtatcttgagaagccaatggagattgcccggattgtggcccggtgcctgtgggaagaatcacgccttctacagactgcagccactgcggcccagcaagggggccaggccaaccaccccacagcagccgtggtgacggagaagcagcagatgctggagcagcaccttcaggatgtccggaagagagtgcaggatctagaacagaaaatgaaagtggtagagaatctccaggatgactttgatttcaactataaaaccctcaagagtcaaggagacatgcaagatctgaatggaaacaaccagtcagtgaccaggcagaagatgcagcagctggaacagatgctcactgcgctggaccagatgcggagaagcatcgtgagtgagctggcggggcttttgtcagcgatggagtacgtgcagaaaactctcacggacgaggagctggctgactggaagaggcggcaacagattgcctgcattggaggcccgcccaacatctgcctagatcggctagaaaactggataacgtcattagcagaatctcaacttcagacccgtcaacaaattaagaaactggaggagttgcagcaaaaagtttcctacaaaggggaccccattgtacagcaccggccgatgctggaggagagaatcgtggagctgtttagaaacttaatgaaaagtgcctttgtggtggagcggcagccctgcatgcccatgcatcctgaccggcccctcgtcatcaagaccggcgtccagttcactactaaagtcaggttgctggtcaaattccctgagttgaattatcagcttaaaattaaagtgtgcattgacaaagactctggggacgttgcagctctcagaggatcccggaaatttaacattctgggcacaaacacaaaagtgatgaacatggaagaatccaacaacggcagcctctctgcagaattcaaacacttgaccctgagggagcagagatgtgggaatgggggccgagccaattgtgatgcttccctgattgtgactgaggagctgcacctgatcacctttgagaccgaggtgtatcaccaaggcctcaagattgacctagagacccactccttgccagttgtggtgatctccaacatctgtcagatgccaaatgcctgggcgtccatcctgtggtacaacatgctgaccaacaatcccaagaatgtaaacttttttaccaagcccccaattggaacctgggatcaagtggccgaggtcctgagctggcagttctcctccaccaccaagcgaggactgagcatcgagcagctgactacactggcagagaaactcttgggacctggtgtgaattattcagggtgtcagatcacatgggctaaattttgcaaagaaaacatggctggcaagggcttctccttctgggtctggctggacaatatcattgaccttgtgaaaaagtacatcctggccctttggaacgaagggtacatcatgggctttatcagtaaggagcgggagcgggccatcttgagcactaagcctccaggcaccttcctgctaagattcagtgaaagcagcaaagaaggaggcgtcactttcacttgggtggagaaggacatcagcggtaagacccagatccagtccgtggaaccatacacaaagcagcagctgaacaacatgtcatttgctgaaatcatcatgggctataagatcatggatgctaccaatatcctggtgtctccactggtctatctctatcctgacattcccaaggaggaggcattcggaaagtattgtcggccagagagccaggagcatcctgaagctgacccaggcgctgccccatacctgaagaccaagtttatctgtgtgacaccaacgacctgcagcaataccattgacctgccgatgtccccccgcactttagattcattgatgcagtttggaaataatggtgaaggtgctgaaccctcagcaggagggcagtttgagtccctcacctttgacatggagttgacctcggagtgcgctacctcccccatgtgaggagctgagaacggaagctgcagaaagatacgactgaggcgcctacctgcattctgccacccctcacacagccaaaccccagatcatctgaaactactaactttgtggttccagattttttttaatctcctacttctgctatctttgagcaatctgggcacttttaaaaatagagaaatgagtgaa

SEQ ID NO: 135650 - protein, 748 aa, Artificial Sequence
  derived and/or modified sequence
MSQWNQVQQLEIKFLEQVDQFYDDNFPMEIRHLLAQWIENQDWEAASNNETMATILLQNLLIQLDEQLGRVSKEKNLLLIHNLKRIRKVLQGKFHGNPMHVAVVISNCLREERRILAAANMPVQGPLEKSLQSSSVSERQRNVEHKVAAIKNSVQMTEQDTKYLEDLQDEFDYRYKTIQTMDQSDKNSAMVNQEVLTLQEMLNSLDFKRKEALSKMTQIIHETDLLMNTMLIEELQDWKRRQQIACIGGPLHNGLDQLQNCFTLLAESLFQLRRQLEKLEEQSTKMTYEGDPIPMQRTHMLERVTFLIYNLFKNSFVVERQPCMPTHPQRPLVLKTLIQFTVKLRLLIKLPELNYQVKVKASIDKNVSTLSNRRFVLCGTNVKAMSIEESSNGSLSVEFRHLQPKEMKSSAGGKGNEGCHMVTEELHSITFETQICLYGLTIDLETSSLPVVMISNVSQLPNAWASIIWYNVSTNDSQNLVFFNNPPPATLSQLLEVMSWQFSSYVGRGLNSDQLHMLAEKLTVQSSYSDGHLTWAKFCKEHLPGKSFTFWTWLEAILDLIKKHILPLWIDGYVMGFVSKEKERLLLKDKMPGTFLLRFSESHLGGITFTWVDHSESGEVRFHSVEPYNKGRLSALPFADILRDYKVIMAENIPENPLKYLYPDIPKDKAFGKHYSSQPCEVSRPTERGDKGYVPSVFIPISTIRSDSTEPHSPSDLLPMSPSVYAVLRENLSPTTIETAMKSPYSAE

SEQ ID NO: 135651 - protein, 117 aa, Artificial Sequence
  derived and/or modified sequence
MSQWNQVQQLEIKFLEQVDQFYDDNFPMEIRHLLAQWIENQDWEAASNNETMATILLQNLLIQLDEQLGRVSKEKNLLLIHNLKRIRKVLQSPGLATAQLPLDRHGETCIQRSKSCP

SEQ ID NO: 135652 - protein, 25 aa, Artificial Sequence
  derived and/or modified sequence
MSQWNQVQQLEIKFLEQVDQFYDDN

SEQ ID NO: 135653 - protein, 79 aa, Artificial Sequence
  derived and/or modified sequence
MSQWNQVQQLEIKFLEQVDQFYDDNFPMEIRHLLAQWIENQDWEAASNNETMATILLQNLLIQLDEQLGRVSKEKNLLL

SEQ ID NO: 135654 - DNA, 2761 bp, Artificial Sequence
  derived and/or modified sequence
agaggacgcccggtgaaggggctccagcctggcagtttctgcgtgttagcatttctagaatagagtgggtgggaactgacccaagtaaagtcccagagactcgaacactgacgcacaggaaagcctcaagtgggaggagaaatgcaaatcccctactgatgatggcgtcagcggctttctcctagggactgtgaggggcgcttctgactttggacttgagcactgcctgggacctgtgctgagagagcgctagcatgtctcagtggaatcaagtccaacagttagaaatcaagtttttggagcaggtggatcaattctatgatgacaactttcccatggaaattcggcatctgttggcccaatggattgaaaatcaagactgggaggcagcttctaacaatgaaaccatggcaacgattcttcttcaaaacttgttaatacaactggatgaacagttaggtcgtgtttccaaagagaaaaacctactcttgatacacaatctaaaaagaattaggaaggtccttcagggaaaatttcatggaaatccaatgcatgtagctgtggttatttcaaactgtttaagggaagagaggagaatattggctgcagccaacatgcctgtccaggggcctctagagaaatccttacaaagttcttcagtttcagaaagacagaggaatgtggagcacaaagtggctgccattaaaaacagtgtgcagatgacagaacaagataccaaatacttagaagatctgcaagacgaatttgactacaggtataaaacaattcagacaatggatcagagtgacaagaatagtgccatggtgaatcaggaagttttgacactgcaggaaatgcttaacagcctcgatttcaagagaaaggaggctctcagtaaaatgacccaaatcatccatgagacagacctgttaatgaacaccatgctcatagaagagctgcaagactggaagcggcggcagcaaatcgcctgcatcgggggtccactccacaatgggctcgaccagcttcagaactgctttacactattggcagaaagtcttttccaactgagaaggcaattggagaaactagaggagcaatctaccaaaatgacatatgaaggtgatcccattccaatgcaaagaactcacatgctagaaagagtcaccttcttgatctacaaccttttcaagaactcatttgtggttgagcgacagccatgtatgccaacccaccctcagaggccgttggtacttaaaaccctaattcagttcactgtaaaactaaggctactaataaaattgccagaactaaactatcaggtaaaggttaaggcatcaattgacaagaatgtttcaactctaagcaaccgaagatttgtactttgtggaactaatgtcaaagccatgtctattgaagaatcttccaatgggagtctctcagtagaatttcgacatttgcaaccaaaggaaatgaagtccagtgctggaggtaaaggaaatgagggctgtcacatggtgactgaagaacttcattccataacgtttgaaacacagatctgcctctatggcctgaccatagatttggagaccagctcattgcctgtggtgatgatttccaatgtcagtcagttacctaatgcttgggcatccatcatttggtacaacgtgtcaaccaacgattcccagaacttggttttctttaataatcctccacctgccacattgagtcaactactggaggtgatgagctggcagttttcatcgtacgttggtcgtggtcttaactcagatcaactccatatgctggcagagaagcttacagtccaatctagctacagtgatggtcacctcacctgggccaagttctgcaaggaacatttacctggtaaatcatttaccttttggacatggcttgaagcaatattggatctaattaagaaacacattcttcccctttggattgatgggtatgtcatgggctttgttagcaaagagaaggaacggctgttgctaaaggataaaatgcctggcacctttttattaagattcagtgaaagccatctcggaggaataactttcacctgggtggaccattctgaaagtggggaagtgagattccactctgtagaaccctacaataaaggccggttgtctgctctgccattcgctgacatcctgcgagactacaaagttattatggctgaaaacattcctgaaaaccctctgaagtacctatatcctgacattcccaaagacaaagccttcggtaaacactacagctctcagccttgcgaagtttcaagaccaacagaaaggggtgacaaaggttatgttccttctgtttttatccccatctcaacaatccgaagtgattcaacagagccacattctccatcagaccttcttcccatgtctccaagtgtgtatgcggtgttgagagaaaacctgagtcccacaacaattgaaactgcaatgaagtctccttattctgctgaatgacaggataaactctgacgcaccaagaaaggaagcaaatgaaaaagtttaaagactgttctttgcccaataaccacattttatttcttcagctttgtaaataccaggttctaggaaatgtttgacatctgaagctctcttcacactcccgtggcactcctcaattgggagtgttgtgactgaaatgcttgaaaccaaagcttcagataaacttgcaagataagacaactttaagaaaccagtgttaataacaatattaacag

SEQ ID NO: 135655 - DNA, 2247 bp, Artificial Sequence
  derived and/or modified sequence
atgagccagtggaaccaggtgcagcagctggagatcaagttcctggagcaggtggaccagttctacgacgacaacttccccatggagatcagacacctgctggcccagtggatcgagaaccaggactgggaggccgccagcaacaacgagaccatggccaccatcctgctgcagaacctgctgatccagctggacgagcagctgggcagagtgagcaaggagaagaacctgctgctgatccacaacctgaagagaatcagaaaggtgctgcagggcaagttccacggcaaccccatgcacgtggccgtggtgatcagcaactgcctgagagaggagagaagaatcctggccgccgccaacatgcccgtgcagggccccctggagaagagcctgcagagcagcagcgtgagcgagagacagagaaacgtggagcacaaggtggccgccatcaagaacagcgtgcagatgaccgagcaggacaccaagtacctggaggacctgcaggacgagttcgactacagatacaagaccatccagaccatggaccagagcgacaagaacagcgccatggtgaaccaggaggtgctgaccctgcaggagatgctgaacagcctggacttcaagagaaaggaggccctgagcaagatgacccagatcatccacgagaccgacctgctgatgaacaccatgctgatcgaggagctgcaggactggaagagaagacagcagatcgcctgcatcggcggccccctgcacaacggcctggaccagctgcagaactgcttcaccctgctggccgagagcctgttccagctgagaagacagctggagaagctggaggagcagagcaccaagatgacctacgagggcgaccccatccccatgcagagaacccacatgctggagagagtgaccttcctgatctacaacctgttcaagaacagcttcgtggtggagagacagccctgcatgcccacccacccccagagacccctggtgctgaagaccctgatccagttcaccgtgaagctgagactgctgatcaagctgcccgagctgaactaccaggtgaaggtgaaggccagcatcgacaagaacgtgagcaccctgagcaacagaagattcgtgctgtgcggcaccaacgtgaaggccatgagcatcgaggagagcagcaacggcagcctgagcgtggagttcagacacctgcagcccaaggagatgaagagcagcgccggcggcaagggcaacgagggctgccacatggtgaccgaggagctgcacagcatcaccttcgagacccagatctgcctgtacggcctgaccatcgacctggagaccagcagcctgcccgtggtgatgatcagcaacgtgagccagctgcccaacgcctgggccagcatcatctggtacaacgtgagcaccaacgacagccagaacctggtgttcttcaacaaccccccccccgccaccctgagccagctgctggaggtgatgagctggcagttcagcagctacgtgggcagaggcctgaacagcgaccagctgcacatgctggccgagaagctgaccgtgcagagcagctacagcgacggccacctgacctgggccaagttctgcaaggagcacctgcccggcaagagcttcaccttctggacctggctggaggccatcctggacctgatcaagaagcacatcctgcccctgtggatcgacggctacgtgatgggcttcgtgagcaaggagaaggagagactgctgctgaaggacaagatgcccggcaccttcctgctgagattcagcgagagccacctgggcggcatcaccttcacctgggtggaccacagcgagagcggcgaggtgagattccacagcgtggagccctacaacaagggcagactgagcgccctgcccttcgccgacatcctgagagactacaaggtgatcatggccgagaacatccccgagaaccccctgaagtacctgtaccccgacatccccaaggacaaggccttcggcaagcactacagcagccagccctgcgaggtgagcagacccaccgagagaggcgacaagggctacgtgcccagcgtgttcatccccatcagcaccatcagaagcgacagcaccgagccccacagccccagcgacctgctgcccatgagccccagcgtgtacgccgtgctgagagagaacctgagccccaccaccatcgagaccgccatgaagagcccctacagcgccgagtag

SEQ ID NO: 135656 - DNA, 2247 bp, Artificial Sequence
  derived and/or modified sequence
atgtctcagtggaaccaggtgcagcaactggaaatcaaattcttagaacaggtggaccaattttatgatgacaatttccccatggagatccggcaccttctggcacaatggatcgagaaccaggattgggaggcagccagtaacaatgaaaccatggcaaccattctgctgcaaaatctcctgatacaactggacgagcagttgggcagagtctctaaggagaagaacctccttctgatacacaatctgaagagaattaggaaagtgctgcagggcaaatttcacggtaatccaatgcacgtggctgtcgtgatttccaattgccttcgggaggagcgcagaattctggcagcagctaacatgccagtgcaaggtcccctggaaaaatcacttcagtccagttccgtctcagagagacagcggaacgtggagcacaaggtggcagctattaagaattcagttcagatgaccgagcaagacactaaatatctcgaagacctgcaagacgagttcgactaccggtataaaacaatccagaccatggatcagagtgataagaattccgctatggtcaatcaggaagtgctcaccttacaggagatgctcaactccttggattttaaaaggaaagaggctttatctaaaatgacccagattatacacgagacagatttgctcatgaatacgatgttaatcgaagaactgcaggattggaagcgcaggcagcagatcgcctgcatcggagggccccttcataatggcctggatcaactgcaaaactgttttacattactggcggagagcttgtttcaactcagacgacagcttgaaaaactggaagagcagtcgaccaaaatgacttacgaaggtgaccccatcccgatgcagcgcacccatatgcttgaaagggtgacattcctgatctataacctatttaaaaatagttttgtggtggagagacagccctgcatgcctacccaccctcagcggcctctggtcctcaagactcttatacagttcaccgtcaagctaagactgctgatcaagctgcccgaactcaattaccaggtgaaggtcaaggcttcgatagacaaaaacgttagcacactgagcaacagaaggttcgttctttgcgggactaatgtgaaggccatgagtattgaggagtcatccaatggatccctgtcagttgagtttaggcaccttcagccaaaagagatgaagtcatcagcaggcggaaagggaaacgagggatgtcatatggttaccgaggaactccactctatcacgtttgagactcagatctgtctctatgggctgaccatcgaccttgagactagctccctgcccgtcgtgatgattagcaacgtgtcacagttacctaacgcatgggcttcaataatctggtacaacgtgtctacaaacgatagccagaacttggttttcttcaataatccaccccccgccaccctctctcaactcctcgaagtcatgtcttggcaattcagtagttacgtcggccggggcttgaattccgatcagttgcacatgctggctgagaaactgacggtgcagtcttcttactcagatggccacctgacctgggccaaattctgcaaagaacatctgccaggaaaatccttcacattttggacatggttggaggcgatcttggacctgattaagaaacatattctgcccttatggattgatggatacgtgatgggctttgtcagcaaagaaaaggagcggctgcttctcaaagacaagatgccagggacgtttctcttgagattcagtgagtcccacctgggtggcattacgttcacctgggttgatcatagtgagagcggagaggtgcgttttcactccgtcgagccctacaataaaggcaggctttcggcactcccttttgcggacattctaagggattataaggtgatcatggccgagaatattcctgagaacccactaaagtatctctaccctgatattcccaaggataaggcctttggcaaacattacagttcccagccctgcgaggtgagccggccaaccgaaagaggcgacaagggatacgtgccctcagtgttcatccccatcagtacaatccgatccgacagcacggagccccactccccatccgatctgctgccaatgtctcctagcgtgtacgcagtgctacgggaaaacctgagtccaaccactatagaaacagccatgaaaagtccctactcagccgaatag

SEQ ID NO: 135657 - DNA, 2247 bp, Artificial Sequence
  derived and/or modified sequence
atgagtcagtggaaccaggtccagcagttggaaattaaattcctagaacaggtggaccagttttacgacgataacttccccatggaaattagacacttgctggcacagtggatcgaaaaccaagactgggaagccgcaagtaataatgagaccatggctaccatactgttacagaacttgctgatccagctggacgagcaactcggacgcgtcagcaaggagaagaatctgctacttattcacaacctcaaaagaattaggaaggtcctgcagggcaagtttcacggcaaccccatgcatgtggctgtagttattagtaattgcctgcgtgaggagcgacgcatcctggctgctgcaaatatgccagtgcaggggcccttggagaagtctttgcagtccagcagtgtttcagaacgacaacggaatgtcgagcataaagtcgccgcaattaaaaatagcgtgcagatgaccgagcaggacacaaagtatttggaggatcttcaggacgagtttgactaccggtataagaccattcagaccatggaccagagcgataaaaattctgccatggtgaaccaggaggtactgactctccaggagatgttgaactccctggatttcaagcgcaaagaagctctcagcaaaatgacgcagattatccatgagactgacctgctgatgaatacaatgctgatcgaggagcttcaggattggaagaggcgccagcagatcgcctgtatcggagggccgttgcacaatggactggaccagctccagaattgcttcacccttcttgcagagtcactgtttcagcttcgcaggcagctcgagaaactggaggagcaatccactaagatgacctacgagggagacccaattcccatgcagagaacacacatgctcgagcgcgtgaccttcctgatctacaatctgttcaagaattcttttgttgtggagcggcaaccctgcatgcccacccatccacagagacctctcgtccttaagacccttatacaatttactgtcaagctgcgcttgctgatcaaactgcccgaattgaactaccaggtcaaggtgaaggcctcaatcgataagaatgtgtctacactctctaatcgccgcttcgtcttgtgcgggaccaatgttaaagccatgtccattgaagaatcgagcaatggaagcttgtcagtcgaatttcggcacctccagccaaaggaaatgaaaagtagcgccggcggcaaaggaaatgaggggtgtcatatggtcaccgaagaactgcattctattacttttgagactcaaatatgtctctatgggttgacaattgatctagagactagctccttgcccgtcgttatgatttcgaacgtttcgcagttaccaaacgcctgggcttcgatcatttggtacaatgtgtccacaaacgattctcagaacctggttttcttcaataatccaccacctgctactctgtcccagttgcttgaagtgatgagttggcagtttagtagctacgtcggccgtggactgaactccgatcagctgcatatgttggccgagaaactaacagtccagtcatcttactccgacgggcatttaacgtgggctaagttctgcaaagagcatcttcccggaaaatctttcacattctggacctggcttgaggccatactggatctcatcaaaaagcacatactccccctgtggattgacggatacgtgatgggctttgtgtctaaagaaaaggaacggctcctgttaaaagacaaaatgcctggcacatttctgctccgcttcagcgaatcccatcttgggggaattacctttacatgggtggaccacagtgagtcaggcgaggtgcgctttcactctgtggagccatacaataaaggccgcctaagtgccttgccttttgcagacattcttcgagactataaggtcatcatggccgagaacatccctgaaaacccacttaagtatctataccccgatatccccaaagacaaagcctttgggaagcactactcaagtcagccctgtgaggtctccaggcccaccgaacggggcgataagggatatgtaccttcagtgtttatcccaatttcaaccatcaggtccgattcgactgagccccattccccaagcgatttgctgcctatgtccccctctgtgtatgcagtcctccgggaaaatctctccccaactaccattgagaccgcgatgaagagcccttatagcgctgagtag

SEQ ID NO: 135658 - DNA, 2247 bp, Artificial Sequence
  derived and/or modified sequence
atgagccagtggaaccaggtgcagcagctggagatcaagttcctggagcaggtggaccagttctatgatgacaacttccccatggagatccgccacctgctggcccagtggattgagaaccaggactgggaggccgccagcaacaatgagaccatggccaccatcctgctgcagaacctgctgatccagctggatgagcagctgggccgggtgtccaaggagaagaacctgctgctgatccacaacctgaagaggatcaggaaggtgctgcagggcaagttccacggcaaccccatgcacgtggccgtggtgatcagcaactgcctgcgggaggagcggcgcatcctggccgccgccaacatgcctgtgcagggccccctggagaagagcctgcagagcagctctgtgtctgagcggcagagaaatgtggagcacaaggtggccgccatcaagaacagcgtgcagatgacagagcaggacaccaagtacctggaggacctgcaggatgaatttgactaccgctacaagaccatccagaccatggaccagagcgacaagaacagcgccatggtgaaccaggaggtgctgaccctgcaggagatgctgaacagcctggacttcaagaggaaggaggccctgagcaagatgacccagatcatccatgaaacagacctgctgatgaacaccatgctgattgaggagctgcaggactggaagaggcggcagcagatcgcctgcattggaggccccctgcacaacggcctggaccagctgcagaactgcttcaccctgctggccgagagcctcttccagctgcggcggcagctggagaagctggaggagcagagcaccaagatgacctatgaaggagaccccatccccatgcagaggacccacatgctggagcgggtgaccttcctgatctacaacctcttcaagaacagctttgtggtggagcggcagccctgcatgcccacccacccccagaggcccctggtgctgaagaccctcatccagttcaccgtgaagctgcggctgctgatcaagctgcctgagctgaactaccaggtgaaggtgaaggccagcattgacaagaatgtgtccaccctgagcaacagaagatttgtgctgtgtggcaccaacgtgaaggccatgagcattgaggagagcagcaatggcagcctgtctgtggagttccgccacctgcagcccaaggagatgaagagcagcgctgggggcaaaggaaatgaaggctgccacatggtgacagaggagctgcacagcatcacctttgagacccagatctgcctgtatggcctgaccatcgacctggagaccagcagcctgcctgtggtgatgatcagcaatgtgtcccagctgcccaatgcctgggccagcatcatctggtacaacgtgtccaccaatgacagccagaacctggtgttcttcaacaaccccccaccagccaccctgagccagctgctggaggtgatgtcctggcagttcagcagctatgtgggccggggcctgaacagcgaccagctgcacatgctggccgagaagctgactgtgcagagcagctacagtgatggccacctgacctgggccaagttctgcaaggagcacctgcccgggaagagcttcaccttctggacctggctggaggccatcctggacctgatcaagaagcacatcctgcccctgtggattgatggctacgtgatgggctttgtgtccaaggagaaggagcggctgctgctgaaggacaagatgcctggcaccttcctgctgcgcttcagcgagagccacctgggcggcatcaccttcacctgggtggaccacagcgagagcggggaggtgcgcttccacagcgtggagccctacaacaagggccgcctgagcgccctgccctttgctgacatcctgcgggactacaaggtgatcatggccgagaacatccctgagaaccccctgaagtacctgtacccagacatccccaaggacaaggccttcggcaagcactacagcagccagccctgtgaggtgtcccggcccacagagcggggggacaagggctacgtgcccagcgtcttcatccccatcagcaccatccgcagtgacagcacagagccccacagccccagcgacctgctgcccatgagccccagcgtgtatgctgtgctgcgggagaacctgagccccaccaccattgaaacagccatgaagagcccctacagcgctgagtag

SEQ ID NO: 135659 - DNA, 2247 bp, Artificial Sequence
  derived and/or modified sequence
atgagccagtggaaccaggtgcagcagctggagatcaagttcctggagcaagtcgatcagttttatgacgacaactttcccatggagatccggcacttactcgcccagtggatcgaaaaccaagattgggaagcagcatcaaataatgaaacaatggctaccatactattgcagaacctgctgattcagctggacgagcaacttggccgtgtcagtaaagaaaagaacctgctgctgattcacaatctgaagagaattagaaaagtactgcagggaaagttccacggaaaccctatgcacgtggccgtagtgatcagcaattgcctcagggaggaacggagaattctcgctgcagccaacatgcctgtgcagggccctctcgagaagtccctgcagagcagctcagtctcagagcggcagaggaacgtggaacacaaggtggccgctattaaaaattctgtacaaatgaccgaacaggacaccaagtacttagaggatctgcaggacgaattcgactacaggtacaagacaattcaaactatggatcaatctgataagaattctgctatggtgaatcaggaggtgctgactctacaggaaatgctgaactcattggactttaaaaggaaggaggccctatctaagatgacccagataattcacgagaccgaccttctgatgaataccatgcttatcgaggaactccaggactggaaacggaggcagcagattgcatgcatcggagggccactgcacaatggcttagaccagcttcagaactgttttacgttgctggctgagagtctattccaactccgaagacaactggaaaagctggaggaacagagcacgaagatgacttatgagggtgatcctatacccatgcaacgtacccatatgctggaacgcgtgaccttcctcatctacaacctcttcaaaaattctttcgtggtagagcgccagccatgtatgcctacacaccctcagcgcccattagtgctgaagaccctgatccagttcaccgtgaaactacgacttctgataaaactcccagagctcaactaccaggtcaaggtcaaggcttctatcgacaagaacgtgtctacgctgtccaataggaggttcgtgttgtgcggcacaaacgtgaaagcaatgtcgatcgaggagtcaagtaacggcagcctgagtgtggagtttcggcatctacaaccaaaagaaatgaagtcttccgcaggcggtaaagggaatgaggggtgtcatatggtcacggaggaattgcatagtattactttcgaaacccagatctgcctgtacgggctgacaattgatttggagacatcaagcttgcctgttgtgatgatctccaacgtgtcacagttacctaatgcttgggcctctattatttggtacaacgtgtccaccaatgactcacaaaatcttgtattcttcaataaccctccgcccgcgactctgagccagctcctcgaggttatgagctggcagtttagtagctatgtgggacgtgggctgaattctgaccaattgcatatgttggcagagaagctgactgtccagtccagttattccgacggccatctcacatgggccaagttttgcaaggaacatcttccagggaaaagctttacgttctggacttggttagaagcaattctggacttaataaaaaagcatatcttgcctttatggattgacggctatgtaatgggattcgtctccaaagaaaaagaaagattattgctgaaagacaaaatgccaggcacatttctgctcagattttctgagagccatctgggagggattactttcacctgggtggaccatagtgagtcaggagaggtgagattccatagcgtcgagccctataacaagggtcggctctcagctctgccttttgcagacatactccgcgactacaaagtgataatggcagagaatattcccgagaacccccttaaatacttataccctgatatacccaaggataaggccttcgggaaacactatagctctcagccatgtgaggtatcccgccctactgagcggggggataaaggctatgtgccatctgtatttattccaatctcaacaatcaggagcgattctactgaaccgcactcgccctcagatttattgcctatgagcccctccgtgtatgcagtcctcagggagaacctgtctcctacaacaatcgagacagccatgaagtccccctattcagctgagtag

SEQ ID NO: 135660 - DNA, 2247 bp, Artificial Sequence
  derived and/or modified sequence
atgagccagtggaaccaggtgcagcagctggagatcaagttcctggagcaggtggaccaattttacgacgataattttcctatggagatccgccacctcttagcacaatggattgagaaccaggattgggaagctgcaagtaacaacgaaaccatggctactatattgttgcagaacctcctgatacaattggatgaacagctgggtagagtttccaaagagaaaaacctgcttttaatccataacctcaagcggattcgaaaggtcctgcaaggcaaatttcacgggaatcccatgcacgtggcagtggttatatcaaactgtctgagagaggaaaggcgaattctggcggccgccaatatgccagtgcagggaccccttgaaaaatcccttcagagcagcagtgtaagcgagcggcagagaaacgtggagcataaggtagcagctatcaagaactccgtacagatgacagagcaggatactaagtatctggaggacctccaggacgaattcgattaccgctataaaaccatccagacaatggaccaatccgataaaaacagtgccatggtgaaccaagaggtactgacccttcaagagatgcttaattctctggatttcaaaagaaaggaggcgctaagcaagatgacccagataattcatgagactgatctcttgatgaacaccatgctgatcgaggaactgcaggattggaaacggaggcaacaaatcgcgtgtatcggggggccattgcacaacggcctcgaccagctccagaattgcttcacactccttgcagagtcactgttccagctgcggagacagctggagaagcttgaggagcaatccactaagatgacttacgagggggatcctataccaatgcagagaacccatatgctggagagagtgacttttctcatatataatctcttcaagaacagttttgtcgttgagcgacagccttgtatgcctactcatccgcagagacccttggttcttaagacccttatccagtttactgttaaacttcgactactgatcaaattgccggagctgaattaccaggtcaaagtaaaggcttccattgataaaaacgtctcaacgttgtccaaccgccgtttcgtactctgtgggaccaacgttaaggctatgtctattgaggagtcttccaatggcagcttaagtgttgaatttaggcacctgcagcccaaggaaatgaaatcttccgccggtgggaaggggaatgaaggctgccacatggtgactgaggaattacattccatcacattcgagacacaaatttgcctgtacggtctgactatcgacctggagaccagctcccttcctgtggtgatgatatccaacgtgagccagctgcctaatgcatgggcatcaattatctggtacaacgttagcacaaacgactcacagaacctagtcttcttcaataatcctcccccggccaccctgtctcagctcttagaagttatgagctggcagttctcttcctacgtgggtaggggactgaattcagatcagttacacatgctggcagagaaactaacagtacagagctcgtacagcgatgggcatctgacctgggctaaattctgtaaggagcacctgcctggtaagtccttcactttctggacttggctggaagccatactggatctgatcaagaagcatattttacctctttggattgatggttacgtaatgggatttgtctctaaagaaaaagaaagattgctgctcaaagataaaatgccagggacgttcttattaagattcagtgagtcccatttgggcggtattaccttcacttgggtggaccactctgagtctggcgaggtgcgctttcactctgtagagccctacaataaaggacgcctctcagcactgcccttcgcggacattttaagagattataaggtaatcatggccgagaacataccggagaaccccctgaagtatctgtatcctgatattcccaaagacaaggcgtttggtaagcactactcatctcagccctgcgaggtttctcgcccaacggaacgcggggataaaggctacgtcccttcggtctttattccaatttccactattaggtctgactctactgagccgcactccccgtctgatttactgccaatgagcccgagcgtctacgctgtcctgcgggagaacctgagcccgaccaccattgagacagctatgaagagcccttacagcgccgaatag

SEQ ID NO: 135661 - DNA, 2247 bp, Artificial Sequence
  derived and/or modified sequence
atgagtcagtggaatcaggttcagcaactggaaataaagttcctggagcaggtagatcaattctatgatgataacttccccatggaaattcgccacctcttggcgcaatggatcgaaaatcaggactgggaggccgcatctaacaacgaaactatggccactatcctgctgcaaaacctcttgattcagttggatgaacagttgggacgcgtgagtaaggagaaaaaccttctattgattcataacctgaagcgcattcgcaaagtactccaaggcaaattccatgggaacccgatgcatgtcgcagtcgttatatccaattgtttgagggaggaaaggagaatactcgcagctgccaacatgcctgtccagggtcctcttgagaagtcattgcagtcctcttcagtttctgaacgacaacgcaacgttgaacataaggtcgctgctattaaaaactcggtgcaaatgaccgaacaagacaccaaataccttgaggatttgcaggatgaattcgactatagatacaagaccattcagaccatggatcagtccgataaaaacagcgcaatggtgaatcaggaagtattaaccctgcaggagatgctgaactcactggattttaaacgtaaggaggctctcagtaagatgactcaaataatacacgagacggatctgctgatgaacactatgctaattgaagagcttcaggattggaaacgccgtcagcagatcgcctgtatcggcggaccgctgcacaacggactcgaccagctacaaaattgcttcacccttttggccgagagtctgtttcagctgcgcaggcagctggaaaagcttgaggagcaatccacaaagatgacctacgaaggtgaccccatcccaatgcagcgaacacacatgcttgaacgggtaaccttcctcatctataacctgttcaaaaattctttcgttgtggaacggcagccctgtatgccaacacatccacagcgtcccctcgtcctgaaaactctgatccagtttactgtaaagctcaggctcctcattaagctcccagagctcaactatcaggtaaaagtcaaagcaagcatcgacaagaatgtgtcgaccttgtcaaaccgtagattcgtgctttgcggcacaaatgtaaaggccatgtcaatagaggaaagctcaaacggttccctttccgtcgaatttaggcacctgcaaccaaaggagatgaagtcctctgcaggtggaaagggcaatgaaggctgccatatggtaaccgaggagcttcacagtatcacctttgagacccagatctgcttgtacggtcttacgattgatctcgagacctctagcctacctgttgtcatgattagcaatgtgtcgcaattgcccaatgcctgggcctccattatctggtacaacgttagcacaaatgattcacagaatttagtgttcttcaacaatccaccacctgcaacactttctcagttattggaggtgatgtcctggcagtttagttcatatgttgggagagggctgaatagtgatcagctgcacatgctggccgaaaagcttactgtgcagtcctcctacagtgacggccatctgacttgggcaaaattttgtaaggaacacctaccagggaagtcctttaccttttggacgtggctggaagccatcctggacctgatcaagaagcacatcttaccgctttggatcgatgggtatgtgatgggattcgttagcaaagagaaggagcggctgctcctgaaggataagatgccgggaacgttccttctgcgatttagcgagtctcatctaggtggaattaccttcacatgggtggatcacagtgaaagcggggaggtgaggttccacagtgtagaaccctacaacaagggacgtctctccgcactcccattcgcggacattttaagggactataaggtgattatggccgagaacattccagagaacccccttaagtatctgtatcctgatataccaaaggataaagccttcggcaagcactactcatctcagccctgtgaagtctcccgcccaacagagagaggggataaggggtacgtcccttccgtgtttattcctattagtaccattcgttcagactccacagagccgcactcccccagtgatttattgcctatgtctccaagcgtgtatgctgtgctccgggagaatttgtctcctactacaattgagacggccatgaagtctccttactctgcagagtag

SEQ ID NO: 135662 - DNA, 2247 bp, Artificial Sequence
  derived and/or modified sequence
atgtcccagtggaatcaggtgcagcagttggagatcaaattcctagaacaggtggaccaattttacgacgacaatttcccgatggagatccgacatctcctggcccagtggatcgagaaccaggactgggaagccgcatcaaataacgagacgatggcaaccatactacttcagaaccttttgatacagctggatgaacaattgggccgtgttagtaaggagaaaaacttgctgctgatccacaatcttaaaagaattagaaaggtcctgcaggggaagtttcatggaaaccctatgcatgttgcagtggtgatcagtaattgccttcgtgaggaaaggaggattctcgctgccgcaaacatgcccgtccagggaccactggaaaaatctttgcagtcctcaagtgtatcagaacgtcagaggaacgtggaacataaggtcgcagctattaagaacagcgtgcaaatgacagagcaggacacaaaatacttggaagatttacaggacgagtttgactaccggtacaaaactattcagactatggatcagtctgacaagaattccgccatggttaaccaagaggtactaaccttacaggaaatgctgaatagtctggatttcaaaagaaaggaggcgctgagcaagatgacacagataatccatgagacagaccttctgatgaacaccatgctgatagaggagctgcaggactggaaacggcgacagcagattgcctgcatcggtgggcctctgcataacggcctcgaccagctgcaaaattgttttactctcctcgcagaatctcttttccaactccggagacaattggagaagctggaggaacagtcaaccaagatgacttatgagggcgaccccatccccatgcaaaggactcacatgttggaaagggtgaccttcttaatctacaatttgttcaaaaacagcttcgtggtagagcgccagccttgtatgccaacccatccccagcggcctttagtcttgaagacccttattcagtttaccgtaaaactccgcctgttgatcaagctgccagagctcaactaccaggtaaaggtcaaggcttctattgataagaacgtttcaacactttcgaatcggcgttttgtcctctgtggaactaatgttaaagccatgagcatcgaggagtcctcgaatgggagcttgagcgtcgaatttagacacctacaacccaaggagatgaagagcagtgctggtggtaagggtaatgaggggtgccacatggttacagaggagctacactctatcacattcgaaacccagatttgcctctacggcctcacaatcgatcttgagacgagttccttacctgtcgtcatgattagcaacgttagtcagcttcccaatgcatgggctagcattatctggtacaacgtctcgaccaacgatagtcagaacctggtgttttttaacaatccccctcctgccaccctgagccagcttcttgaggtgatgtcttggcaattttcttcttatgtggggaggggtctgaattctgaccagctccacatgctcgctgagaaactgaccgtgcagagttcttactccgatggacacctcacctgggccaagttttgcaaggagcacctgccaggaaaatcatttactttctggacctggctcgaagccatcctcgatctcatcaaaaaacatattctgcccctgtggatagacggttacgttatgggcttcgtgtccaaggagaaggaaagactcctgctgaaggataaaatgcccggaacctttcttctcaggttttcagaatcgcacctcggtggcatcactttcacctgggtggatcactctgagagcggtgaggtccggttccatagcgttgagccatataacaagggtcgtctgtccgccctgccttttgctgacattctgagagattacaaggtgataatggccgaaaacattcctgaaaatccactgaagtatttatatccggacatacctaaagacaaagcattcggcaagcactattcgagtcagccctgtgaggtcagtaggcccactgagaggggcgacaagggttacgtgccaagcgtttttatcccaatttctacaataaggtcggacagcaccgaaccacactctccaagcgacttactccctatgtctccgagcgtctatgccgtcttacgcgagaacttgtcacctaccaccattgaaaccgcgatgaagtcaccctatagcgctgagtag

SEQ ID NO: 135663 - DNA, 2822 bp, Artificial Sequence
  derived and/or modified sequence
tttttcctggcactgctgagccacctgcagttgcgagagccgctgggagggataagagggaagaggacgcccggtgaaggggctccagcctggcagtttctgcgtgttagcatttctagaatagagtgggtgggaactgacccaagtaaagtcccagagactcgaacactgacgcacaggaaagcctcaagtgggaggagaaatgcaaatcccctactgatgatggcgtcagcggctttctcctagggactgtgaggggcgcttctgactttggacttgagcactgcctgggacctgtgctgagagagcgctagcatgtctcagtggaatcaagtccaacagttagaaatcaagtttttggagcaggtggatcaattctatgatgacaactttcccatggaaattcggcatctgttggcccaatggattgaaaatcaagactgggaggcagcttctaacaatgaaaccatggcaacgattcttcttcaaaacttgttaatacaactggatgaacagttaggtcgtgtttccaaagagaaaaacctactcttgatacacaatctaaaaagaattaggaaggtccttcagggaaaatttcatggaaatccaatgcatgtagctgtggttatttcaaactgtttaagggaagagaggagaatattggctgcagccaacatgcctgtccaggggcctctagagaaatccttacaaagttcttcagtttcagaaagacagaggaatgtggagcacaaagtggctgccattaaaaacagtgtgcagatgacagaacaagataccaaatacttagaagatctgcaagacgaatttgactacaggtataaaacaattcagacaatggatcagagtgacaagaatagtgccatggtgaatcaggaagttttgacactgcaggaaatgcttaacagcctcgatttcaagagaaaggaggctctcagtaaaatgacccaaatcatccatgagacagacctgttaatgaacaccatgctcatagaagagctgcaagactggaagcggcggcagcaaatcgcctgcatcgggggtccactccacaatgggctcgaccagcttcagaactgctttacactattggcagaaagtcttttccaactgagaaggcaattggagaaactagaggagcaatctaccaaaatgacatatgaaggtgatcccattccaatgcaaagaactcacatgctagaaagagtcaccttcttgatctacaaccttttcaagaactcatttgtggttgagcgacagccatgtatgccaacccaccctcagaggccgttggtacttaaaaccctaattcagttcactgtaaaactaaggctactaataaaattgccagaactaaactatcaggtaaaggttaaggcatcaattgacaagaatgtttcaactctaagcaaccgaagatttgtactttgtggaactaatgtcaaagccatgtctattgaagaatcttccaatgggagtctctcagtagaatttcgacatttgcaaccaaaggaaatgaagtccagtgctggaggtaaaggaaatgagggctgtcacatggtgactgaagaacttcattccataacgtttgaaacacagatctgcctctatggcctgaccatagatttggagaccagctcattgcctgtggtgatgatttccaatgtcagtcagttacctaatgcttgggcatccatcatttggtacaacgtgtcaaccaacgattcccagaacttggttttctttaataatcctccacctgccacattgagtcaactactggaggtgatgagctggcagttttcatcgtacgttggtcgtggtcttaactcagatcaactccatatgctggcagagaagcttacagtccaatctagctacagtgatggtcacctcacctgggccaagttctgcaaggaacatttacctggtaaatcatttaccttttggacatggcttgaagcaatattggatctaattaagaaacacattcttcccctttggattgatgggtatgtcatgggctttgttagcaaagagaaggaacggctgttgctaaaggataaaatgcctggcacctttttattaagattcagtgaaagccatctcggaggaataactttcacctgggtggaccattctgaaagtggggaagtgagattccactctgtagaaccctacaataaaggccggttgtctgctctgccattcgctgacatcctgcgagactacaaagttattatggctgaaaacattcctgaaaaccctctgaagtacctatatcctgacattcccaaagacaaagccttcggtaaacactacagctctcagccttgcgaagtttcaagaccaacagaaaggggtgacaaaggttatgttccttctgtttttatccccatctcaacaatccgaagtgattcaacagagccacattctccatcagaccttcttcccatgtctccaagtgtgtatgcggtgttgagagaaaacctgagtcccacaacaattgaaactgcaatgaagtctccttattctgctgaatgacaggataaactctgacgcaccaagaaaggaagcaaatgaaaaagtttaaagactgttctttgcccaataaccacattttatttcttcagctttgtaaataccaggttctaggaaatgtttgacatctgaagctctcttcacactcccgtggcactcctcaattgggagtgttgtgactgaaatgcttgaaaccaaagcttcagataaacttgcaagataagacaactttaagaaaccagtgttaataacaatattaacag

SEQ ID NO: 135664 - protein, 794 aa, Artificial Sequence
  derived and/or modified sequence
MAGWIQAQQLQGDALRQMQVLYGQHFPIEVRHYLAQWIESQPWDAIDLDNPQDRAQATQLLEGLVQELQKKAEHQVGEDGFLLKIKLGHYATQLQKTYDRCPLELVRCIRHILYNEQRLVREANNCSSPAGILVDAMSQKHLQINQTFEELRLVTQDTENELKKLQQTQEYFIIQYQESLRIQAQFAQLAQLSPQERLSRETALQQKQVSLEAWLQREAQTLQQYRVELAEKHQKTLQLLRKQQTIILDDELIQWKRRQQLAGNGGPPEGSLDVLQSWCEKLAEIIWQNRQQIRRAEHLCQQLPIPGPVEEMLAEVNATITDIISALVTSTFIIEKQPPQVLKTQTKFAATVRLLVGGKLNVHMNPPQVKATIISEQQAKSLLKNENTRNECSGEILNNCCVMEYHQATGTLSAHFRNMSLKRIKRADRRGAESVTEEKFTVLFESQFSVGSNELVFQVKTLSLPVVVIVHGSQDHNATATVLWDNAFAEPGRVPFAVPDKVLWPQLCEALNMKFKAEVQSNRGLTKENLVFLAQKLFNNSSSHLEDYSGLSVSWSQFNRENLPGWNYTFWQWFDGVMEVLKKHHKPHWNDGAILGFVNKQQAHDLLINKPDGTFLLRFSDSEIGGITIAWKFDSPERNLWNLKPFTTRDFSIRSLADRLGDLSYLIYVFPDRPKDEVFSKYYTPVLAKAVDGYVKPQIKQVVPEFVNASADAGGSSATYMDQAPSPAVCPQAPYNMYPQNPDHVLDQDGEFDLDETMDVARHVEELLRRPMDSLDSRLSPPAGLFTSARGSLS

SEQ ID NO: 135665 - protein, 791 aa, Artificial Sequence
  derived and/or modified sequence
MAGWIQAQQLQGDALRQMQVLYGQHFPIEVRHYLAQWIESQPWDAIDLDNPQDRAQATQLLEGLVQELQKKAEHQVGEDGFLLKIKLGHYATQLQKTYDRCPLELVRCIRHILYNEQRLVREANNCSSPAGILVDAMSQKHLQINQTFEELRLVTQDTENELKKLQQTQEYFIIQYQESLRIQAQFAQLAQLSPQERLSRETALQQKQVSLEAWLQREAQTLQQYRVELAEKHQKTLQLLRKQQTIILDDELIQWKRRQQLAGNGGPPEGSLDVLQSWCEKLAEIIWQNRQQIRRAEHLCQQLPIPGPVEEMLAEVNATITDIISALVTSTFIIEKQPPQVLKTQTKFAATVRLLVGGKLNVHMNPPQVKATIISEQQAKSLLKNENTRNECSGEILNNCCVMEYHQATGTLSAHFRNMSLKRIKRADRRGAESVTEEKFTVLFESQFSVGSNELVFQVKTLSLPVVVIVHGSQDHNATATVLWDNAFAEPGRVPFAVPDKVLWPQLCEALNMKFKAEVQSNRGLTKENLVFLAQKLFNNSSSHLEDYSGLSVSWSQFNRENLPGWNYTFWQWFDGVMEVLKKHHKPHWNDGGFVNKQQAHDLLINKPDGTFLLRFSDSEIGGITIAWKFDSPERNLWNLKPFTTRDFSIRSLADRLGDLSYLIYVFPDRPKDEVFSKYYTPVLAKAVDGYVKPQIKQVVPEFVNASADAGGSSATYMDQAPSPAVCPQAPYNMYPQNPDHVLDQDGEFDLDETMDVARHVEELLRRPMDSLDSRLSPPAGLFTSARGSLS

SEQ ID NO: 135666 - DNA, 4314 bp, Artificial Sequence
  derived and/or modified sequence
agacaggatattcactgctgtggcaaggcctgtagagagtttcgaagttaggaggactcaagacggtccctccctggacttttctgaaggggctcaaaagatgacacgcgccagagctggaaggcgtcgccaattggtccacttttccctcctccctttttgcggatgagaaaactgaggcccaggtttgggatttccagagcccgggatttcccggcaacgcccgacaaccacattcccccggctattctgacccgccccggttccgggacgctccctgggagccgccgccgagggcctgctgggactcccgggggaccccgccgtcggggcagcccccacgcccggcgccgcccgccgggaacggccgccgctgttgcgcacttgcaggggagccggcgactgagggcgaggcagggagggagcaagcggggctgggagggctgctggcgcgggctcgcgcgctgtgtatggtctatcgcaggcagctgacctttgaggaggaaatcgctgctctccgctccttcctgtagtaacagccgccgctgccgccgccgccaggaaccccggccgggagcgagagccgcggggcgcagagccggcccggctgccggacggtgcggccccaccaggtgaacggccatggcgggctggatccaggcccagcagctgcagggagacgcgctgcgccagatgcaggtgctgtacggccagcacttccccatcgaggtccggcactacttggcccagtggattgagagccagccatgggatgccattgacttggacaatccccaggacagagcccaagccacccagctcctggagggcctggtgcaggagctgcagaagaaggcggagcaccaggtgggggaagatgggtttttactgaagatcaagctggggcactacgccacgcagctccagaaaacatatgaccgctgccccctggagctggtccgctgcatccggcacattctgtacaatgaacagaggctggtccgagaagccaacaattgcagctctccggctgggatcctggttgacgccatgtcccagaagcaccttcagatcaaccagacatttgaggagctgcgactggtcacgcaggacacagagaatgagctgaagaaactgcagcagactcaggagtacttcatcatccagtaccaggagagcctgaggatccaagctcagtttgcccagctggcccagctgagcccccaggagcgtctgagccgggagacggccctccagcagaagcaggtgtctctggaggcctggttgcagcgtgaggcacagacactgcagcagtaccgcgtggagctggccgagaagcaccagaagaccctgcagctgctgcggaagcagcagaccatcatcctggatgacgagctgatccagtggaagcggcggcagcagctggccgggaacggcgggccccccgagggcagcctggacgtgctacagtcctggtgtgagaagttggccgagatcatctggcagaaccggcagcagatccgcagggctgagcacctctgccagcagctgcccatccccggcccagtggaggagatgctggccgaggtcaacgccaccatcacggacattatctcagccctggtgaccagcacattcatcattgagaagcagcctcctcaggtcctgaagacccagaccaagtttgcagccaccgtacgcctgctggtgggcgggaagctgaacgtgcacatgaatcccccccaggtgaaggccaccatcatcagtgagcagcaggccaagtctctgcttaaaaatgagaacacccgcaacgagtgcagtggtgagatcctgaacaactgctgcgtgatggagtaccaccaagccacgggcaccctcagtgcccacttcaggaacatgtcactgaagaggatcaagcgtgctgaccggcggggtgcagagtccgtgacagaggagaagttcacagtcctgtttgagtctcagttcagtgttggcagcaatgagcttgtgttccaggtgaagactctgtccctacctgtggttgtcatcgtccacggcagccaggaccacaatgccacggctactgtgctgtgggacaatgcctttgctgagccgggcagggtgccatttgccgtgcctgacaaagtgctgtggccgcagctgtgtgaggcgctcaacatgaaattcaaggccgaagtgcagagcaaccggggcctgaccaaggagaacctcgtgttcctggcgcagaaactgttcaacaacagcagcagccacctggaggactacagtggcctgtccgtgtcctggtcccagttcaacagggagaacttgccgggctggaactacaccttctggcagtggtttgacggggtgatggaggtgttgaagaagcaccacaagccccactggaatgatggggccatcctaggttttgtgaataagcaacaggcccacgacctgctcatcaacaagcccgacgggaccttcttgttgcgctttagtgactcagaaatcgggggcatcaccatcgcctggaagtttgactccccggaacgcaacctgtggaacctgaaaccattcaccacgcgggatttctccatcaggtccctggctgaccggctgggggacctgagctatctcatctatgtgtttcctgaccgccccaaggatgaggtcttctccaagtactacactcctgtgctggctaaagctgttgatggatatgtgaaaccacagatcaagcaagtggtccctgagtttgtgaatgcatctgcagatgctgggggcagcagcgccacgtacatggaccaggccccctccccagctgtgtgcccccaggctccctataacatgtacccacagaaccctgaccatgtactcgatcaggatggagaattcgacctggatgagaccatggatgtggccaggcacgtggaggaactcttacgccgaccaatggacagtcttgactcccgcctctcgccccctgccggtcttttcacctctgccagaggctccctctcatgaatgtttgaatcccacgcttctctttggaaacaatatgcaatgtgaagcggtcgtgttgtgagtttagtaaggctgtgtacactgacacctttgcaggcatgcatgtgcttgtgtgtgtgtgtgtgtgtgtgtccttgtgcatgagctacgcctgcctcccctgtgcagtcctgggatgtggctgcagcagcggtggcctcttttcagatcatggcatccaagagtgcgccgagtctgtctctgtcatggtagagaccgagcctctgtcactgcaggcactcaatgcagccagacctattcctcctgggcccctcatctgctcagcagctatttgaatgagatgattcagaaggggaggggagacaggtaacgtctgtaagctgaagtttcactccggagtgagaagctttgccctcctaagagagagagacagagagacagagagagagaaagagagagtgtgtgggtctatgtaaatgcatctgtcctcatgtgttgatgtaaccgattcatctctcagaagggaggctggggttcattttcgagtagtattttatactttagtgaacgtggactccagactctctgtgaaccctatgagagcgcgtctgggcccggccatgtccttagcacaggggggccgccggtttgagtgagggtttctgagctgctctgaattagtccttgcttggctgcttggccttgggcttcattcaagtctatgatgctgttgcccacgtttcccgggatatatattctctcccctccgttgggccccagccttctttgcttgcctctctgtttgtaaccttgtcgacaaagaggtagaaaagattgggtctaggatatggtgggtggacaggggccccgggacttggagggttggtcctcttgcctcctggaaaaaacaaaaacaaaaaactgcagtgaaagacaagctgcaaatcagccatgtgctgcgtgcctgtggaatctggagtgaggggtaaaagctgatctggtttgactccgctggaggtggggcctggagcaggccttgcgctgttgcgtaactggctgtgttctggtgaggccttgctcccaaccccacacgctcctccctctgaggctgtaggactcgcagtcaggggcagctgaccatggaagattgagagcccaaggtttaaacttctctgaagggaggtggggatgagaagaggggtttttttgtactttgtacaaagaccacacatttgtgtaaacagtgttttggaataaaatatttttttcataaaaaaaaaaaaaaaa

SEQ ID NO: 135667 - DNA, 2385 bp, Artificial Sequence
  derived and/or modified sequence
atggccggctggatccaggcccagcagctgcagggcgacgccctgagacagatgcaggtgctgtacggccagcacttccccatcgaggtgagacactacctggcccagtggatcgagagccagccctgggacgccatcgacctggacaacccccaggacagagcccaggccacccagctgctggagggcctggtgcaggagctgcagaagaaggccgagcaccaggtgggcgaggacggcttcctgctgaagatcaagctgggccactacgccacccagctgcagaagacctacgacagatgccccctggagctggtgagatgcatcagacacatcctgtacaacgagcagagactggtgagagaggccaacaactgcagcagccccgccggcatcctggtggacgccatgagccagaagcacctgcagatcaaccagaccttcgaggagctgagactggtgacccaggacaccgagaacgagctgaagaagctgcagcagacccaggagtacttcatcatccagtaccaggagagcctgagaatccaggcccagttcgcccagctggcccagctgagcccccaggagagactgagcagagagaccgccctgcagcagaagcaggtgagcctggaggcctggctgcagagagaggcccagaccctgcagcagtacagagtggagctggccgagaagcaccagaagaccctgcagctgctgagaaagcagcagaccatcatcctggacgacgagctgatccagtggaagagaagacagcagctggccggcaacggcggcccccccgagggcagcctggacgtgctgcagagctggtgcgagaagctggccgagatcatctggcagaacagacagcagatcagaagagccgagcacctgtgccagcagctgcccatccccggccccgtggaggagatgctggccgaggtgaacgccaccatcaccgacatcatcagcgccctggtgaccagcaccttcatcatcgagaagcagcccccccaggtgctgaagacccagaccaagttcgccgccaccgtgagactgctggtgggcggcaagctgaacgtgcacatgaaccccccccaggtgaaggccaccatcatcagcgagcagcaggccaagagcctgctgaagaacgagaacaccagaaacgagtgcagcggcgagatcctgaacaactgctgcgtgatggagtaccaccaggccaccggcaccctgagcgcccacttcagaaacatgagcctgaagagaatcaagagagccgacagaagaggcgccgagagcgtgaccgaggagaagttcaccgtgctgttcgagagccagttcagcgtgggcagcaacgagctggtgttccaggtgaagaccctgagcctgcccgtggtggtgatcgtgcacggcagccaggaccacaacgccaccgccaccgtgctgtgggacaacgccttcgccgagcccggcagagtgcccttcgccgtgcccgacaaggtgctgtggccccagctgtgcgaggccctgaacatgaagttcaaggccgaggtgcagagcaacagaggcctgaccaaggagaacctggtgttcctggcccagaagctgttcaacaacagcagcagccacctggaggactacagcggcctgagcgtgagctggagccagttcaacagagagaacctgcccggctggaactacaccttctggcagtggttcgacggcgtgatggaggtgctgaagaagcaccacaagccccactggaacgacggcgccatcctgggcttcgtgaacaagcagcaggcccacgacctgctgatcaacaagcccgacggcaccttcctgctgagattcagcgacagcgagatcggcggcatcaccatcgcctggaagttcgacagccccgagagaaacctgtggaacctgaagcccttcaccaccagagacttcagcatcagaagcctggccgacagactgggcgacctgagctacctgatctacgtgttccccgacagacccaaggacgaggtgttcagcaagtactacacccccgtgctggccaaggccgtggacggctacgtgaagccccagatcaagcaggtggtgcccgagttcgtgaacgccagcgccgacgccggcggcagcagcgccacctacatggaccaggcccccagccccgccgtgtgcccccaggccccctacaacatgtacccccagaaccccgaccacgtgctggaccaggacggcgagttcgacctggacgagaccatggacgtggccagacacgtggaggagctgctgagaagacccatggacagcctggacagcagactgagcccccccgccggcctgttcaccagcgccagaggcagcctgagctag

SEQ ID NO: 135668 - DNA, 2376 bp, Artificial Sequence
  derived and/or modified sequence
atggccggctggatccaggcccagcagctgcagggcgacgccctgagacagatgcaggtgctgtacggccagcacttccccatcgaggtgagacactacctggcccagtggatcgagagccagccctgggacgccatcgacctggacaacccccaggacagagcccaggccacccagctgctggagggcctggtgcaggagctgcagaagaaggccgagcaccaggtgggcgaggacggcttcctgctgaagatcaagctgggccactacgccacccagctgcagaagacctacgacagatgccccctggagctggtgagatgcatcagacacatcctgtacaacgagcagagactggtgagagaggccaacaactgcagcagccccgccggcatcctggtggacgccatgagccagaagcacctgcagatcaaccagaccttcgaggagctgagactggtgacccaggacaccgagaacgagctgaagaagctgcagcagacccaggagtacttcatcatccagtaccaggagagcctgagaatccaggcccagttcgcccagctggcccagctgagcccccaggagagactgagcagagagaccgccctgcagcagaagcaggtgagcctggaggcctggctgcagagagaggcccagaccctgcagcagtacagagtggagctggccgagaagcaccagaagaccctgcagctgctgagaaagcagcagaccatcatcctggacgacgagctgatccagtggaagagaagacagcagctggccggcaacggcggcccccccgagggcagcctggacgtgctgcagagctggtgcgagaagctggccgagatcatctggcagaacagacagcagatcagaagagccgagcacctgtgccagcagctgcccatccccggccccgtggaggagatgctggccgaggtgaacgccaccatcaccgacatcatcagcgccctggtgaccagcaccttcatcatcgagaagcagcccccccaggtgctgaagacccagaccaagttcgccgccaccgtgagactgctggtgggcggcaagctgaacgtgcacatgaaccccccccaggtgaaggccaccatcatcagcgagcagcaggccaagagcctgctgaagaacgagaacaccagaaacgagtgcagcggcgagatcctgaacaactgctgcgtgatggagtaccaccaggccaccggcaccctgagcgcccacttcagaaacatgagcctgaagagaatcaagagagccgacagaagaggcgccgagagcgtgaccgaggagaagttcaccgtgctgttcgagagccagttcagcgtgggcagcaacgagctggtgttccaggtgaagaccctgagcctgcccgtggtggtgatcgtgcacggcagccaggaccacaacgccaccgccaccgtgctgtgggacaacgccttcgccgagcccggcagagtgcccttcgccgtgcccgacaaggtgctgtggccccagctgtgcgaggccctgaacatgaagttcaaggccgaggtgcagagcaacagaggcctgaccaaggagaacctggtgttcctggcccagaagctgttcaacaacagcagcagccacctggaggactacagcggcctgagcgtgagctggagccagttcaacagagagaacctgcccggctggaactacaccttctggcagtggttcgacggcgtgatggaggtgctgaagaagcaccacaagccccactggaacgacggcggcttcgtgaacaagcagcaggcccacgacctgctgatcaacaagcccgacggcaccttcctgctgagattcagcgacagcgagatcggcggcatcaccatcgcctggaagttcgacagccccgagagaaacctgtggaacctgaagcccttcaccaccagagacttcagcatcagaagcctggccgacagactgggcgacctgagctacctgatctacgtgttccccgacagacccaaggacgaggtgttcagcaagtactacacccccgtgctggccaaggccgtggacggctacgtgaagccccagatcaagcaggtggtgcccgagttcgtgaacgccagcgccgacgccggcggcagcagcgccacctacatggaccaggcccccagccccgccgtgtgcccccaggccccctacaacatgtacccccagaaccccgaccacgtgctggaccaggacggcgagttcgacctggacgagaccatggacgtggccagacacgtggaggagctgctgagaagacccatggacagcctggacagcagactgagcccccccgccggcctgttcaccagcgccagaggcagcctgagctag

SEQ ID NO: 135669 - DNA, 2385 bp, Artificial Sequence
  derived and/or modified sequence
atggctgggtggatccaggctcagcagcttcagggcgacgctctgcgacagatgcaggtgctgtacggtcaacatttccccatcgaggttcgccattacctggcccaatggattgagtcccagccatgggacgctatcgacttggataatccccaggacagagcccaggcaactcagttactggagggcctcgtgcaggagcttcagaagaaggccgagcaccaggtaggggaggacgggtttttgctgaaaattaagctggggcactatgccacccaactccagaaaacatatgataggtgtccgttagagctggtaaggtgtatcaggcacatcctctataatgaacaacgactggtgcgggaggcgaataattgtagctcccctgcgggtatcctcgtggatgcaatgtctcagaagcacttacaaataaatcagacattcgaagagctgcgcctcgttactcaggacacagagaatgaattaaaaaaattgcagcagactcaggaatatttcattatacaatatcaggaaagcttacgcattcaggcacagtttgcacagcttgcccagctcagtccccaagaacgactctctcgcgaaaccgccctgcaacaaaaacaggtatctcttgaggcatggttacagcgcgaagcccagacactccaacagtatagggttgagctggcagagaagcaccaaaaaaccctgcagctcctgaggaaacaacaaaccatcattctcgatgatgagctgatccaatggaaacgtaggcaacagctggcaggcaacggtggaccaccagaaggctcacttgacgtgctccagagctggtgcgagaaactggctgagatcatctggcaaaatagacagcagatcagaagagccgagcacctgtgccagcaacttccaatcccaggcccagtggaagagatgcttgccgaggtgaatgccacaatcaccgatattatcagtgctctcgtcacatccacctttattattgagaagcagcctccacaagtattaaaaactcaaacgaaatttgcagccactgttcgcctgctcgtcggcgggaaactcaatgttcatatgaatcctcctcaagtaaaggcaacgatcataagcgagcaacaggcgaagtcactgttgaagaacgagaatacccgcaatgagtgctctggggagatcctcaataactgctgcgtgatggaatatcatcaggcgaccggcaccttatcggcacattttcggaatatgtctttgaagcgtattaagcgagccgataggaggggcgctgaaagtgtgactgaggagaagttcaccgtcctttttgagtctcagttctcagtgggatcaaacgagctcgtcttccaggtgaagactctgtctctccccgtggtcgttattgtgcatggcagtcaggaccacaatgccactgccaccgtgctttgggacaatgcattcgcagagcccggcagggtcccctttgccgtgcccgataaagtgctttggccccagctgtgcgaagccctgaacatgaaattcaaagcggaagtacagagtaataggggccttaccaaagaaaatctggtgttcctggcccagaaactgttcaacaactcctcctcacacctggaagactatagtggtctgtctgtcagttggtcccagtttaaccgtgagaacctccccggctggaactatacattctggcagtggttcgatggcgtcatggaagtgctcaagaagcatcacaagcctcattggaatgatggagctatcttgggattcgttaataagcagcaagctcacgatctcctcattaataagccggatggtaccttccttctgaggttctctgacagtgagattggcggcataaccatcgcctggaagtttgactccccggaaagaaacctgtggaatctgaagccattcaccaccagggattttagcatcaggtcgctggccgatcgattaggagacctaagctacttgatttatgttttcccggatcgccctaaagacgaggtattcagtaagtattacacacctgtgctggctaaggcagtggacggttatgtgaaaccgcagataaaacaggtggtgccagagtttgtgaatgcctcggccgatgccggcgggagttccgccacctacatggatcaggcgccatctccagcagtctgtccacaggctccctacaacatgtacccacagaatccagatcacgtgttggatcaggacggcgaatttgatctggatgaaactatggacgtggcccgtcacgtggaggagctcctcagaaggcctatggactctctggacagtagattatcacctcccgcggggctcttcacaagcgcccgcggcagtttatcctag

SEQ ID NO: 135670 - DNA, 2376 bp, Artificial Sequence
  derived and/or modified sequence
atggcaggatggatacaggcacaacaactgcagggggacgccctccgccagatgcaggtgctgtatggtcagcattttcctatcgaggtgagacactaccttgcacagtggattgaaagccaaccttgggatgctatagatttggacaatccccaggatagagcgcaagccacacagctgctggagggcttagtgcaggagctgcagaaaaaggccgaacaccaggttggtgaggacggttttctccttaaaatcaaactcggacactacgccacgcagcttcagaaaacctacgatagatgcccattagagctagtcaggtgcatccgacacattctttataacgagcagagactcgtacgtgaggcgaataattgtagtagcccggcagggatactggtcgacgcaatgtcacagaaacatttacagatcaaccagaccttcgaagagctccgcctggtgacacaggataccgaaaacgaattaaagaagcttcagcagacccaggaatatttcatcattcagtatcaggaaagcctgcgaattcaggctcaattcgcccagctggcccagctgagccctcaagaacgactatcacgcgagactgccttacagcagaagcaggttagtctggaagcgtggttacaaagagaggctcagacgctccaacaatatcgagtggaactggccgaaaaacatcagaagacactgcagctgctgcggaagcagcagacgatcatcttggatgatgagttgatccaatggaaaagacgtcagcaactcgctgggaacggaggaccccccgagggctcactcgatgtcctgcagtcttggtgtgagaagctggccgaaatcatatggcaaaaccgccagcagatccggcgcgctgaacatctctgccagcagcttccaattcccgggccggtcgaagagatgctagccgaagtaaacgcaaccataacggacatcattagcgcactcgtcactagtacattcatcattgagaagcagccaccacaagtcctcaagacccagacgaagttcgccgcaaccgtgcggcttttggtgggtgggaagctaaatgtccatatgaaccctcctcaggtcaaggccaccataattagcgaacagcaagctaagtctctgctgaagaatgagaacacgcggaatgagtgctccggtgagattctgaataactgctgtgtcatggagtatcatcaagcaacggggacgttgagtgctcacttcagaaatatgtccctgaaacggatcaagcgcgcagaccggcgaggggccgaatcagttactgaagagaaatttacagtactgtttgagagccaattctcagtgggcagtaatgagctggtgtttcaggtaaagacgctctccctgcccgtcgtagtgatagtccatggctctcaggaccacaatgctacagcaacggtgctgtgggacaacgccttcgctgaacccggccgtgtgcccttcgcggtccctgataaggtgctatggccccagctgtgtgaggccttaaatatgaagtttaaagccgaggttcaaagcaacagaggtctgacaaaagagaacctcgtatttttggcccagaagctctttaataacagctcaagccacctggaggactactctggcctctccgtctcctggagccagtttaatagggaaaacctccctggatggaattatacattttggcagtggtttgacggcgttatggaagtgttgaagaaacaccacaaaccgcattggaatgacggcgggttcgtcaacaaacaacaggctcacgaccttctcataaacaaacccgatggtacgtttctactccggttttccgatagtgagatcggagggatcaccattgcttggaagttcgattctccagaaagaaatctgtggaacctgaagcctttcactacaagagacttcagcatccgcagtctcgccgacagactcggcgacctctcatatctcatttacgtattccctgaccgcccaaaggatgaggtctttagcaagtactacacgccagtccttgcgaaggcggtagatggatatgtgaaaccacaaataaaacaggtggtcccagagttcgtgaatgcctctgccgatgctggaggttcatctgcaacctatatggaccaggcaccaagtcctgctgtgtgcccccaggcgccttacaacatgtaccctcagaacccagatcacgtactggaccaagacggggagtttgatttagatgagacaatggatgtcgcccgccatgttgaagagttattgcgacgtcccatggattccctggacagcaggctctctccgccagcaggccttttcactagcgccaggggcagtctgtcatag

SEQ ID NO: 135671 - DNA, 2385 bp, Artificial Sequence
  derived and/or modified sequence
atggccggctggatccaggcccagcagctgcagggagatgccctgcggcagatgcaggtgctgtatggccagcacttccccatcgaggtgcgccactacctggcccagtggattgagagccagccctgggatgccatcgacctggacaacccccaggaccgggcccaggccacccagctgctggagggcctggtgcaggagctgcagaagaaggccgagcaccaggtgggggaggatggcttcctgctgaagatcaagctgggccactacgccacccagctgcagaagacctatgaccgctgccccctggagctggtgcgctgcatccgccacatcctgtacaatgagcagaggctggtgcgggaggccaacaactgcagcagccctgctggcatcctggtggatgccatgagccagaagcacctgcagatcaaccagacctttgaggagctgcggctggtgacccaggacacagaaaatgagctgaagaagctgcagcagacccaggagtacttcatcatccagtaccaggagagcctgcgcatccaggcccagtttgcccagctggcccagctgagcccccaggagcggctgagccgggagacagccctgcagcagaagcaggtgtccctggaggcctggctgcagcgggaggcccagaccctgcagcagtacagagtggagctggccgagaagcaccagaagaccctgcagctgctgaggaagcagcagaccatcatcctggatgatgagctgatccagtggaagaggcggcagcagctggccggaaatggaggccccccagagggcagcctggatgtgctgcagagctggtgtgagaagctggccgagatcatctggcagaaccggcagcagatccggcgggcagagcacctgtgccagcagctgcccatccctggccctgtggaggagatgctggccgaggtgaatgccaccatcacagacatcatcagcgccctggtgaccagcaccttcatcatcgagaagcagcccccccaggtgctgaagacccagaccaagtttgctgccaccgtgcggctgctggtgggcggcaagctgaatgtgcacatgaaccccccccaggtgaaggccaccatcatcagcgagcagcaggccaagagcctgctgaagaatgaaaacaccagaaatgaatgttctggagagatcctgaacaactgctgcgtgatggagtaccaccaggccaccggcaccctgagcgcccacttcaggaacatgagcctgaagaggatcaagagagctgacagaagaggagctgagagcgtgacagaggagaagttcaccgtgctgtttgagagccagttctctgtgggcagcaatgagctggtgttccaggtgaagaccctgagcctgcctgtggtggtgattgtgcacggcagccaggaccacaatgccacagccaccgtgctgtgggacaatgcctttgctgagcccggccgggtgccctttgctgtgcctgacaaggtgctgtggccccagctgtgtgaggccctgaacatgaagttcaaggccgaggtgcagagcaacagaggcctgaccaaggagaacctggtgttcctggcccagaagctgttcaacaacagcagcagccacctggaggactacagcggcctgtctgtgtcctggagccagttcaaccgggagaacctgcccggctggaactacaccttctggcagtggtttgatggagtgatggaggtgctgaagaagcaccacaagccccactggaatgatggagccatcctgggctttgtgaacaagcagcaggcccatgacctgctgatcaacaagccagatggcaccttcctgctgcgcttcagtgacagcgagatcggcggcatcaccatcgcctggaagtttgacagccctgagaggaacctgtggaacctgaagcccttcaccacccgggacttcagcatccgcagcctggccgaccggctgggggacctgagctacctgatctacgtgtttcctgaccggcccaaggatgaggtgttcagcaagtactacacccctgtgctggccaaggctgtggatggctacgtgaagccccagatcaagcaggtggtgcctgagtttgtgaatgccagcgcagatgctgggggcagcagcgccacctacatggaccaggcccccagccctgctgtgtgcccccaggccccctacaacatgtacccccagaacccagaccacgtgctggaccaggatggagaatttgacctggatgagaccatggatgtggcccggcacgtggaggagctgctgcggcggcccatggacagcctggacagccggctgagccccccagctggcctcttcaccagcgcccggggcagcctgtcctag

SEQ ID NO: 135672 - DNA, 2376 bp, Artificial Sequence
  derived and/or modified sequence
atggccggctggatccaggcccagcagctgcagggagatgccctgcggcagatgcaggtgctgtatggccagcacttccccatcgaggtgcgccactacctggcccagtggattgagagccagccctgggatgccatcgacctggacaacccccaggaccgggcccaggccacccagctgctggagggcctggtgcaggagctgcagaagaaggccgagcaccaggtgggggaggatggcttcctgctgaagatcaagctgggccactacgccacccagctgcagaagacctatgaccgctgccccctggagctggtgcgctgcatccgccacatcctgtacaatgagcagaggctggtgcgggaggccaacaactgcagcagccctgctggcatcctggtggatgccatgagccagaagcacctgcagatcaaccagacctttgaggagctgcggctggtgacccaggacacagaaaatgagctgaagaagctgcagcagacccaggagtacttcatcatccagtaccaggagagcctgcgcatccaggcccagtttgcccagctggcccagctgagcccccaggagcggctgagccgggagacagccctgcagcagaagcaggtgtccctggaggcctggctgcagcgggaggcccagaccctgcagcagtacagagtggagctggccgagaagcaccagaagaccctgcagctgctgaggaagcagcagaccatcatcctggatgatgagctgatccagtggaagaggcggcagcagctggccggaaatggaggccccccagagggcagcctggatgtgctgcagagctggtgtgagaagctggccgagatcatctggcagaaccggcagcagatccggcgggcagagcacctgtgccagcagctgcccatccctggccctgtggaggagatgctggccgaggtgaatgccaccatcacagacatcatcagcgccctggtgaccagcaccttcatcatcgagaagcagcccccccaggtgctgaagacccagaccaagtttgctgccaccgtgcggctgctggtgggcggcaagctgaatgtgcacatgaaccccccccaggtgaaggccaccatcatcagcgagcagcaggccaagagcctgctgaagaatgaaaacaccagaaatgaatgttctggagagatcctgaacaactgctgcgtgatggagtaccaccaggccaccggcaccctgagcgcccacttcaggaacatgagcctgaagaggatcaagagagctgacagaagaggagctgagagcgtgacagaggagaagttcaccgtgctgtttgagagccagttctctgtgggcagcaatgagctggtgttccaggtgaagaccctgagcctgcctgtggtggtgattgtgcacggcagccaggaccacaatgccacagccaccgtgctgtgggacaatgcctttgctgagcccggccgggtgccctttgctgtgcctgacaaggtgctgtggccccagctgtgtgaggccctgaacatgaagttcaaggccgaggtgcagagcaacagaggcctgaccaaggagaacctggtgttcctggcccagaagctgttcaacaacagcagcagccacctggaggactacagcggcctgtctgtgtcctggagccagttcaaccgggagaacctgcccggctggaactacaccttctggcagtggtttgatggagtgatggaggtgctgaagaagcaccacaagccccactggaatgatggcggctttgtgaacaagcagcaggcccatgacctgctgatcaacaagccagatggcaccttcctgctgcgcttcagtgacagcgagattggaggcatcaccatcgcctggaagtttgacagccctgagaggaacctgtggaacctgaagcccttcaccacccgggacttcagcatccgcagcctggccgaccggctgggggacctgagctacctgatctacgtgtttcctgaccggcccaaggatgaggtgttcagcaagtactacacccctgtgctggccaaggctgtggatggctacgtgaagccccagatcaagcaggtggtgcctgagtttgtgaatgccagcgcagatgctgggggcagcagcgccacctacatggaccaggcccccagccctgctgtgtgcccccaggccccctacaacatgtacccccagaacccagaccacgtgctggaccaggatggagaatttgacctggatgagaccatggatgtggcccggcacgtggaggagctgctgcggcggcccatggacagcctggacagccggctgagccccccagctggcctcttcaccagcgcccggggcagcctgtcctag

SEQ ID NO: 135673 - DNA, 2385 bp, Artificial Sequence
  derived and/or modified sequence
atggccggctggatccaggcccagcagctgcagggcgacgccctgcggcagatgcaggtgttatacggacaacatttcccaatcgaggtgcgccattatcttgctcagtggatcgagagccagccatgggatgccatcgacttggacaatcctcaggacagggcccaggctacccagcttctggagggccttgtgcaagagcttcagaaaaaagcagaacaccaggtcggtgaggacggtttcctgttaaaaatcaagcttggacattacgccacgcagcttcagaagacctacgataggtgtccgctggagctcgtgagatgcattagacatattctctataacgagcagcggttagtgagagaagctaataattgcagctctcctgcgggtatactggtggatgccatgtcccagaaacacttgcagataaaccagacgttcgaggaactgagactcgttactcaggataccgagaacgagttgaagaagttgcagcagacccaggagtacttcataatccagtatcaggagtccctccggatccaggcccagtttgcgcagctggcccagctgtctccgcaggaaaggttgagccgcgagactgccctgcagcagaagcaggtttctctggaagcttggttgcaaagggaagcccaaactctgcaacaataccgagtggagctggccgagaagcaccagaaaacactgcagctgttacgcaagcagcagactataatcctggatgacgaattgatccagtggaaacggagacagcaactcgcaggtaacggtggtccccccgaggggagccttgatgtgcttcaatcctggtgtgagaagctggctgagataatttggcaaaatagacagcagattcgtcgcgctgagcacttatgccagcagttgcccatcccaggacccgtggaagagatgcttgccgaagtgaacgcaaccattacagacataataagcgccctggtcacgagtacgtttataatagaaaaacagcctccccaagtgcttaaaacacagacaaaatttgccgcaacggtcaggttacttgtgggcggtaagttgaacgtgcatatgaatcctccccaggtcaaggcgacaattatcagcgagcagcaggccaaaagcctattgaaaaacgagaatacacgtaacgagtgttctggcgaaatcctgaataactgttgcgttatggagtaccaccaggctacaggaactttaagtgcccatttccgaaatatgagtctcaagcgcattaagcgtgctgataggagaggggccgaatcagttacagaagaaaagtttaccgtgctttttgaatcgcagttttccgtggggtctaacgagttggtcttccaggtgaaaacactcagcttaccagtggtggtaattgtccacgggagccaggatcacaacgccacagctacagttctctgggacaacgcctttgctgaacccgggcgagttccatttgcagttcctgacaaggtcctctggccgcagctttgtgaggccctgaacatgaagttcaaggccgaggttcagtcaaatcggggtctgacgaaggaaaacttagtatttcttgcgcaaaagctattcaacaactcctcctctcatctggaggactattcaggcctgtctgtctcctggtctcagtttaatcgggaaaacctacccggttggaactatacgttctggcaatggttcgacggcgtgatggaagtgttgaagaagcaccataaaccccactggaatgatggagcaatcctcggcttcgtaaataagcagcaagcccacgacctcctaataaacaaaccagacgggaccttcctcctccggttttctgatagcgagatagggggcatcacaatagcctggaaattcgatagtcccgaacgcaacctctggaaccttaagccttttactactcgggactttagcatacggtcactggcagatagactcggcgacctctcctatctgatttatgtcttccctgaccgtccaaaagatgaagtattttctaagtactatactccagtgctggctaaggctgtcgatggatacgtcaaaccccagatcaagcaggttgtgcccgagtttgtgaatgccagtgccgacgccggcggcagcagcgccacttacatggaccaagccccatcgcccgcagtatgccctcaggctccatacaacatgtacccccagaaccccgaccatgtgcttgaccaggatggcgagtttgacttggatgaaacaatggatgtcgcgaggcacgtcgaagagctgctgcgcaggccaatggacagcctcgactctaggctgtctcccccagcgggcctgtttacctcagcaaggggcagcttgtcttag

SEQ ID NO: 135674 - DNA, 2376 bp, Artificial Sequence
  derived and/or modified sequence
atggccggctggatccaggcccagcagctgcagggcgacgccctgaggcagatgcaggtgctgtatggccagcactttcctattgaagtccggcactacctggcccagtggattgaaagtcaaccctgggacgcaattgaccttgataatcctcaggacagggcccaggctacccagttacttgagggcctagtgcaggaactccagaaaaaagctgagcatcaggtaggagaggacgggttccttctgaaaatcaagctgggccattatgctacacagttacaaaagacatatgaccggtgtccactggaactggtacgctgcattcggcatatcttatataacgagcagcgactggtcagagaggctaacaattgcagctccccagctggcatcttagtcgatgcaatgagccagaagcacctgcagatcaaccagacttttgaagaactcaggttggtcacacaggacacggagaatgaattgaagaagctgcagcagacccaggagtatttcatcatacagtaccaagaaagcctcagaatacaggctcaatttgctcagctagcccagttgtcccctcaggagaggctgagtagagaaaccgccttacagcagaaacaggtatctctggaagcctggttgcaaagagaggcacagaccctccagcagtaccgcgtcgagctggcagagaagcatcaaaagacactccaacttctccgtaaacaacagactatcatcttggacgatgaactgattcagtggaagaggcgccagcaactggccggtaatggcggcccgccagagggcagcctcgacgtcctgcagagttggtgtgaaaagttggctgagattatctggcagaaccggcagcaaatccgacgggccgaacacttatgccagcagctgcccattcccggccctgtggaagagatgctggcagaagttaatgccactatcacagacatcatatcggctctggtgaccagcaccttcatcatcgaaaagcagccgcctcaagttttgaaaacccagacaaaattcgccgcaactgttaggttgctcgttggggggaagctgaacgtgcacatgaacccaccccaggtgaaggccaccatcataagtgaacagcaagccaaaagcctgctgaagaacgaaaacaccagaaatgagtgctcaggggaaatcctcaacaattgctgcgtcatggagtaccaccaggctaccggtacactgtccgctcactttagaaacatgtccttaaagagaataaagagggccgatagacgcggggccgagtcagtcaccgaggaaaaattcaccgtgctgtttgagtcacagttctccgtgggaagtaatgagctggtctttcaagtgaagaccctgtctttgccggttgtggttatcgttcacgggagccaagatcacaatgcaactgctacagtcctctgggataatgcattcgccgagccaggacgagtacctttcgccgtccccgataaggtgctgtggccacaattgtgtgaggccctgaacatgaagttcaaggcagaggtgcagagtaatcgtggcctgacaaaggagaacctagtttttttggcccagaagctgttcaacaattcttcctcacacttggaagactacagcgggctctccgtctcatggtctcagtttaatagagagaacttgcctggctggaactatactttttggcagtggtttgatggcgtcatggaagttctcaaaaagcatcacaagccacattggaatgacggtggcttcgtcaataagcaacaagcccacgacctcctgatcaacaagcccgatggcacatttcttctgcgcttcagcgatagcgagatcggcggaatcaccatagcttggaaattcgacagtcccgagaggaacctgtggaatttaaaacccttcacaacgcgggacttctcaattagatccttggcagaccgcctcggcgacttgtcatacctgatttacgtttttccggaccgtccaaaggacgaggttttctccaaatattataccccagtgctcgccaaagccgtggatggctatgtcaagccacagattaagcaggtcgtccctgaatttgtgaacgcgtcagccgatgccggcggaagctctgcaacctacatggaccaagccccttcccctgctgtgtgccctcaagccccatacaacatgtatccacagaatcctgaccacgtgctggatcaggacggagaattcgatttagacgagaccatggacgtcgcccggcacgtcgaggaattgctgcgtaggcccatggactcactggatagccgtctgtcgccccccgcagggctctttaccagtgcgcggggctccttgtcatag

SEQ ID NO: 135675 - DNA, 2385 bp, Artificial Sequence
  derived and/or modified sequence
atggcaggctggatccaagctcaacagctgcagggagacgcactgagacagatgcaggttctttatggccagcactttcccatcgaggtgcgccactacctggctcagtggatcgaaagccagccttgggacgcaatcgacttagacaatcctcaggacagggctcaggctacacagcttctcgagggactcgtgcaggagctgcaaaagaaagctgaacaccaggtcggggaggatggttttctgctgaaaatcaaacttggtcattatgctactcaactgcagaaaacctatgaccgctgcccactcgaactggtacgctgtattagacatattctgtacaatgagcagaggctcgtccgcgaagctaacaactgctcaagtcctgccggaattctagtcgatgcgatgtcacaaaagcacttgcagatcaatcagacattcgaagaactcaggctggtgactcaagacacggagaacgagctgaaaaaactgcagcagacacaggagtattttattattcagtatcaagaatcgttaaggatccaagcacagttcgcacagttagcccaactgtcaccccaggagagactgtccagagaaactgccctgcaacagaaacaggtgtctctagaggcctggcttcagagagaggcccagaccctgcaacaataccgggtggaacttgccgagaagcaccagaagacattacagttgctccgcaagcaacagacgatcattttagacgatgaattgattcagtggaaacgcagacaacagcttgctggcaacgggggtcccccagaagggagtctcgatgtgctgcagtcttggtgcgagaagctggccgagataatctggcaaaatcgtcaacagattcgcagagcggagcacctctgtcagcagctgcctattcctggtccggtggaggagatgctcgcagaagtaaacgcaaccatcactgatattatcagcgccctggtgacctctaccttcattattgagaaacagcctccccaggtattgaaaacgcaaacgaaatttgctgccaccgtcagattgctagtcggtggcaaattaaacgtccacatgaacccacctcaagtgaaggccacgattatatccgaacagcaggctaagagtctgctgaagaacgagaataccaggaacgagtgttccggggagatactcaataattgttgtgtgatggaatatcatcaggctacgggtaccctctctgcacattttcgtaacatgtcgctgaagcgtattaagcgggctgaccggagaggcgcagagtcagtgactgaagaaaagtttaccgttctgttcgaatcacaattttccgtgggatcaaacgaattagtgttccaggtcaagactttgtccttgccagtggtcgtcatcgtccacggatctcaagaccacaacgccacagccaccgtgctctgggataatgcattcgctgagcctggcagggtgcccttcgcagtccccgataaggtgctgtggcctcagctgtgcgaggctctgaatatgaaattcaaggcagaggtgcagtctaatagaggattgactaaagaaaatctcgtgttcctggctcagaaactgttcaataatagttcaagccatttagaggactactctggcctgtccgtgagctggtctcagtttaaccgcgagaacctccctggctggaattacactttctggcagtggtttgatggagtcatggaggtgctcaaaaaacatcacaagcctcactggaatgatggcgctatcctggggttcgtgaataagcagcaggcccatgatctactgatcaacaagcccgacgggaccttcctcttgcggttttccgattcagagattggagggattacgatcgcctggaaattcgatagccctgagcggaatctgtggaacctgaagccctttacaaccagggacttctctatccggagcctcgctgacagactgggcgacctgagctaccttatctatgtcttccccgatcgcccaaaagacgaggtcttttcaaagtactacacgcccgtattggccaaagccgtggacggttacgtgaagccacagatcaagcaagtggtgccggaattcgttaatgcaagcgcggacgccggtggatctagtgctacttatatggatcaagcaccgagtcctgccgtttgtccacaggctccatacaatatgtatcctcaaaacccagaccacgtccttgatcaggatggggagttcgacttggacgaaactatggacgttgcacggcacgtggaggagttgctgcggaggccaatggactcattggatagccggctgagccctcccgctgggctcttcactagcgccaggggtagcctgagctag

SEQ ID NO: 135676 - DNA, 2376 bp, Artificial Sequence
  derived and/or modified sequence
atggctggctggattcaggcccagcagctccaaggcgacgcccttaggcagatgcaggtcttgtatgggcagcatttccctatcgaggtgcggcattacctggcacaatggatcgaatcgcagccttgggatgctattgaccttgacaacccacaggatcgagcccaggcaactcagctcctcgaaggcctggtacaggagctacagaaaaaggccgaacatcaggtgggcgaggatggctttctgctcaaaattaagctcggccattacgccacacagctgcagaaaacctatgatagatgcccgctggagctggtgcgatgtattcgacacatcctatacaatgaacagaggctggtgcgcgaagctaataattgtagtagccccgcagggatcctcgttgatgctatgtcacagaagcacctacagataaatcagacattcgaggagctccgactggtcacccaggacactgagaacgagctgaagaaactccagcaaacccaagaatatttcattattcagtaccaggagtcactgaggattcaggctcagtttgcccagctggcacaactcagccctcaggagcgcttgagccgggagaccgccctccaacagaagcaggtctcactggaagcatggttacagcgcgaggcacagacactgcagcagtacagggtcgagcttgccgagaagcaccagaagaccctgcaacttctcaggaaacagcagacaatcatccttgacgacgaactgatccaatggaagagaaggcagcaactcgccggaaacgggggaccccctgagggttccctcgacgtgctgcagtcctggtgtgagaagctggccgagattatttggcagaacaggcagcagatccgcagggcagaacatctttgtcagcagctccctattcctggccctgttgaagaaatgttagcagaggttaacgcaaccatcaccgacataatttccgccctggtgacgtcaacatttatcatagagaaacagccgcctcaggtgctgaagacacagacgaagttcgccgctacagtcagactgcttgtggggggaaaattgaacgtgcatatgaaccccccacaggtgaaggccacaattatctcagagcagcaggctaaaagcttgctgaaaaacgagaatacacgcaatgagtgtagtggtgagatactgaacaactgttgtgtgatggagtaccaccaggctactggaactctcagtgcgcattttagaaacatgagcctgaagaggattaaacgcgcagaccggaggggggcagagagcgtgacagaggagaaattcactgtgctgttcgagtcccagttctccgtaggatctaacgagctcgtttttcaggtaaagacactgtcgctgcccgtggtcgttatcgtacacgggtcccaggatcataatgccactgcgacggtcttatgggataatgcgtttgcagaacccggtcgagtaccgtttgcggtacccgataaagtgctgtggccacagctttgtgaagctctgaacatgaagttcaaagccgaagtccaatccaaccggggtctgaccaaagaaaatctcgtgttcctggcccagaaactgttcaacaatagtagctctcatctcgaagattactctggcctatctgtcagttggtcccagttcaacagggagaatctgcctggttggaactacacattttggcagtggttcgatggagtaatggaggttcttaaaaagcaccacaagcctcattggaatgatgggggatttgtgaataaacagcaggctcacgacctgttgattaacaagccagatggcacatttctccttcggtttagcgattccgaaattggcggaattaccattgcttggaaatttgactccccagagcgaaacttgtggaatctgaagccctttactactcgggacttctctatcaggagtctggccgacaggcttggggatctgagctatttgatatacgtctttcctgatcgaccgaaggacgaggtgtttagcaaatactacacccctgttctggctaaagccgtagatggatacgtgaaaccacagattaagcaggtcgtgccggagtttgtcaatgcctctgctgacgcgggaggcagttccgccacgtatatggaccaggcacctagccccgcagtatgcccccaggccccttacaatatgtatccccagaaccctgaccacgtgctcgaccaggacggggaatttgatctagacgaaactatggatgtggctaggcacgtggaagagctgctccgcaggcccatggatagcctggatagtcgactgagcccaccagctggtctgttcacatcagcccgtggctctctcagctag

SEQ ID NO: 135677 - DNA, 4301 bp, Artificial Sequence
  derived and/or modified sequence
agacaggatattcactgctgtggcaaggcctgtagagagtttcgaagttaggaggactcaagacggtccctccctggacttttctgaaggggctcaaaagatgacacgcgccagagctggaaggcgtcgccaattggtccacttttccctcctccctttttgcggatgagaaaactgaggcccaggtttgggatttccagagcccgggatttcccggcaacgcccgacaaccacattcccccggctattctgacccgccccggttccgggacgctccctgggagccgccgccgagggcctgctgggactcccgggggaccccgccgtcggggcagcccccacgcccggcgccgcccgccgggaacggccgccgctgttgcgcacttgcaggggagccggcgactgagggcgaggcagggagggagcaagcggggctgggagggctgctggcgcgggctcgcgcgctgtgtatggtctatcgcaggcagctgacctttgaggaggaaatcgctgctctccgctccttcctgtagtaacagccgccgctgccgccgccgccaggaaccccggccgggagcgagagccgcggggcgcagagccggcccggctgccggacggtgcggccccaccaggtgaacggccatggcgggctggatccaggcccagcagctgcagggagacgcgctgcgccagatgcaggtgctgtacggccagcacttccccatcgaggtccggcactacttggcccagtggattgagagccagccatgggatgccattgacttggacaatccccaggacagagcccaagccacccagctcctggagggcctggtgcaggagctgcagaagaaggcggagcaccaggtgggggaagatgggtttttactgaagatcaagctggggcactacgccacgcagctccagaaaacatatgaccgctgccccctggagctggtccgctgcatccggcacattctgtacaatgaacagaggctggtccgagaagccaacaattgcagctctccggctgggatcctggttgacgccatgtcccagaagcaccttcagatcaaccagacatttgaggagctgcgactggtcacgcaggacacagagaatgagctgaagaaactgcagcagactcaggagtacttcatcatccagtaccaggagagcctgaggatccaagctcagtttgcccagctggcccagctgagcccccaggagcgtctgagccgggagacggccctccagcagaagcaggtgtctctggaggcctggttgcagcgtgaggcacagacactgcagcagtaccgcgtggagctggccgagaagcaccagaagaccctgcagctgctgcggaagcagcagaccatcatcctggatgacgagctgatccagtggaagcggcggcagcagctggccgggaacggcgggccccccgagggcagcctggacgtgctacagtcctggtgtgagaagttggccgagatcatctggcagaaccggcagcagatccgcagggctgagcacctctgccagcagctgcccatccccggcccagtggaggagatgctggccgaggtcaacgccaccatcacggacattatctcagccctggtgaccagcacattcatcattgagaagcagcctcctcaggtcctgaagacccagaccaagtttgcagccaccgtacgcctgctggtgggcgggaagctgaacgtgcacatgaatcccccccaggtgaaggccaccatcatcagtgagcagcaggccaagtctctgcttaaaaatgagaacacccgcaacgagtgcagtggtgagatcctgaacaactgctgcgtgatggagtaccaccaagccacgggcaccctcagtgcccacttcaggaacatgtcactgaagaggatcaagcgtgctgaccggcggggtgcagagtccgtgacagaggagaagttcacagtcctgtttgagtctcagttcagtgttggcagcaatgagcttgtgttccaggtgaagactctgtccctacctgtggttgtcatcgtccacggcagccaggaccacaatgccacggctactgtgctgtgggacaatgcctttgctgagccgggcagggtgccatttgccgtgcctgacaaagtgctgtggccgcagctgtgtgaggcgctcaacatgaaattcaaggccgaagtgcagagcaaccggggcctgaccaaggagaacctcgtgttcctggcgcagaaactgttcaacaacagcagcagccacctggaggactacagtggcctgtccgtgtcctggtcccagttcaacagggagaacttgccgggctggaactacaccttctggcagtggtttgacggggtgatggaggtgttgaagaagcaccacaagccccactggaatgatggggccatcctaggttttgtgaataagcaacaggcccacgacctgctcatcaacaagcccgacgggaccttcttgttgcgctttagtgactcagaaatcgggggcatcaccatcgcctggaagtttgactccccggaacgcaacctgtggaacctgaaaccattcaccacgcgggatttctccatcaggtccctggctgaccggctgggggacctgagctatctcatctatgtgtttcctgaccgccccaaggatgaggtcttctccaagtactacactcctgtgctggctaaagctgttgatggatatgtgaaaccacagatcaagcaagtggtccctgagtttgtgaatgcatctgcagatgctgggggcagcagcgccacgtacatggaccaggccccctccccagctgtgtgcccccaggctccctataacatgtacccacagaaccctgaccatgtactcgatcaggatggagaattcgacctggatgagaccatggatgtggccaggcacgtggaggaactcttacgccgaccaatggacagtcttgactcccgcctctcgccccctgccggtcttttcacctctgccagaggctccctctcatgaatgtttgaatcccacgcttctctttggaaacaatatgcaatgtgaagcggtcgtgttgtgagtttagtaaggctgtgtacactgacacctttgcaggcatgcatgtgcttgtgtgtgtgtgtgtgtgtgtgtccttgtgcatgagctacgcctgcctcccctgtgcagtcctgggatgtggctgcagcagcggtggcctcttttcagatcatggcatccaagagtgcgccgagtctgtctctgtcatggtagagaccgagcctctgtcactgcaggcactcaatgcagccagacctattcctcctgggcccctcatctgctcagcagctatttgaatgagatgattcagaaggggaggggagacaggtaacgtctgtaagctgaagtttcactccggagtgagaagctttgccctcctaagagagagagacagagagacagagagagagaaagagagagtgtgtgggtctatgtaaatgcatctgtcctcatgtgttgatgtaaccgattcatctctcagaagggaggctggggttcattttcgagtagtattttatactttagtgaacgtggactccagactctctgtgaaccctatgagagcgcgtctgggcccggccatgtccttagcacaggggggccgccggtttgagtgagggtttctgagctgctctgaattagtccttgcttggctgcttggccttgggcttcattcaagtctatgatgctgttgcccacgtttcccgggatatatattctctcccctccgttgggccccagccttctttgcttgcctctctgtttgtaaccttgtcgacaaagaggtagaaaagattgggtctaggatatggtgggtggacaggggccccgggacttggagggttggtcctcttgcctcctggaaaaaacaaaaacaaaaaactgcagtgaaagacaagctgcaaatcagccatgtgctgcgtgcctgtggaatctggagtgaggggtaaaagctgatctggtttgactccgctggaggtggggcctggagcaggccttgcgctgttgcgtaactggctgtgttctggtgaggccttgctcccaaccccacacgctcctccctctgaggctgtaggactcgcagtcaggggcagctgaccatggaagattgagagcccaaggtttaaacttctctgaagggaggtggggatgagaagaggggtttttttgtactttgtacaaagaccacacatttgtgtaaacagtgttttggaataaaatatttttttcataaa

SEQ ID NO: 135678 - DNA, 3755 bp, Artificial Sequence
  derived and/or modified sequence
gtaacagccgccgctgccgccgccgccaggaaccccggccgggagcgagagccgcggggcgcagagccggcccggctgccggacggtgcggccccaccaggtgaacggccatggcgggctggatccaggcccagcagctgcagggagacgcgctgcgccagatgcaggtgctgtacggccagcacttccccatcgaggtccggcactacttggcccagtggattgagagccagccatgggatgccattgacttggacaatccccaggacagagcccaagccacccagctcctggagggcctggtgcaggagctgcagaagaaggcggagcaccaggtgggggaagatgggtttttactgaagatcaagctggggcactacgccacgcagctccagaaaacatatgaccgctgccccctggagctggtccgctgcatccggcacattctgtacaatgaacagaggctggtccgagaagccaacaattgcagctctccggctgggatcctggttgacgccatgtcccagaagcaccttcagatcaaccagacatttgaggagctgcgactggtcacgcaggacacagagaatgagctgaagaaactgcagcagactcaggagtacttcatcatccagtaccaggagagcctgaggatccaagctcagtttgcccagctggcccagctgagcccccaggagcgtctgagccgggagacggccctccagcagaagcaggtgtctctggaggcctggttgcagcgtgaggcacagacactgcagcagtaccgcgtggagctggccgagaagcaccagaagaccctgcagctgctgcggaagcagcagaccatcatcctggatgacgagctgatccagtggaagcggcggcagcagctggccgggaacggcgggccccccgagggcagcctggacgtgctacagtcctggtgtgagaagttggccgagatcatctggcagaaccggcagcagatccgcagggctgagcacctctgccagcagctgcccatccccggcccagtggaggagatgctggccgaggtcaacgccaccatcacggacattatctcagccctggtgaccagcacattcatcattgagaagcagcctcctcaggtcctgaagacccagaccaagtttgcagccaccgtacgcctgctggtgggcgggaagctgaacgtgcacatgaatcccccccaggtgaaggccaccatcatcagtgagcagcaggccaagtctctgcttaaaaatgagaacacccgcaacgagtgcagtggtgagatcctgaacaactgctgcgtgatggagtaccaccaagccacgggcaccctcagtgcccacttcaggaacatgtcactgaagaggatcaagcgtgctgaccggcggggtgcagagtccgtgacagaggagaagttcacagtcctgtttgagtctcagttcagtgttggcagcaatgagcttgtgttccaggtgaagactctgtccctacctgtggttgtcatcgtccacggcagccaggaccacaatgccacggctactgtgctgtgggacaatgcctttgctgagccgggcagggtgccatttgccgtgcctgacaaagtgctgtggccgcagctgtgtgaggcgctcaacatgaaattcaaggccgaagtgcagagcaaccggggcctgaccaaggagaacctcgtgttcctggcgcagaaactgttcaacaacagcagcagccacctggaggactacagtggcctgtccgtgtcctggtcccagttcaacagggagaacttgccgggctggaactacaccttctggcagtggtttgacggggtgatggaggtgttgaagaagcaccacaagccccactggaatgatggtggttttgtgaataagcaacaggcccacgacctgctcatcaacaagcccgacgggaccttcttgttgcgctttagtgactcagaaatcgggggcatcaccatcgcctggaagtttgactccccggaacgcaacctgtggaacctgaaaccattcaccacgcgggatttctccatcaggtccctggctgaccggctgggggacctgagctatctcatctatgtgtttcctgaccgccccaaggatgaggtcttctccaagtactacactcctgtgctggctaaagctgttgatggatatgtgaaaccacagatcaagcaagtggtccctgagtttgtgaatgcatctgcagatgctgggggcagcagcgccacgtacatggaccaggccccctccccagctgtgtgcccccaggctccctataacatgtacccacagaaccctgaccatgtactcgatcaggatggagaattcgacctggatgagaccatggatgtggccaggcacgtggaggaactcttacgccgaccaatggacagtcttgactcccgcctctcgccccctgccggtcttttcacctctgccagaggctccctctcatgaatgtttgaatcccacgcttctctttggaaacaatatgcaatgtgaagcggtcgtgttgtgagtttagtaaggctgtgtacactgacacctttgcaggcatgcatgtgcttgtgtgtgtgtgtgtgtgtgtgtccttgtgcatgagctacgcctgcctcccctgtgcagtcctgggatgtggctgcagcagcggtggcctcttttcagatcatggcatccaagagtgcgccgagtctgtctctgtcatggtagagaccgagcctctgtcactgcaggcactcaatgcagccagacctattcctcctgggcccctcatctgctcagcagctatttgaatgagatgattcagaaggggaggggagacaggtaacgtctgtaagctgaagtttcactccggagtgagaagctttgccctcctaagagagagagacagagagacagagagagagaaagagagagtgtgtgggtctatgtaaatgcatctgtcctcatgtgttgatgtaaccgattcatctctcagaagggaggctggggttcattttcgagtagtattttatactttagtgaacgtggactccagactctctgtgaaccctatgagagcgcgtctgggcccggccatgtccttagcacaggggggccgccggtttgagtgagggtttctgagctgctctgaattagtccttgcttggctgcttggccttgggcttcattcaagtctatgatgctgttgcccacgtttcccgggatatatattctctcccctccgttgggccccagccttctttgcttgcctctctgtttgtaaccttgtcgacaaagaggtagaaaagattgggtctaggatatggtgggtggacaggggccccgggacttggagggttggtcctcttgcctcctggaaaaaacaaaaacaaaaaactgcagtgaaagacaagctgcaaatcagccatgtgctgcgtgcctgtggaatctggagtgaggggtaaaagctgatctggtttgactccgctggaggtggggcctggagcaggccttgcgctgttgcgtaactggctgtgttctggtgaggccttgctcccaaccccacacgctcctccctctgaggctgtaggactcgcagtcaggggcagctgaccatggaagattgagagcccaaggtttaaacttctctgaagggaggtggggatgagaagaggggtttttttgtactttgtacaaagaccacacatttgtgtaaacagtgttttggaataaaatatttttttc

SEQ ID NO: 135679 - protein, 62 aa, Artificial Sequence
  derived and/or modified sequence
MKFLVFAFILALMVSMIGADSSEEKFLRRIGRFGYGYGPYQPVPEQPLYPQPYQPQYQQYTF

SEQ ID NO: 135680 - DNA, 189 bp, Artificial Sequence
  derived and/or modified sequence
atgaagttcctggtgttcgccttcatcctggccctgatggtgagcatgatcggcgccgacagcagcgaggagaagttcctgagaagaatcggcagattcggctacggctacggcccctaccagcccgtgcccgagcagcccctgtacccccagccctaccagccccagtaccagcagtacaccttctag

SEQ ID NO: 135681 - DNA, 189 bp, Artificial Sequence
  derived and/or modified sequence
atgaaattcctagtgttcgcattcatcctcgccctgatggttagcatgataggagcagacagcagtgaagaaaaattcctccggaggatcggtaggtttggctatggttatggaccttaccagcctgtccccgagcagccattgtaccctcagccctatcagccccagtatcaacagtatacattctag

SEQ ID NO: 135682 - DNA, 189 bp, Artificial Sequence
  derived and/or modified sequence
atgaagttcctggtgtttgccttcatcctggccctgatggtgtccatgattggagctgacagcagcgaggagaagttcctgcggcgcatcggccgcttcggctacggctacggcccctaccagcctgtgcctgagcagcccctgtacccccagccctaccagccccagtaccagcagtacaccttctag

SEQ ID NO: 135683 - DNA, 189 bp, Artificial Sequence
  derived and/or modified sequence
atgaagttcctggtgttcgccttcatcctggccctgatggtgagcatgatcggcgcggatagctccgaggaaaaattccttagaaggattgggcgatttggctacggttatggaccctaccaacccgtgcctgaacagccactctatcctcagccgtaccagcctcagtatcagcaatacacattctag

SEQ ID NO: 135684 - DNA, 189 bp, Artificial Sequence
  derived and/or modified sequence
atgaagttcctggtgtttgcttttatcctggccctgatggttagcatgataggggctgattcttcggaggagaagttcttgcgccgaatcggacggttcggatacggatatggcccttatcagccagtgccagaacagccactgtatccgcagccttaccaaccacagtaccagcaatataccttttag

SEQ ID NO: 135685 - DNA, 598 bp, Artificial Sequence
  derived and/or modified sequence
agagtgtttaaatacattggccctctagggtagcacatcatctcttgaagcttcacttcaacttcactacttctgtagtctcatcttgagtaaaagagaacccagccaactatgaagttccttgtctttgccttcatcttggctctcatggtttccatgattggagctgattcatctgaagagaaatttttgcgtagaattggaagattcggttatgggtatggcccttatcagccagttccagaacaaccactatacccacaaccataccaaccacaataccaacaatataccttttaatatcatcagtaactgcaggacatgattattgaggcttgattggcaaatacgacttctacatccatattctcatctttcataccatatcacactactaccactttttgaagaatcatcaaagagcaatgcaaatgaaaaacactataatttactgtatactctttgtttcaggatacttgccttttcaattgtcacttgatgatataattgcaatttaaactgttaagctgtgttcagtactgtttctgaataatagaaatcacttctctaaaagcaataaatttcaagcacattttta

SEQ ID NO: 135686 - protein, 247 aa, Artificial Sequence
  derived and/or modified sequence
MLQNSAVLLVLVISASATHEAEQNDSVSPRKSRVAAQNSAEVVRCLNSALQVGCGAFACLENSTCDTDGMYDICKSFLYSAAKFDTQGKAFVKESLKCIANGVTSKVFLAIRRCSTFQRMIAEVQEECYSKLNVCSIAKRNPEAITEVVQLPNHFSNRYYNRLVRSLLECDEDTVSTIRDSLMEKIGPNMASLFHILQTDHCAQTHPRADFNRRRTNEPQKLKVLLRNLRGEEDSPSHIKRTSHESA

SEQ ID NO: 135687 - protein, 178 aa, Artificial Sequence
  derived and/or modified sequence
MYDICKSFLYSAAKFDTQGKAFVKESLKCIANGVTSKVFLAIRRCSTFQRMIAEVQEECYSKLNVCSIAKRNPEAITEVVQLPNHFSNRYYNRLVRSLLECDEDTVSTIRDSLMEKIGPNMASLFHILQTDHCAQTHPRADFNRRRTNEPQKLKVLLRNLRGEEDSPSHIKRTSHESA

SEQ ID NO: 135688 - DNA, 744 bp, Artificial Sequence
  derived and/or modified sequence
atgctgcagaacagcgccgtgctgctggtgctggtgatcagcgccagcgccacccacgaggccgagcagaacgacagcgtgagccccagaaagagcagagtggccgcccagaacagcgccgaggtggtgagatgcctgaacagcgccctgcaggtgggctgcggcgccttcgcctgcctggagaacagcacctgcgacaccgacggcatgtacgacatctgcaagagcttcctgtacagcgccgccaagttcgacacccagggcaaggccttcgtgaaggagagcctgaagtgcatcgccaacggcgtgaccagcaaggtgttcctggccatcagaagatgcagcaccttccagagaatgatcgccgaggtgcaggaggagtgctacagcaagctgaacgtgtgcagcatcgccaagagaaaccccgaggccatcaccgaggtggtgcagctgcccaaccacttcagcaacagatactacaacagactggtgagaagcctgctggagtgcgacgaggacaccgtgagcaccatcagagacagcctgatggagaagatcggccccaacatggccagcctgttccacatcctgcagaccgaccactgcgcccagacccaccccagagccgacttcaacagaagaagaaccaacgagccccagaagctgaaggtgctgctgagaaacctgagaggcgaggaggacagccccagccacatcaagagaaccagccacgagagcgcctag

SEQ ID NO: 135689 - DNA, 537 bp, Artificial Sequence
  derived and/or modified sequence
atgtacgacatctgcaagagcttcctgtacagcgccgccaagttcgacacccagggcaaggccttcgtgaaggagagcctgaagtgcatcgccaacggcgtgaccagcaaggtgttcctggccatcagaagatgcagcaccttccagagaatgatcgccgaggtgcaggaggagtgctacagcaagctgaacgtgtgcagcatcgccaagagaaaccccgaggccatcaccgaggtggtgcagctgcccaaccacttcagcaacagatactacaacagactggtgagaagcctgctggagtgcgacgaggacaccgtgagcaccatcagagacagcctgatggagaagatcggccccaacatggccagcctgttccacatcctgcagaccgaccactgcgcccagacccaccccagagccgacttcaacagaagaagaaccaacgagccccagaagctgaaggtgctgctgagaaacctgagaggcgaggaggacagccccagccacatcaagagaaccagccacgagagcgcctag

SEQ ID NO: 135690 - DNA, 744 bp, Artificial Sequence
  derived and/or modified sequence
atgctacagaacagtgctgttttgctggttctggtcatttccgcctccgccactcacgaagcagagcaaaatgattccgtgtccccgagaaagtccagagtggccgcgcaaaatagtgccgaggtggtgcggtgcctgaactccgctctgcaggtcggctgtggcgcatttgcctgtctggaaaattcaacctgtgacaccgatggaatgtacgatatttgtaaatccttcctatacagtgccgccaaatttgacacccaaggtaaagccttcgtcaaggagagtctcaagtgtatagctaacggagtgacaagcaaggtgttcttggccattcgacgctgctccactttccagaggatgattgcagaagttcaagaggaatgttattccaaactcaacgtgtgcagcatcgctaagagaaatcctgaagctattacagaggtagttcagcttcccaatcacttcagtaatcgctattataatcgccttgttcggagtctgttggaatgtgacgaagacaccgttagcactatccgcgacagccttatggagaaaattggaccaaatatggcaagcctcttccatatcctccagactgatcattgcgctcaaacccacccacgggctgacttcaacagacgcagaaccaacgaacctcaaaagctgaaggtcctgctgagaaatttgagaggtgaagaagactctccctcccatattaaaagaacgtcccacgaatcagcgtag

SEQ ID NO: 135691 - DNA, 537 bp, Artificial Sequence
  derived and/or modified sequence
atgtacgacatttgtaaatcctttctctactccgctgccaagtttgatacccagggaaaggctttcgttaaggagagcctgaagtgtatcgcaaacggcgtaacgagcaaagtcttcttggccataaggagatgctctaccttccaaagaatgatcgctgaggtgcaggaggaatgttactctaagttgaatgtctgctccatcgcaaaaagaaatccagaagctatcacagaagtggttcagcttcctaaccatttctccaaccggtattacaataggttggtgagaagcctgcttgagtgtgatgaggacacagtgtccaccatacgtgattctctcatggaaaagattgggcccaacatggcctctctcttccatatccttcaaactgaccattgcgcccagacacatccccgagcagacttcaataggagacgaaccaacgagccgcagaagctgaaagttctgctcaggaacctacgcggcgaggaggactcaccaagtcacattaagaggacatctcacgagagtgcttag

SEQ ID NO: 135692 - DNA, 537 bp, Artificial Sequence
  derived and/or modified sequence
atgtatgatatctgtaaatccttcctgtatagcgcggctaagttcgacacccaggggaaagcttttgtgaaagaaagcctgaaatgtatcgccaatggggtgactagtaaggtcttccttgctatacgtcgctgttctacattccagaggatgatcgcggaggtgcaggaggaatgctattcgaaactcaacgtgtgcagcatcgcaaagagaaaccctgaggccattacagaggtggttcagctccctaaccatttctccaaccgttattacaaccggctggtgagaagcctcctcgagtgcgacgaggataccgtgagcacaattcgggattccttgatggagaagatcggccctaatatggcttcactatttcacatcctccagacggatcattgtgcccaaactcatccccgggccgattttaacaggcggagaacgaacgagccccagaagttaaaggtactcctgagaaacctccgcggagaggaagattctccatcccacattaagaggacctctcatgaatctgcctag

SEQ ID NO: 135693 - DNA, 744 bp, Artificial Sequence
  derived and/or modified sequence
atgctgcagaacagcgctgtgctgctggtgctggtgatcagcgccagcgccacccatgaagctgagcagaatgacagcgtgagccccaggaagagccgggtggccgcccagaacagcgctgaggtggtgcgctgcctgaacagcgccctgcaggtgggctgtggggcctttgcctgcctggagaacagcacctgtgacacagatggcatgtatgacatctgcaagagcttcctgtacagcgctgccaagtttgacacccagggcaaggcctttgtgaaggagagcctgaagtgcatcgccaatggagtgaccagcaaggtgttcctggccatccgccgctgcagcaccttccagaggatgattgctgaggtgcaggaggagtgctacagcaagctgaatgtgtgcagcatcgccaagaggaaccctgaggccatcacagaggtggtgcagctgcccaaccacttcagcaaccgctactacaaccggctggtgcgcagcctgctggagtgtgatgaggacacagtgtccaccatccgggacagcctgatggagaagattggccccaacatggccagcctcttccacatcctgcagacagaccactgtgcccagacccaccccagggctgacttcaacagaagaaggaccaatgagccccagaagctgaaggtgctgctgaggaacctgcggggggaggaggacagccccagccacatcaagaggaccagccatgagagcgcctag

SEQ ID NO: 135694 - DNA, 537 bp, Artificial Sequence
  derived and/or modified sequence
atgtatgacatctgcaagagcttcctgtacagcgctgccaagtttgacacccagggcaaggcctttgtgaaggagagcctgaagtgcatcgccaacggggtgaccagcaaggtgttcctggccatccgccgctgcagcaccttccagaggatgattgctgaggtgcaggaggagtgctacagcaagctgaatgtgtgcagcatcgccaagagaaatcctgaggccatcacagaggtggtgcagctgcccaaccacttcagcaaccgctactacaaccggctggtgcgcagcctgctggagtgtgatgaagatactgtgtccaccatccgggacagcctgatggagaagattggccccaacatggccagcctcttccacatcctgcagacagaccactgtgcccagacccaccccagggctgacttcaacagaagaaggaccaatgagccccagaagctgaaggtgctgctgaggaacctgcggggggaggaggacagccccagccacatcaagaggaccagccatgaaagtgcctag

SEQ ID NO: 135695 - DNA, 744 bp, Artificial Sequence
  derived and/or modified sequence
atgctgcagaacagcgccgtgctgctggtgctggtgatcagcgcctctgctacacacgaggccgagcaaaatgactcggtgtcacctagaaaaagtagggttgctgctcagaactctgcggaggtagtaaggtgtttgaactcggcgcttcaggtgggctgtggcgccttcgcatgtttggaaaatagcacttgtgacacagacggtatgtacgatatctgcaaatctttcctctacagcgctgccaaatttgatactcaggggaaagcgttcgttaaggagtccctgaagtgcatagcgaatggagtcaccagcaaagtgttcctcgctatcaggagatgcagcacctttcagagaatgattgcagaagtgcaggaagaatgttacagtaagttaaatgtgtgcagcatcgcgaagaggaaccctgaggctatcactgaggttgtccagctgcccaaccatttttcaaaccgttattacaatcgactggtgagatccctgctcgaatgtgatgaagataccgtttccacaatccgggatagcctaatggaaaagattgggcccaacatggccagcctctttcatattctgcagaccgaccactgtgctcagacccaccctcgagcggacttcaaccggcgtcgtacaaacgaacctcaaaaactgaaggtgctgctgcgcaatctaagaggcgaagaggattccccatcccatataaaacgcacctcacatgaaagcgcctag

SEQ ID NO: 135696 - DNA, 537 bp, Artificial Sequence
  derived and/or modified sequence
atgtacgacatctgcaagagcttcctgtacagcgccgccaagttcgatacccagggaaaagcctttgtgaaggaatcccttaaatgcattgccaacggggtgacaagcaaagtctttctcgcgattcgccgctgttccaccttccagcggatgatagcagaggtacaggaagaatgctactcgaaactgaacgtctgtagcatagcgaaaaggaatcccgaagctataaccgaagtggtgcaactgcctaatcatttctcgaacaggtattacaatagactagtgcgtagccttcttgagtgtgacgaagataccgtatccacaatccgcgactccttgatggagaaaattggccccaatatggcttctctgtttcatatccttcagacagatcattgcgcccagacacacccccgagccgacttcaaccggcggcgcacgaacgagccacagaaacttaaagtgctcctgcgtaatctaaggggcgaggaagactcaccttcacacattaagcgaacctcgcatgagtccgcttag

SEQ ID NO: 135697 - DNA, 537 bp, Artificial Sequence
  derived and/or modified sequence
atgtacgacatctgcaagagcttcctgtacagcgccgccaagttcgacactcagggtaaggcatttgttaaagaaagcctgaagtgcatagctaacggcgtcaccagcaaagtgtttctggccattcgaagatgttccacatttcagcgcatgatcgctgaagtccaggaggagtgctattctaaattgaacgtgtgtagtatcgctaagcgcaatccagaggccatcacagaggtggtgcaattacctaaccatttttctaatagatactacaatcgcttagtaagatcccttctagaatgcgacgaggataccgtctctacaatcagagactcactaatggaaaagataggcccaaacatggcgtcacttttccatattctccaaactgaccattgcgcccagactcatcctcgcgctgatttcaaccgtagacggacaaatgagccgcagaagctgaaagtgcttctgagaaaccttcgcggcgaggaggactccccatcacatataaagcgtacaagtcacgagagcgcttag

SEQ ID NO: 135698 - DNA, 744 bp, Artificial Sequence
  derived and/or modified sequence
atgttacagaattccgccgttcttctggtgctagtcatatcagctagtgcaacacatgaggccgagcagaatgatagcgtgagtcctcggaaaagtagagttgccgctcagaattctgctgaggtggttaggtgcctcaactccgccctgcaggtggggtgtggtgctttcgcatgtcttgaaaattcgacttgtgacaccgatgggatgtacgacatttgcaaatcttttctctactctgccgctaagttcgacacacagggtaaggcgttcgtcaaggagagcctgaaatgtattgccaacggcgttacatccaaggtcttcttagccattagacggtgctctacatttcagcggatgatcgctgaagttcaggaagaatgctacagcaaacttaatgtttgctctatcgctaaaaggaatccagaggccatcactgaggtcgtgcagctgcccaatcactttagcaacaggtactacaataggttggtacgctcactgctggagtgtgacgaagatacggtctccaccatccgcgactccttaatggagaaaatcggccctaacatggcttcactcttccacatcctgcagacagatcactgcgcccagacccaccccagagcggactttaatcgcagacgcacaaatgagccgcagaagctgaaagtcctcttgcgcaacttgaggggggaggaagacagcccatctcatataaagcgaacaagtcacgaatctgcttag

SEQ ID NO: 135699 - DNA, 537 bp, Artificial Sequence
  derived and/or modified sequence
atgtatgacatctgtaagtcgtttctatattctgctgcaaaatttgacacccagggtaaggctttcgtcaaggaatcgctgaagtgtatcgccaacggcgtgacgtccaaagtgttcctggcgattaggagatgttccacgtttcaaagaatgattgccgaggtgcaagaagagtgctactcaaagctcaacgtgtgtagtattgctaagaggaaccccgaagccatcactgaggtcgtacagctgcccaatcacttcagcaacaggtattataatcggcttgtacgcagtttgcttgaatgcgatgaggacacggtgagcactatccgcgactcactcatggagaagataggccctaatatggcctcgttgttccacattctgcagaccgaccactgcgcccagacacatccacgggctgactttaatcgacgaaggaccaatgagcctcagaaactgaaagtgctcttgcggaacctgaggggagaggaagactcacctagtcacatcaaacgcacatcccacgaatccgcttag

SEQ ID NO: 135700 - DNA, 537 bp, Artificial Sequence
  derived and/or modified sequence
atgtatgacatctgtaaatcattcttgtactcagctgctaaattcgacactcaaggaaaggccttcgtcaaggaaagcctgaagtgtattgccaatggtgtgacctctaaggtgttcctggccattcgcagatgttcaactttccagaggatgatcgctgaggtgcaggaggagtgttacagcaagcttaacgtgtgttccatcgcaaaaaggaacccggaagctatcacagaagtggtgcagctgccaaaccacttctctaaccgttactacaataggctggtgagaagcttgctggaatgcgatgaggatactgtttcgaccatacgcgactcactgatggagaagattggtcctaatatggcttcgctttttcacatactgcaaaccgaccattgtgcacagacacacccgagagctgatttcaacaggaggcgcacaaatgaaccacagaaactgaaagtgttattgcggaatttacgcggagaggaggacagcccttcccatatcaaacggacctcacatgagagcgcctag

SEQ ID NO: 135701 - DNA, 744 bp, Artificial Sequence
  derived and/or modified sequence
atgttacagaacagtgctgttctgcttgtgctggttataagtgcaagcgccacacatgaagccgaacagaacgattctgtaagcccacggaaatcacgggtcgccgctcaaaatagcgccgaagtcgttagatgtctcaattccgcactacaggttggatgcggcgccttcgcttgtctagagaattccacctgcgataccgacggtatgtatgacatctgcaagagcttcctttacagcgcagccaaattcgacacccagggcaaagcttttgtgaaagaaagtctgaaatgcatcgcgaacggggtcacgtccaaggtctttctcgcaattaggagatgctccactttccagcgcatgatcgctgaggtacaggaggagtgctactccaaacttaacgtctgctcgatcgcaaagaggaacccagaagccatcacagaagtcgtccaactgcctaatcactttagcaacagatactacaatagactcgtgaggtctttgctggagtgcgacgaagatactgtaagcactattcgggattctctgatggagaagattggccccaacatggcgtccttgtttcacattctgcagactgatcactgcgcccaaactcacccaagagccgatttcaaccgtcgtaggaccaatgaacctcaaaaactgaaggttctactacgcaaccttcgaggggaagaagactctcccagccatataaagcggaccagccatgagtccgcctag

SEQ ID NO: 135702 - DNA, 537 bp, Artificial Sequence
  derived and/or modified sequence
atgtacgatatctgcaaaagttttctgtacagtgctgcaaagttcgacacccagggaaaagcatttgtgaaagagagcctgaagtgcattgcgaacggagtgacaagtaaggtgtttctcgccatacgaaggtgtagtacattccagaggatgatcgccgaggtgcaggaagaatgctattctaaactgaacgtttgttcaattgcaaaacggaatccagaagcaattaccgaggtggtgcagctacctaaccacttctctaatcggtattacaatcgtctcgtgcggagcctgctcgagtgcgacgaagacaccgtgagcacaataagagacagtttaatggaaaaaattggtccgaacatggctagcctgtttcacatactccagaccgaccactgcgcacagacccacccccgcgcggacttcaatagaaggcgcaccaatgaaccccagaaacttaaagtgctactgcgaaacctgcggggcgaagaagatagcccgtctcacattaagagaacaagccatgagtctgcatag

SEQ ID NO: 135703 - DNA, 537 bp, Artificial Sequence
  derived and/or modified sequence
atgtacgatatttgcaaatcatttctctattctgccgccaagtttgacacccaggggaaggcattcgtgaaagaatcactgaagtgtattgctaatggagtaacaagcaaagtgtttctcgccatacgccgctgttctaccttccaacggatgattgctgaagtgcaagaggaatgctattctaaactcaatgtgtgttctatcgccaaaagaaacccggaggccatcaccgaagtcgtgcagttgccgaatcacttctcaaataggtattataatcgactggtcaggtcactgctggagtgcgacgaagatactgttagcaccatacgagactcactgatggaaaaaattggaccgaatatggcctcactgttccatatactccagacagaccattgcgcccagacacatcctcgagctgacttcaatcgccgtaggactaacgagccccagaagctaaaagtgctactccgcaacctacggggcgaagaggactcccccagccacatcaaacgcacttcccacgaatccgcttag

SEQ ID NO: 135704 - DNA, 744 bp, Artificial Sequence
  derived and/or modified sequence
atgctccagaacagcgccgtgttactggtccttgtgatttccgcgtccgcaacccacgaagccgagcagaatgattccgttagccctagaaaatcccgtgtggccgcacagaactccgcggaggtggtgagatgtctgaatagtgctctgcaggtaggatgtggtgcatttgcttgtctggagaatagtacgtgtgacaccgatggcatgtatgatatttgtaaaagcttcttgtactcagccgcaaaatttgacactcaaggtaaggcatttgtgaaagagtctctgaaatgtatcgcaaatggcgtgaccagcaaagtttttctcgcaatcagacgatgcagtacgttccagagaatgatcgcagaggtacaggaggagtgttactcaaagctaaatgtatgctctattgctaagcgcaaccccgaagcaataaccgaagttgtccagctccctaaccacttctctaaccgctactataaccgactggtccgcagcttactagagtgcgacgaggacaccgtttctacaatacgagacagcctcatggaaaagattggacctaacatggcctcactctttcacattcttcagacagatcattgcgcacaaacccacccaagagccgactttaataggcgccggacaaatgagccccaaaaactgaaagtactcttgagaaacctgcgcggagaggaagattcgccaagtcacattaaacggacaagtcacgagagtgcctag

SEQ ID NO: 135705 - DNA, 537 bp, Artificial Sequence
  derived and/or modified sequence
atgtatgatatctgcaagtcctttctctattctgccgccaaattcgatacccagggaaaagccttcgtgaaagagagcctcaagtgcatcgcaaacggagtcacctctaaagtctttttggcaataaggaggtgcagcacattccagaggatgatcgccgaagttcaggaggagtgttacagcaaactgaatgtctgtagtatagctaaacgtaatccagaggccattaccgaggttgtgcagctcccaaaccatttctctaaccggtattacaaccgcctagttcgaagcctcttggaatgcgatgaggatacagtatccactattcgggattctttaatggagaagatcggaccaaacatggcaagcttatttcacatccttcaaactgaccattgtgcacagacccatcccagagcagactttaaccgccgcaggacaaacgagccccaaaagttgaaagttctgctgcgcaatttacgaggcgaagaggattccccttcccacatcaagcgaaccagccacgagagcgcatag

SEQ ID NO: 135706 - DNA, 3883 bp, Artificial Sequence
  derived and/or modified sequence
cagtttgcaaaagccagaggtgcaagaagcagcgactgcagcagcagcagcagcagcggcggtggcagcagcagcagcagcggcggcagcagcagcagcagcggaggcaccggtggcagcagcagcatcaccagcaacaacaacaaaaaaaaatcctcatcaaatcctcacctaagctttcagtgtatccagatccacatcttcactcaagccaggagagggaaagaggaaaggggggcaggaaaaaaaaaaaacccaacaacttagcggaaacttctcagagaatgctccaaaactcagcagtgcttctggtgctggtgatcagtgcttctgcaacccatgaggcggagcagaatgactctgtgagccccaggaaatcccgagtggcggctcaaaactcagctgaagtggttcgttgcctcaacagtgctctacaggtcggctgcggggcttttgcatgcctggaaaactccacctgtgacacagatgggatgtatgacatctgtaaatccttcttgtacagcgctgctaaatttgacactcagggaaaagcattcgtcaaagagagcttaaaatgcatcgccaacggggtcacctccaaggtcttcctcgccattcggaggtgctccactttccaaaggatgattgctgaggtgcaggaagagtgctacagcaagctgaatgtgtgcagcatcgccaagcggaaccctgaagccatcactgaggtcgtccagctgcccaatcacttctccaacagatactataacagacttgtccgaagcctgctggaatgtgatgaagacacagtcagcacaatcagagacagcctgatggagaaaattgggcctaacatggccagcctcttccacatcctgcagacagaccactgtgcccaaacacacccacgagctgacttcaacaggagacgcaccaatgagccgcagaagctgaaagtcctcctcaggaacctccgaggtgaggaggactctccctcccacatcaaacgcacatcccatgagagtgcataaccagggagaggttattcacaacctcaccaaactagtatcattttaggggtgttgacacaccagttttgagtgtactgtgcctggtttgatttttttaaagtagttcctattttctatcccccttaaagaaaattgcatgaaactaggcttctgtaatcaatatcccaacattctgcaatggcagcattcccaccaacaaaatccatgtgaccattctgcctctcctcaggagaaagtaccctcttttaccaacttcctctgccatgtttttcccctgctcccctgagaccacccccaaacacaaaacattcatgtaactctccagccattgtaatttgaagatgtggatccctttagaacggttgccccagtagagttagctgataaggaaactttatttaaatgcatgtcttaaatgctcataaagatgttaaatggaattcgtgttatgaatctgtgctggccatggacgaatatgaatgtcacatttgaattcttgatctctaatgagctagtgtcttatggtcttgatcctccaatgtctaattttctttccgacacatttaccaaattgcttgagcctggctgtccaaccagactttgagcctgcatcttcttgcatctaatgaaaaacaaaaagctaacatctttacgtactgtaactgctcagagctttaaaagtatctttaacaattgtcttaaaaccagagaatcttaaggtctaactgtggaatataaatagctgaaaactaatgtactgtacataaattccagaggactctgcttaaacaaagcagtatataataactttattgcatatagatttagttttgtaacttagctttatttttcttttcctgggaatggaataactatctcacttccagatatccacataaatgctccttgtggccttttttataactaagggggtagaagtagttttaattcaacatcaaaacttaagatgggcctgtatgagacaggaaaaaccaacaggtttatctgaaggaccccaggtaagatgttaatctcccagcccacctcaacccagaggctactcttgacttagacctatactgaaagatctctgtcacatccaactggaaattccaggaaccaaaaagagcatccctatgggcttggaccacttacagtgtgataaggcctactatacattaggaagtggcagttctttactcgtcccctttcatcggtgcctggtactctggcaaatgatgatggggtgggagactttccattaaatcaatcaggaatgagtcaatcagcctttaggtctttagtccgggggacttggggctgagagagtataaataaccctgggctgtccagccttaatagacttctcttacattttcgtcctgtagcacgctgcctgccaaagtagtcctggcagctggaccatctctgtaggatcgtaaaaaaatagaaaaaaagaaaaaaaaaagaaagaaagagggaaaaagagctggtggtttgatcatttctgccatgatgtttacaagatggcgaccaccaaagtcaaacgactaacctatctatgaacaacagtagtttctcagggtcactgtccttgaacccaacagtcccttatgagcgtcactgcccaccaaaggtcaatgtcaagagaggaagagagggaggaggggtaggactgcaggggccactccaaactcgcttaggtagaaactattggtgcttgactctcactaggctaaactcaagatttgaccaaatcgagtgatagggatcctggtgggaggagagagggcacatctccagaaaaatgaaaagcaatacaactttaccataaagcctttaaaaccagtaacgtgctgctcaaggaccaagagcaattgcagcagacccagcagcagcagcagcagcacaaacattgctgcctttgtccccacacagcctctaagcgtgctgacatcagattgttaagggcatttttatactcagaactgtcccatccccaggtccccaaacttatggacactgccttagcctcttggaaatcaggtagaccatattctaagttagactcttcccctccctcccacacttcccacccccaggcaaggctgacttctctgaatcagaaaagctattaaagtttgtgtgttgtgtccattttgcaaacccaactaagccaggaccccaatgcgacaagtagttcatgagtattcctagcaaatttctctctttcttcagttcagtagatttccttttttcttttctttttttttttttttttttttggctgtgacctcttcaaaccgtggtacccccccttttctccccacgatgatatctatatatgtatctacaatacatatatctacacatacagaaagaagcagttctcacaatgttgctagttttttgcttctctttcccccaccctactccctccaattcccccttaaacttccaaagcttcgtcttgtgtttgctgcagagtgattcgggggctgacctagaccagtttgcatgattcttctcttgtgatttggttgcactttagacatttttgtgccattatatttgcattatgtatttataatttaaatgatatttaggtttttggctgagtactggaataaacagtgagcatatctggtatatgtcattatttattgttaaattacatttttaagctccatgtgcatataaaggttatgaaacatatcatggtaatgacagatgcaagttattttatttgcttatttttataattaaagatgccatagcataatatgaagcctttggtgaattccttctaagataaaaataataataaagtgttacgttttattggtttcccccca

SEQ ID NO: 135707 - DNA, 1748 bp, Artificial Sequence
  derived and/or modified sequence
aataaatgtgcttcatgcctgatggcaataaactgccagtgtaatccaatagccttaggcagtggagctcctttgtttaataaattgcatgcaactaaacgaagaagctggacgctctgctgagggtatttcattgcataagcctagcctgattgcctgaaatctggcacgtaccctcttggagggggaggggtgagaggggaggaaaggcttgaatgttggcatgcttcaaagcgctctctatactttccagaagctgatctaagctgaagtggttcgttgcctcaacagtgctctacaggtcggctgcggggcttttgcatgcctggaaaactccacctgtgacacagatgggatgtatgacatctgtaaatccttcttgtacagcgctgctaaatttgacactcagggaaaagcattcgtcaaagagagcttaaaatgcatcgccaacggggtcacctccaaggtcttcctcgccattcggaggtgctccactttccaaaggatgattgctgaggtgcaggaagagtgctacagcaagctgaatgtgtgcagcatcgccaagcggaaccctgaagccatcactgaggtcgtccagctgcccaatcacttctccaacagatactataacagacttgtccgaagcctgctggaatgtgatgaagacacagtcagcacaatcagagacagcctgatggagaaaattgggcctaacatggccagcctcttccacatcctgcagacagaccactgtgcccaaacacacccacgagctgacttcaacaggagacgcaccaatgagccgcagaagctgaaagtcctcctcaggaacctccgaggtgaggaggactctccctcccacatcaaacgcacatcccatgagagtgcataaccagggagaggttattcacaacctcaccaaactagtatcattttaggggtgttgacacaccagttttgagtgtactgtgcctggtttgatttttttaaagtagttcctattttctatcccccttaaagaaaattgcatgaaactaggcttctgtaatcaatatcccaacattctgcaatggcagcattcccaccaacaaaatccatgtgaccattctgcctctcctcaggagaaagtaccctcttttaccaacttcctctgccatgtttttcccctgctcccctgagaccacccccaaacacaaaacattcatgtaactctccagccattgtaatttgaagatgtggatccctttagaacggttgccccagtagagttagctgataaggaaactttatttaaatgcatgtcttaaatgctcataaagatgttaaatggaattcgtgttatgaatctgtgctggccatggacgaatatgaatgtcacatttgaattcttgatctctaatgagctagtgtcttatggtcttgatcctccaatgtctaattttctttccgacacatttaccaaattgcttgagcctggctgtccaaccagactttgagcctgcatcttcttgcatctaatgaaaaacaaaaagctaacatctttacgtactgtaactgctcagagctttaaaagtatctttaacaattgtcttaaaaccagagaatcttaaggtctaactgtggaatataaatagctgaaaactaatgtactgtacataaattccagaggactctgcttaaacaaagcagtatataataactttattgcatatagatttagttttgtaacttagctttatttttctttt

SEQ ID NO: 135708 - DNA, 1734 bp, Artificial Sequence
  derived and/or modified sequence
agtttgcaaaagccagaggtgcaagaagcagcgactgcagcagcagcagcagcagcggcggtggcagcagcagcagcagcggcggcagcagcagcagcagcggaggcaccggtggcagcagcagcatcaccagcaacaacaacaaaaaaaaatcctcatcaaatcctcacctaagctttcagtgtatccagatccacatcttcactcaagccaggagagggaaagaggaaagggcggctcaaaactcagctgaagtggttcgttgcctcaacagtgctctacaggtcggctgcggggcttttgcatgcctggaaaactccacctgtgacacagatgggatgtatgacatctgtaaatccttcttgtacagcgctgctaaatttgacactcagggaaaagcattcgtcaaagagagcttaaaatgcatcgccaacggggtcacctccaaggtcttcctcgccattcggaggtgctccactttccaaaggatgattgctgaggtgcaggaagagtgctacagcaagctgaatgtgtgcagcatcgccaagcggaaccctgaagccatcactgaggtcgtccagctgcccaatcacttctccaacagatactataacagacttgtccgaagcctgctggaatgtgatgaagacacagtcagcacaatcagagacagcctgatggagaaaattgggcctaacatggccagcctcttccacatcctgcagacagaccactgtgcccaaacacacccacgagctgacttcaacaggagacgcaccaatgagccgcagaagctgaaagtcctcctcaggaacctccgaggtgaggaggactctccctcccacatcaaacgcacatcccatgagagtgcataaccagggagaggttattcacaacctcaccaaactagtatcattttaggggtgttgacacaccagttttgagtgtactgtgcctggtttgatttttttaaagtagttcctattttctatcccccttaaagaaaattgcatgaaactaggcttctgtaatcaatatcccaacattctgcaatggcagcattcccaccaacaaaatccatgtgaccattctgcctctcctcaggagaaagtaccctcttttaccaacttcctctgccatgtttttcccctgctcccctgagaccacccccaaacacaaaacattcatgtaactctccagccattgtaatttgaagatgtggatccctttagaacggttgccccagtagagttagctgataaggaaactttatttaaatgcatgtcttaaatgctcataaagatgttaaatggaattcgtgttatgaatctgtgctggccatggacgaatatgaatgtcacatttgaattcttgatctctaatgagctagtgtcttatggtcttgatcctccaatgtctaattttctttccgacacatttaccaaattgcttgagcctggctgtccaaccagactttgagcctgcatcttcttgcatctaatgaaaaacaaaaagctaacatctttacgtactgtaactgctcagagctttaaaagtatctttaacaattgtcttaaaaccagagaatcttaaggtctaactgtggaatataaatagctgaaaactaatgtactgtacataaattccagaggactctgcttaaacaaagcagtatataataactttattgcatatagatttagttttgtaacttagctttatttttcttttcct

SEQ ID NO: 135709 - RNA, 537 nt, Artificial Sequence
  derived and/or modified sequence
auguacgauauuugcaaaucauuucucuauucugccgccaaguuugacacccaggggaaggcauucgugaaagaaucacugaaguguauugcuaauggaguaacaagcaaaguguuucucgccauacgccgcuguucuaccuuccaacggaugauugcugaagugcaagaggaaugcuauucuaaacucaauguguguucuaucgccaaaagaaacccggaggccaucaccgaagucgugcaguugccgaaucacuucucaaauagguauuauaaucgacuggucaggucacugcuggagugcgacgaagauacuguuagcaccauacgagacucacugauggaaaaaauuggaccgaauauggccucacuguuccauauacuccagacagaccauugcgcccagacacauccucgagcugacuucaaucgccguaggacuaacgagccccagaagcuaaaagugcuacuccgcaaccuacggggcgaagaggacucccccagccacaucaaacgcacuucccacgaauccgcuuag

SEQ ID NO: 135710 - protein, 685 aa, Artificial Sequence
  derived and/or modified sequence
MDVCVRLALWLLWGLLLHQGQSLSHSHSEKATGTSSGANSEESTAAEFCRIDKPLCHSEDEKLSFEAVRNIHKLMDDDANGDVDVEESDEFLREDLNYHDPTVKHSTFHGEDKLISVEDLWKAWKSSEVYNWTVDEVVQWLITYVELPQYEETFRKLQLSGHAMPRLAVTNTTMTGTVLKMTDRSHRQKLQLKALDTVLFGPPLLTRHNHLKDFMLVVSIVIGVGGCWFAYIQNRYSKEHMKKMMKDLEGLHRAEQSLHDLQERLHKAQEEHRTVEVEKVHLEKKLRDEINLAKQEAQRLKELREGTENERSRQKYAEEELEQVREALRKAEKELESHSSWYAPEALQKWLQLTHEVEVQYYNIKKQNAEKQLLVAKEGAEKIKKKRNTLFGTFHVAHSSSLDDVDHKILTAKQALSEVTAALRERLHRWQQIEILCGFQIVNNPGIHSLVAALNIDPSWMGSTRPNPAHFIMTDDVDDMDEEIVSPLSMQSPSLQSSVRQRLTEPQHGLGSQRDLTHSDSESSLHMSDRQRVAPKPPQMSRAADEALNAMTSNGSHRLIEGVHPGSLVEKLPDSPALAKKALLALNHGLDKAHSLMELSPSAPPGGSPHLDSSRSHSPSSPDPDTPSPVGDSRALQASRNTRIPHLAGKKAVAEEDNGSIGEETDSSPGRKKFPLKIFKKPLKK

SEQ ID NO: 135711 - DNA, 2058 bp, Artificial Sequence
  derived and/or modified sequence
atggacgtgtgcgtgagactggccctgtggctgctgtggggcctgctgctgcaccagggccagagcctgagccacagccacagcgagaaggccaccggcaccagcagcggcgccaacagcgaggagagcaccgccgccgagttctgcagaatcgacaagcccctgtgccacagcgaggacgagaagctgagcttcgaggccgtgagaaacatccacaagctgatggacgacgacgccaacggcgacgtggacgtggaggagagcgacgagttcctgagagaggacctgaactaccacgaccccaccgtgaagcacagcaccttccacggcgaggacaagctgatcagcgtggaggacctgtggaaggcctggaagagcagcgaggtgtacaactggaccgtggacgaggtggtgcagtggctgatcacctacgtggagctgccccagtacgaggagaccttcagaaagctgcagctgagcggccacgccatgcccagactggccgtgaccaacaccaccatgaccggcaccgtgctgaagatgaccgacagaagccacagacagaagctgcagctgaaggccctggacaccgtgctgttcggcccccccctgctgaccagacacaaccacctgaaggacttcatgctggtggtgagcatcgtgatcggcgtgggcggctgctggttcgcctacatccagaacagatacagcaaggagcacatgaagaagatgatgaaggacctggagggcctgcacagagccgagcagagcctgcacgacctgcaggagagactgcacaaggcccaggaggagcacagaaccgtggaggtggagaaggtgcacctggagaagaagctgagagacgagatcaacctggccaagcaggaggcccagagactgaaggagctgagagagggcaccgagaacgagagaagcagacagaagtacgccgaggaggagctggagcaggtgagagaggccctgagaaaggccgagaaggagctggagagccacagcagctggtacgcccccgaggccctgcagaagtggctgcagctgacccacgaggtggaggtgcagtactacaacatcaagaagcagaacgccgagaagcagctgctggtggccaaggagggcgccgagaagatcaagaagaagagaaacaccctgttcggcaccttccacgtggcccacagcagcagcctggacgacgtggaccacaagatcctgaccgccaagcaggccctgagcgaggtgaccgccgccctgagagagagactgcacagatggcagcagatcgagatcctgtgcggcttccagatcgtgaacaaccccggcatccacagcctggtggccgccctgaacatcgaccccagctggatgggcagcaccagacccaaccccgcccacttcatcatgaccgacgacgtggacgacatggacgaggagatcgtgagccccctgagcatgcagagccccagcctgcagagcagcgtgagacagagactgaccgagccccagcacggcctgggcagccagagagacctgacccacagcgacagcgagagcagcctgcacatgagcgacagacagagagtggcccccaagcccccccagatgagcagagccgccgacgaggccctgaacgccatgaccagcaacggcagccacagactgatcgagggcgtgcaccccggcagcctggtggagaagctgcccgacagccccgccctggccaagaaggccctgctggccctgaaccacggcctggacaaggcccacagcctgatggagctgagccccagcgccccccccggcggcagcccccacctggacagcagcagaagccacagccccagcagccccgaccccgacacccccagccccgtgggcgacagcagagccctgcaggccagcagaaacaccagaatcccccacctggccggcaagaaggccgtggccgaggaggacaacggcagcatcggcgaggagaccgacagcagccccggcagaaagaagttccccctgaagatcttcaagaagcccctgaagaagtag

SEQ ID NO: 135712 - DNA, 2058 bp, Artificial Sequence
  derived and/or modified sequence
atggacgtctgtgtgagactggctctgtggctgctgtggggactgctcctgcatcagggtcagtcactatctcactcacattctgaaaaagcaactggcaccagcagcggggccaatagcgaggagtctactgcggcggaattttgtaggatcgacaaacctttatgtcatagtgaggatgagaaactctctttcgaggctgtacggaatattcataaattgatggacgatgacgcaaatggagatgtagacgtggaagagtccgatgaatttctcagagaagaccttaattatcacgatcctactgtcaagcacagtacctttcacggcgaggacaaactcatctccgttgaagacctatggaaggcctggaaaagcagcgaggtgtataattggacagtggatgaagtggtgcagtggctcatcacttacgttgagcttcctcagtatgaggaaacattcaggaagctgcagctatcaggccatgccatgcctcgtctcgcagtcaccaacacaactatgaccggaaccgtgctgaaaatgaccgatcggagtcaccgccaaaagctgcagttgaaagccctggatactgtcttgtttggtcctccactgctcacccggcataaccatctgaaggactttatgcttgtcgtgtccatcgtgattggtgtgggcgggtgttggttcgcctacatccaaaacaggtattccaaagaacacatgaagaagatgatgaaggaccttgaaggcctacatcgagccgagcagagtctgcatgatctgcaggaacgactgcataaagcccaggaagagcaccggacggtagaagtcgagaaggttcaccttgaaaagaagttaagagacgagatcaacctggccaagcaggaggcccagagactaaaagagctgcgtgaaggcaccgaaaatgaacgtagtagacagaagtacgcggaagaggagctagagcaggtgagagaggctctgaggaaggcggagaaggagctcgaatctcatagcagctggtatgctcctgaggctctccagaagtggctccagctcactcatgaagtggaggttcagtattataatattaagaagcagaacgctgagaagcaactgttggtggctaaagagggagctgaaaaaattaagaaaaagcgcaacacactattcggaactttccacgtcgctcattcctcatctttagatgatgttgatcacaagatcctgaccgccaagcaggcactctcagaggtgaccgctgcccttcgcgagcgcctccatcgatggcaacagattgagattctgtgtggatttcagatcgtcaataatccggggattcactccctggttgctgccctgaacatcgacccttcatggatgggctcaacacgtcctaacccagcccactttatcatgactgatgatgtggacgatatggatgaggaaatcgtctcacctctttccatgcaatctccatcactgcagtcctccgtgcgacaacgattaacggagcctcagcacgggcttggcagccagagggacctaacccattcagacagcgaatctagccttcacatgagtgatagacaaagagtggcccccaagcctccccagatgagcagggcagcagacgaggcccttaacgctatgacaagcaacgggagccataggctgatagagggcgtgcaccccggtagcctcgttgaaaaactgccggatagccctgccttggcgaagaaggctctacttgcgctaaatcacggcctggataaggctcatagtctgatggaactaagcccctccgcgccgccaggaggatccccgcatctggacagttctaggtctcactcaccctcctctccagatcccgataccccatctcccgtcggagattcccgcgctttgcaggcaagccgcaacacaaggattccccacctggctggcaaaaaggctgtcgccgaagaagacaacggaagtattggagaagagaccgactcttcaccgggccggaagaagttccctcttaagatttttaaaaaacccctgaaaaagtag

SEQ ID NO: 135713 - DNA, 2058 bp, Artificial Sequence
  derived and/or modified sequence
atggatgtgtgtgtgcggctggccctgtggctgctgtggggcctgctgctgcaccagggccagagcctgagccacagccacagcgagaaggccaccggcaccagcagcggggccaacagcgaggagagcacagctgctgagttctgcagaattgacaagcccctgtgccacagtgaagatgagaagctgagctttgaagctgtgaggaacatccacaagctgatggatgatgatgccaatggagatgtggatgtggaggagagtgatgagttcctgcgggaggacctgaactaccatgaccccaccgtgaagcacagcaccttccatggagaggacaagctgatctctgtggaggacctgtggaaggcctggaagagcagcgaggtgtacaactggacagtggatgaggtggtgcagtggctgatcacctacgtggagctgccccagtatgaggagaccttcaggaagctgcagctgagcggccacgccatgccccggctggccgtgaccaacaccaccatgactggaacagtgctgaagatgacagacaggagccaccggcagaagctgcagctgaaggccctggacacagtgctgtttggcccccccctgctgaccaggcacaaccacctgaaggacttcatgctggtggtgtccatcgtcatcggcgtgggcggctgctggtttgcctacatccagaaccgctacagcaaggagcacatgaagaagatgatgaaggacctggagggcctgcacagagctgagcagagcctgcatgacctgcaggagcggctgcacaaggcccaggaggagcacaggacagtggaggtggagaaggtgcacctggagaagaagctgagagatgagatcaacctggccaagcaggaggcccagaggctgaaggagctgcgggagggcacagaaaatgaaagaagccggcagaagtatgcagaggaggagctggagcaggtgcgggaggccctgaggaaggccgagaaggagctggagagccacagctcctggtacgcccctgaggccctgcagaagtggctgcagctgacccatgaggtggaggtgcagtactacaacatcaagaagcagaatgctgagaagcagctgctggtggccaaggagggcgctgagaagatcaagaagaagaggaacaccctgtttggcaccttccacgtggcccacagcagcagcctggatgatgtggaccacaagatcctgacagccaagcaggccctgtctgaggtgacagctgccctgcgggagcggctgcaccgctggcagcagatcgagatcctgtgtggcttccagatcgtgaacaaccctggcatccacagcctggtggccgccctgaacatcgaccccagctggatgggcagcacccggcccaacccagcccacttcatcatgacagatgatgtggatgacatggatgaggagatcgtgagccccctgtccatgcagagccccagcctgcagagctctgtgcggcagaggctgacagagccccagcacggcctgggcagccagagggacctgacccacagcgacagcgagagcagcctgcacatgtctgaccggcagagggtggcccccaagccaccccagatgagcagagctgctgatgaggccctgaatgccatgaccagcaatggcagccacaggctcatcgagggcgtgcaccctggcagcctggtggagaagctgcctgacagccctgccctggccaagaaggccctgctggccctgaaccacggcctggacaaggcccacagcctgatggagctgagccccagcgcccctcctgggggcagcccccacctggacagcagccgcagccacagccccagcagcccagaccctgacacccccagccctgtgggggacagccgggccctgcaggccagcaggaacacccgcatcccccacctggccggcaagaaggctgtggccgaggaggacaatggcagcattggagaggagacagacagcagccctggcaggaagaagttccccctgaagatcttcaagaagcccctgaagaagtag

SEQ ID NO: 135714 - DNA, 2058 bp, Artificial Sequence
  derived and/or modified sequence
atggacgtgtgcgtgcggctggccctgtggctgctgtggggcctgttgctgcaccaaggccagtccctttcacattctcactcggagaaggcgaccggtacttcctccggtgcgaattccgaagagtccaccgcagctgaattctgccgcatcgacaagccactgtgccactctgaggatgaaaagctgtcttttgaggccgtacgaaatattcacaagctcatggatgatgacgccaacggcgatgttgatgtggaagagagcgatgaatttctccgtgaagacttaaattaccacgaccctaccgtgaagcactcaacctttcatggagaagataaattgatctccgtcgaggatttgtggaaggcctggaaatcaagcgaggtatacaactggaccgtggacgaagttgtgcagtggctgattacctacgttgaactgccccagtacgaggaaactttccggaagttgcaactatccggtcacgctatgccacggctggccgttaccaataccacaatgaccgggaccgtgttgaagatgaccgaccgctcacataggcagaagttacagctgaaggctcttgacacagtcctttttggcccccccctcctgacccggcacaatcatctgaaggatttcatgctcgtagtgtcaatagtgatcggggtggggggatgttggttcgcctacatccagaaccgctattcaaaagaacatatgaaaaagatgatgaaagacctggaaggactgcatagggccgagcagtcactccacgatttacaggagagactgcataaggctcaggaagagcacagaacagtcgaggtagagaaggtgcatctggagaagaagttgcgggatgagattaacctggccaaacaggaggctcagagactgaaggagctccgagaaggtacagaaaacgagagatccagacagaagtacgctgaggaggagctcgagcaagtccgagaggcattgaggaaggccgagaaggaattagaatcccacagtagctggtatgcccccgaagcgcttcagaagtggttgcaacttacccacgaagtggaggtacagtattacaatatcaaaaagcagaatgctgaaaagcagctgctggtcgccaaagagggcgccgagaagatcaagaaaaaacgtaacaccctgtttggcaccttccacgtagcccattcatcatctctcgacgacgtcgatcataaaatacttactgctaaacaggccctgagcgaagtgactgctgcactgagggagcgactgcatcgctggcagcagatcgaaattctctgcggattccaaattgtgaataaccctgggattcatagcttggtcgctgccttgaacatcgacccctcatggatgggctctacccggcctaatcccgcccacttcataatgacggacgatgtggacgacatggacgaggaaatagtatcccctctcagtatgcagtccccaagtctgcagagttccgtgcgccaacgattaaccgagcctcagcacgggcttggatcccaacgagacttgacccattctgactctgagtcatctttgcacatgtctgacaggcagcgggtcgcccctaaaccgccccagatgtctagggccgcagacgaggcacttaacgcgatgacttccaatgggagccatcgcctgattgaaggagtgcaccctggcagtttggtagaaaaactgcccgatagcccagccctcgcaaaaaaggcgctgcttgccctgaaccacggattggataaggcccattcactgatggagctctctcctagcgcgcccccaggaggctctccacacctggatagttcccggtcccactcacctagcagtcctgaccctgacacacctagccctgtgggagattctcgagccttgcaggccagcaggaacacccggattccccacttggccggcaagaaggccgttgcggaagaggataacgggagtattggagaagaaaccgactcaagccctgggcgtaagaagttcccgctcaaaatttttaaaaagccgttaaaaaaatag

SEQ ID NO: 135715 - DNA, 2058 bp, Artificial Sequence
  derived and/or modified sequence
atggacgtctgcgtacggctggcattatggctcctatgggggcttttactgcaccaaggtcaaagcctgtctcacagccactcggaaaaagccaccggcacttcatcaggagccaactcagaggagtccaccgccgctgaattctgtcggatcgacaaacccctctgtcacagtgaggacgagaagttgtcttttgaagccgtgcgtaacattcacaagcttatggacgacgacgcgaacggcgatgtcgacgtggaggagtccgatgagttcctgcgtgaggatctaaattatcacgatccaactgtcaaacactctacgtttcatggggaagataaattgataagtgttgaggacctgtggaaagcctggaaatcctctgaggtgtataattggacagtcgacgaagtggtccagtggcttatcacatacgtcgagttaccccagtatgaagagacatttagaaagctgcaactcagtggtcacgctatgccacggttagcagtgacaaacaccacaatgactgggactgtgctgaaaatgaccgacaggtctcacagacagaaactccagctaaaagcattagatactgtcctattcggcccacccttattgactagacacaaccatctgaaggattttatgctggtggtgtccatcgtcattggggtgggcggttgctggttcgcctatatccagaatcggtactccaaggaacacatgaagaaaatgatgaaggacctggaagggttgcacagggctgaacaatcacttcacgacctgcaagagcgccttcataaggctcaggaagagcacaggacagtggaggtggagaaagtgcacctcgaaaaaaagctgagagacgaaattaaccttgcgaagcaggaggcacagaggttgaaagagttgcgcgaaggaactgagaatgagcggtcccgccagaagtatgcagaggaagaactggagcaggttcgagaggccctccggaaagctgagaaggagctcgaatcccattcctcgtggtacgcaccggaggcattacagaaatggttgcagctgactcacgaagtggaggtgcaatactacaacataaaaaagcagaatgccgaaaagcagcttctggtcgctaaggagggggctgagaagattaaaaagaaacgaaatacattattcgggacatttcacgtggcacactcctcaagcctggatgacgtcgaccacaagatcttgacagcgaagcaggctctgagcgaggttacagcagccctccgagagcggctccaccgctggcagcagatagagattctgtgtggattccagattgtaaataaccccggtattcatagtttggtggctgcgctcaatattgaccccagctggatggggtccacacgacctaatccagctcactttatcatgacggatgatgtggatgacatggacgaggaaatcgtgtcccctttatctatgcagagtcccagcctacagagttcagtacgccagcgactgacagaaccccaacacggcctgggttcgcagagagacctgacccatagcgatagcgaaagttcactccatatgagcgatcgtcaacgagttgcccctaagccacctcagatgtcccgggctgcggatgaggcactaaacgccatgaccagcaatggcagccaccggctgatcgaaggagtgcaccccggtagtcttgtcgagaagcttccggactcacctgcactagccaaaaaagccctcctggctctcaatcacggacttgacaaggctcacagcctcatggagttgagtcccagcgctccacccggtggatccccacatctcgattcctctagaagccactccccctcgtcacccgatcccgacacccccagccccgtgggggattcccgcgctctgcaggcctccaggaatacaagaataccacatctggccggtaaaaaggccgttgccgaagaggacaacgggtctatcggcgaagaaactgacagcagccccggacggaaaaaatttcccctgaagatatttaagaaaccccttaagaagtag

SEQ ID NO: 135716 - DNA, 4038 bp, Artificial Sequence
  derived and/or modified sequence
gctggacctgggcaccgccagccgcctgggcacgggactgggcgggggcgctgacctcggcctaggaggcccaggatcccggagacgcccgcgccctcaggaccctgcgggtcgcacgccctccccagcttctgctgctcgccgctcttcggcagggcgaggtcaggtgcccccttctcgcctctcttctcttctcttctcttcctcctccacttctgtgcccgcggagactccggccgcccccttccgcaggggtgtagtaatctgcggagctgacagcagccccgcagccaccctgcccgaagtctccggaagcggcacgagctcaggccgccgcagccccggcggacccactgttggacctgaggagccagccctcctcccgcacccaaacttggagcacttgacctttggctgttggagggggcaggctcgcgggtggctggacagctgcggagccgcgagggcatcttgcctggagaccgtcggctgcactcccgggctcctggctttgcctctgggatcccgaggtgtccacatcagacgcatgttgactgagacctagagtcatggatgtatgcgtccgtcttgccctgtggctcctctggggactcctcctgcaccagggccagagcctcagccatagtcacagtgagaaggcgacaggaaccagctcgggggccaactctgaggagtccactgcagcagagttttgccgaattgacaagcccctgtgtcacagtgaggatgagaaactcagcttcgaggcagtccgtaacatccacaaactgatggacgatgatgccaatggtgatgtggatgtggaagaaagtgatgagttcctgagggaagacctcaattaccatgacccaacagtgaaacacagcaccttccatggtgaggataagctcatcagcgtggaggacctgtggaaggcatggaagtcatcagaagtatacaattggaccgtggatgaggtggtacagtggctgatcacatatgtggagctgcctcagtatgaggagaccttccggaagctgcagctcagtggccatgccatgccaaggctggctgtcaccaacaccaccatgacagggactgtgctgaagatgacagaccggagtcatcggcagaagctgcagctgaaggctctggatacagtgctctttgggcctcctctcttgactcgccataatcacctcaaggacttcatgctggtggtgtctatcgttattggtgtgggcggctgctggtttgcctatatccagaaccgttactccaaggagcacatgaagaagatgatgaaggacttggaggggttacaccgagctgagcagagtctgcatgaccttcaggaaaggctgcacaaggcccaggaggagcaccgcacagtggaggtggagaaggtccatctggaaaagaagctgcgcgatgagatcaaccttgctaagcaggaagcccagcggctgaaggagctgcgggagggtactgagaatgagcggagccgccaaaaatatgctgaggaggagttggagcaggttcgggaggccttgaggaaagcagagaaggagctagaatctcacagctcatggtatgctccagaggcccttcagaagtggctgcagctgacacatgaggtggaggtgcaatattacaacatcaagaagcaaaatgctgagaagcagctgctggtggccaaggagggggctgagaagataaaaaagaagagaaacacactctttggcaccttccacgtggcccacagctcttccctggatgatgtagatcataaaattctaacagctaagcaagcactgagcgaggtgacagcagcattgcgggagcgcctgcaccgctggcaacagatcgagatcctctgtggcttccagattgtcaacaaccctggcatccactcactggtggctgccctcaacatagaccccagctggatgggcagtacacgccccaaccctgctcacttcatcatgactgacgacgtggatgacatggatgaggagattgtgtctcccttgtccatgcagtcccctagcctgcagagcagtgttcggcagcgcctgacggagccacagcatggcctgggatctcagagggatttgacccattccgattcggagtcctccctccacatgagtgaccgccagcgtgtggcccccaaacctcctcagatgagccgtgctgcagacgaggctctcaatgccatgacttccaatggcagccaccggctgatcgagggggtccacccagggtctctggtggagaaactgcctgacagccctgccctggccaagaaggcattactggcgctgaaccatgggctggacaaggcccacagcctgatggagctgagcccctcagccccacctggtggctctccacatttggattcttcccgttctcacagccccagctccccagacccagacacaccatctccagttggggacagccgagccctgcaagccagccgaaacacacgcattccccacctggctggcaagaaggctgtggctgaggaggataatggctctattggcgaggaaacagactccagcccaggccggaagaagtttcccctcaaaatctttaagaagcctcttaagaagtaggcaggatggggtggcagtaaagggacagcttgtccttccctgggtgttctgtctctccttccctcccttccttcaagataactggccccaagagtggggcatgggaagggctggtccaggggtctgggcactgtacatacctgccccctcatccttgggtccttcattattatttattaactgaccaccatggcctgcctgccctgcctccgtcccaaccatgggctgctgctgtcactccctctccacttcagtgcatgtcttagttgctgttccctcagctcccagctccacctctggggttcagcttctgtctctgctgtcccagttttgaggtttggtttcttgtttctgtctcttgctttcgggctcctccctcccaccactccccaacttcccctagcagttgcagggaagataggacgagtagcttctgacatgtgtgcctcagatctgttccaccccactcacagtggttctgtttgctccagactggggctagggcctaatctttgaagtttgttctttggtattgatgtgggtcagaaggagcctcatcctaatctcactcaggcctccagggatccatgggggagtgaaaccaattctcagagaacaacccaccagagacttttaaagagaggccaggcttgggaatgggttgggagaggcatctgttcattggagcatgagtggatgccagaactgtaggttataaggcagtcactttttctctctactcccacccacacctgcctccctcttacccctgctcccccacactgcaggaggatttgtctctaagaggtgctgccccaaagctccccaagcatcaatactcctagggctcaggacaagtggctcccctggccaggagagccacagccatgatacagggctcttatggagccctggagttgttgggcaaggatgctgtcattttttgaaccaaaagacaaacaggttaaaaggaaaaaaagtaatctgaatttcccaagtgcctacgctgcatattccccttgttagatcccattttcatgttactttgtagccttggccagaggctcaaaaaggacacaaccagtttggggaaggggtggctaaggaagatggtataggtgaaggcggctgtgtgaccactttcccccacccttcccaccctctagacaactctctcccttacctgtttttgctatggctgtaaaggtatttttcctctgccccactccctgccatacctttatcctgggatcctattttgggcctggggtgggtatacctggggctggtcttaggagggtgctaggctgcagactgccttgtactccctggacaccctcaaatggggttttctgtgttatttcataaaattctttgaagtccaataaagcatgtaggagattttaaccac

SEQ ID NO: 135717 - protein, 102 aa, Artificial Sequence
  derived and/or modified sequence
EVGRWLEPGKQRLQCAEMAPLHSSLGDKARPCLTKKKKMLDMNPTLVCYRQGLALLPRLGCSGAILAHCNLRLLGSSDSPASASRVAGITGARHHAQLIFVF

SEQ ID NO: 135718 - protein, 841 aa, Artificial Sequence
  derived and/or modified sequence
MPLAAYCYLRVVGKGSYGEVTLVKHRRDGKQYVIKKLNLRNASSRERRAAEQEAQLLSQLKHPNIVTYKESWEGGDGLLYIVMGFCEGGDLYRKLKEQKGQLLPENQVVEWFVQIAMALQYLHEKHILHRDLKTQNVFLTRTNIIKVGDLGIARVLENHCDMASTLIGTPYYMSPELFSNKPYNYKSDVWALGCCVYEMATLKHAFNAKDMNSLVYRIIEGKLPPMPRDYSPELAELIRTMLSKRPEERPSVRSILRQPYIKRQISFFLEATKIKTSKNNIKNGDSQSKPFATVVSGEAESNHEVIHPQPLSSEGSQTYIMGEGKCLSQEKPRASGLLKSPASLKAHTCKQDLSNTTELATISSVNIDILPAKGRDSVSDGFVQENQPRYLDASNELGGICSISQVEEEMLQDNTKSSAQPENLIPMWSSDIVTGEKNEPVKPLQPLIKEQKPKDQSLALSPKLECSGTILAHSNLRLLGSSDSPASASRVAGITGVCHHAQDQVAGECIIEKQGRIHPDLQPHNSGSEPSLSRQRRQKRREQTEHRGEKRQVRRDLFAFQESPPRFLPSHPIVGKVDVTSTQKEAENQRRVVTGSVSSSRSSEMSSSKDRPLSARERRRLKQSQEEMSSSGPSVRKASLSVAGPGKPQEEDQPLPARRLSSDCSVTQERKQIHCLSEDELSSSTSSTDKSDGDYGEGKGQTNEINALVQLMTQTLKLDSKESCEDVPVANPVSEFKLHRKYRDTLILHGKVAEEAEEIHFKELPSAIMPGSEKIRRLVEVLRTDVIRGLGVQLLEQVYDLLEEEDEFDREVRLREHMGEKYTTYSVKARQLKFFEENMNF

SEQ ID NO: 135719 - DNA, 2526 bp, Artificial Sequence
  derived and/or modified sequence
atgcccctggccgcctactgctacctgagagtggtgggcaagggcagctacggcgaggtgaccctggtgaagcacagaagagacggcaagcagtacgtgatcaagaagctgaacctgagaaacgccagcagcagagagagaagagccgccgagcaggaggcccagctgctgagccagctgaagcaccccaacatcgtgacctacaaggagagctgggagggcggcgacggcctgctgtacatcgtgatgggcttctgcgagggcggcgacctgtacagaaagctgaaggagcagaagggccagctgctgcccgagaaccaggtggtggagtggttcgtgcagatcgccatggccctgcagtacctgcacgagaagcacatcctgcacagagacctgaagacccagaacgtgttcctgaccagaaccaacatcatcaaggtgggcgacctgggcatcgccagagtgctggagaaccactgcgacatggccagcaccctgatcggcaccccctactacatgagccccgagctgttcagcaacaagccctacaactacaagagcgacgtgtgggccctgggctgctgcgtgtacgagatggccaccctgaagcacgccttcaacgccaaggacatgaacagcctggtgtacagaatcatcgagggcaagctgccccccatgcccagagactacagccccgagctggccgagctgatcagaaccatgctgagcaagagacccgaggagagacccagcgtgagaagcatcctgagacagccctacatcaagagacagatcagcttcttcctggaggccaccaagatcaagaccagcaagaacaacatcaagaacggcgacagccagagcaagcccttcgccaccgtggtgagcggcgaggccgagagcaaccacgaggtgatccacccccagcccctgagcagcgagggcagccagacctacatcatgggcgagggcaagtgcctgagccaggagaagcccagagccagcggcctgctgaagagccccgccagcctgaaggcccacacctgcaagcaggacctgagcaacaccaccgagctggccaccatcagcagcgtgaacatcgacatcctgcccgccaagggcagagacagcgtgagcgacggcttcgtgcaggagaaccagcccagatacctggacgccagcaacgagctgggcggcatctgcagcatcagccaggtggaggaggagatgctgcaggacaacaccaagagcagcgcccagcccgagaacctgatccccatgtggagcagcgacatcgtgaccggcgagaagaacgagcccgtgaagcccctgcagcccctgatcaaggagcagaagcccaaggaccagagcctggccctgagccccaagctggagtgcagcggcaccatcctggcccacagcaacctgagactgctgggcagcagcgacagccccgccagcgccagcagagtggccggcatcaccggcgtgtgccaccacgcccaggaccaggtggccggcgagtgcatcatcgagaagcagggcagaatccaccccgacctgcagccccacaacagcggcagcgagcccagcctgagcagacagagaagacagaagagaagagagcagaccgagcacagaggcgagaagagacaggtgagaagagacctgttcgccttccaggagagcccccccagattcctgcccagccaccccatcgtgggcaaggtggacgtgaccagcacccagaaggaggccgagaaccagagaagagtggtgaccggcagcgtgagcagcagcagaagcagcgagatgagcagcagcaaggacagacccctgagcgccagagagagaagaagactgaagcagagccaggaggagatgagcagcagcggccccagcgtgagaaaggccagcctgagcgtggccggccccggcaagccccaggaggaggaccagcccctgcccgccagaagactgagcagcgactgcagcgtgacccaggagagaaagcagatccactgcctgagcgaggacgagctgagcagcagcaccagcagcaccgacaagagcgacggcgactacggcgagggcaagggccagaccaacgagatcaacgccctggtgcagctgatgacccagaccctgaagctggacagcaaggagagctgcgaggacgtgcccgtggccaaccccgtgagcgagttcaagctgcacagaaagtacagagacaccctgatcctgcacggcaaggtggccgaggaggccgaggagatccacttcaaggagctgcccagcgccatcatgcccggcagcgagaagatcagaagactggtggaggtgctgagaaccgacgtgatcagaggcctgggcgtgcagctgctggagcaggtgtacgacctgctggaggaggaggacgagttcgacagagaggtgagactgagagagcacatgggcgagaagtacaccacctacagcgtgaaggccagacagctgaagttcttcgaggagaacatgaacttctag

SEQ ID NO: 135720 - DNA, 2526 bp, Artificial Sequence
  derived and/or modified sequence
atgcctctcgccgcttactgctacctcagagtggtggggaagggctcttacggtgaagtgacgctggtaaaacatcgtcgcgacgggaagcagtatgtgatcaagaaactgaatttacggaacgcctccagccgtgagcggcgggccgccgaacaggaggcccagctcctgtcccagcttaaacacccgaacattgtcacctacaaggagtcctgggagggaggggatggacttctgtatatcgtgatgggattttgtgaaggcggtgacctgtatcgcaagttgaaggaacaaaaggggcagctgctccccgaaaaccaggtggtcgagtggttcgtgcagattgcaatggccctgcaatacttgcatgagaaacatatcttacatagggatctgaagactcagaacgtctttctcactaggacaaacatcattaaagttggggacctgggcatcgcgcgggtgctggaaaatcactgcgatatggcatctacactgataggaactccttactatatgtcgcccgagctgttctctaataagccctacaactacaagagcgacgtgtgggcacttgggtgctgtgtgtatgaaatggctaccctgaagcacgcttttaatgcgaaggacatgaactcattggtgtatcgaatcattgagggcaagctccctcccatgcccagggactactcccccgagctggctgagctgatccggaccatgctctccaagcggccagaagagagaccttccgtcaggtcaatccttaggcaaccatatattaagcgtcagattagcttttttctggaggcgaccaaaatcaagacttcgaaaaacaacatcaagaacggcgacagccagtctaaacctttcgctacagtcgtttccggagaggcagaatcaaatcacgaggtgatccatcctcagcccttgtctagcgaggggtcgcagacttatattatgggggagggtaagtgcctttctcaggagaagccacgagcaagcggtctgctgaagtcaccggcctccctgaaggcccacacatgcaaacaggatctgagcaataccactgaattggccactatttcaagcgtgaatatagatatcctgccggccaagggtcgagacagcgtaagcgatgggttcgttcaggagaaccagcctaggtacctggacgcatctaatgaacttggaggaatctgcagtattagccaggtggaggaggaaatgttgcaggacaacactaagtcaagtgctcagccagaaaatcttattcctatgtggtcaagcgacatcgtgacaggcgagaagaacgagcctgtgaagccactgcaaccactgatcaaggaacagaagcccaaagaccaaagtctggctttgagccctaagctggaatgctctggcactatcttagctcattcgaatctccgtttgctcggaagcagcgacagtcctgcttctgcaagcagggtggctgggattacgggtgtttgtcatcatgcccaggatcaggtcgcaggtgagtgtatcattgaaaagcagggtagaatccacccagaccttcaaccccataattccggctcagagccttcactcagtcgtcaacgccgccaaaaacgccgcgaacagactgagcatcggggcgagaagaggcaggtacgacgggatctctttgcctttcaggagtcccctccccggttcttgcccagtcatcccattgtcgggaaggtggatgtaacaagtacacagaaagaagccgagaaccagcgaagagttgtcaccggcagtgtcagctcttccaggtcctctgaaatgtcatccagcaaagaccggcctctgtcagccagggagagacgccggctcaagcagagccaggaggaaatgtcctctagtgggccgtccgtgagaaaggccagtctgtccgtagccggcccaggaaagccacaagaagaagaccaaccattgcctgcacgccgtctttcctctgactgtagtgttacccaggagaggaagcagattcattgcttgtctgaagacgagctgagtagtagcacctcatctactgacaaatcagacggcgactatggggaggggaaaggacagactaacgagattaacgccctggttcagctgatgacccaaacactgaagctcgattccaaagagagctgtgaggacgtgcccgtggccaatcctgtctctgagttcaagctgcaccggaaatacagggataccttgatcctgcatggaaaggtcgctgaagaggctgaggaaatccacttcaaggagttgccatctgccatcatgcccggttccgaaaaaatccgacgcctggtggaggtgctgcgaacagacgtgatccgcgggttgggcgtgcagctcttggagcaggtttatgacctgctggaggaggaagatgaattcgatagggaagtgaggctgcgagaacatatgggcgagaaatacacaacttactccgtgaaagccaggcagctaaagttctttgaggaaaatatgaatttttag

SEQ ID NO: 135721 - DNA, 2526 bp, Artificial Sequence
  derived and/or modified sequence
atgcccctggccgcctactgctacctgcgggtggtgggcaagggcagctatggagaggtgaccctggtgaagcacagaagagatggcaagcagtatgtgatcaagaagctgaacctgagaaatgccagcagccgggagaggagagctgctgagcaggaggcccagctgctgagccagctgaagcaccccaacatcgtgacctacaaggagagctgggagggcggagatggcctgctgtacatcgtgatgggcttctgtgagggcggggacctgtacaggaagctgaaggagcagaagggccagctgctgcctgagaaccaggtggtggagtggtttgtgcagatcgccatggccctgcagtacctgcacgagaagcacatcctgcaccgggacctgaagacccagaatgtgttcctgaccaggaccaacatcatcaaggtgggggacctgggcatcgcccgggtgctggagaaccactgtgacatggccagcaccctgattggcaccccctactacatgagccctgagctgttcagcaacaagccctacaactacaagagtgatgtgtgggccctgggctgctgcgtgtatgagatggccaccctgaagcacgccttcaatgccaaggacatgaacagcctggtgtaccgcatcatcgagggcaagctgccccccatgccccgggactacagccctgagctggccgagctgatccgcaccatgctgagcaagaggcctgaggagcggcccagcgtgcgcagcatcctgcggcagccctacatcaagaggcagatctccttcttcctggaggccaccaagatcaagaccagcaagaacaacatcaagaatggagacagccagagcaagccctttgccaccgtggtgtctggagaggccgagagcaaccatgaagtcatccacccccagcccctgagcagcgagggcagccagacctacatcatgggagagggcaagtgcctgagccaggagaagccccgggccagcggcctgctgaagagccctgccagcctgaaggcccacacctgcaagcaggacctgagcaacaccacagagctggccaccatcagctctgtgaacatcgacatcctgcctgccaagggccgggacagcgtgtctgatggctttgtgcaggagaaccagccccgctacctggatgccagcaatgagctgggcggcatctgcagcatcagccaggtggaggaggagatgctgcaggacaacaccaagagcagcgcccagcctgagaacctgatccccatgtggagcagtgacatcgtgactggagagaagaatgaacctgtgaagcccctgcagcccctcatcaaggagcagaagcccaaggaccagagcctggccctgagccccaagctggagtgcagcggcaccatcctggcccacagcaacctgcggctgctgggcagcagtgacagccctgccagcgccagccgggtggccggcatcactggagtgtgccaccacgcccaggaccaggtggccggggagtgcatcatcgagaagcagggccgcatccacccagacctgcagccccacaacagcggcagcgagcccagcctgagccggcagaggcggcagaagaggcgggagcagacagagcacagaggagagaagaggcaggtgcggcgggacctgtttgccttccaggagagccccccacgcttcctgcccagccaccccatcgtgggcaaggtggatgtgaccagcacccagaaggaggccgagaaccagaggagagtggtgacaggctctgtgagcagcagccgcagcagcgagatgagcagcagcaaggaccggcccctgagcgcccgggagcggcggcggctgaagcagagccaggaggagatgagcagcagcggccccagcgtgaggaaggccagcctgtctgtggccggccctgggaagccccaggaggaggaccagcccctgcctgcccggcggctgagcagtgactgcagcgtgacccaggagaggaagcagatccactgcctgtctgaagatgagctgagcagcagcaccagcagcacagacaagagtgatggagactatggagagggcaagggccagaccaatgagatcaatgccctggtgcagctgatgacccagaccctgaagctggacagcaaggagagctgtgaagatgtgcctgtggccaaccctgtgtctgagttcaagctgcacaggaagtacagagacaccctcatcctgcacggcaaggtggccgaggaggccgaggagatccacttcaaggagctgcccagcgccatcatgcctggcagcgagaagatccggcggctggtggaggtgctgaggacagatgtgatccggggcctgggcgtgcagctgctggagcaggtgtatgacctgctggaggaggaggatgaatttgaccgggaggtgcggctgcgggagcacatgggagagaagtacaccacctacagcgtgaaggcccggcagctgaagttctttgaggagaacatgaacttctag

SEQ ID NO: 135722 - DNA, 2526 bp, Artificial Sequence
  derived and/or modified sequence
atgcccctggccgcctactgctacctgcgggtggtgggcaagggcagctacggggaggtgacactcgtgaagcaccgtcgagacggcaagcagtacgtgattaaaaaactgaatttgcgtaatgcctcctcccgcgaaaggagagcggcggagcaagaagcacagttgctttcccagcttaaacaccccaacatcgtcacttacaaagaaagctgggagggcggagatgggctgctgtacattgtaatggggttttgcgaaggcggtgatctctaccgtaagctgaaggagcagaaggggcaactcctacctgagaaccaggtcgttgaatggtttgtccaaatcgcaatggccctccaataccttcatgagaaacatattctgcaccgagacctcaagacacagaacgtatttttgactcgcaccaacatcattaaagtcggggacctcgggatcgcccgggtgctcgagaatcactgtgatatggcgtccactttgatcggcaccccttactacatgtcccccgagctgtttagcaacaaaccgtacaattataagtcagatgtctgggccttgggctgctgtgtatatgaaatggccacactgaagcacgcatttaacgcaaaagacatgaattccctcgtctatcgaattatagagggtaaactgcctccgatgcccagagactactcacctgaactggcggaattaatcaggacaatgctgagcaaaaggccggaagaacgccccagtgtaagatccatcctcaggcaaccctatattaagcggcagatatcgttctttttggaggcaaccaaaattaaaaccagcaagaataacatcaagaacggtgactctcaatccaagccgttcgccacagttgtttcgggcgaagccgagagcaatcacgaagtgattcacccccagcccctgtcgtccgaaggctcacaaacttacattatgggagagggtaagtgcctctcccaggagaagccccgggcatctggactattgaagtctcctgctagtctgaaggcacacacgtgtaaacaagacctcagcaataccaccgagctcgccaccatttcttccgtgaacatcgatattctgccggcaaagggacgagattcagtctctgatgggtttgttcaggagaaccagcctaggtatcttgatgcatcaaatgaattgggcggtatctgtagcatttctcaggtggaagaagaaatgcttcaagacaataccaagtcgtccgctcagccagaaaatttgattcccatgtggtctagtgatatcgtgactggcgaaaaaaatgagcccgtcaaaccattgcagccactgataaaagaacagaagcctaaagaccagtccctggctctgtctcctaagctcgagtgttcagggaccatcctcgctcacagtaacctacgactccttggatctagtgattctccggccagcgctagccgagtggctggaattactggcgtgtgccaccacgctcaagaccaggtggcgggtgaatgcatcatagagaagcagggtcgtatccatcctgatctgcagccccacaacagtggaagcgagccatccctcagccgtcagagaagacagaagaggcgggagcagacggaacacaggggggagaagcgccaggtgcgcagagatttgttcgcgttccaagagagtcctccccgctttctcccatcccaccctatagtgggcaaggtggatgtcacgtctacgcagaaggaggctgaaaatcagcggcgagtcgtgaccggatccgtttccagttccagaagcagcgaaatgtcatccagcaaggatagacccctgtcggccagggagcggagacggttgaaacagagccaggaagaaatgtcaagcagtggcccatcagtgcgcaaagcttcactcagtgttgcggggcccggtaaaccccaggaggaggaccagccgctgcctgcacgcagactgtcatccgattgctccgtgacgcaagaacgtaaacagatacactgcctatctgaggatgagctgagctcctccacctcttccacagataaatcggatggagattacggagaaggcaaagggcaaacaaacgagattaatgctctggtgcaacttatgacccaaacgctgaagctcgattccaaggagagctgtgaagacgtgccagtggcaaacccagtctccgagttcaagctacacagaaaataccgagacacgcttattttgcacggcaaggtcgccgaggaggctgaggaaatccacttcaaagagcttccatccgccatcatgcctggttctgaaaaaatccgccggctggtggaagttctgcgcaccgacgtcatccgcggcttgggcgtgcagctgctcgagcaggtttacgacttgctggaggaagaagatgaatttgatagggaggtgcggttaagagaacacatgggcgagaaatacacaacctattccgtgaaagctagacagcttaagttttttgaagagaatatgaatttttag

SEQ ID NO: 135723 - DNA, 2526 bp, Artificial Sequence
  derived and/or modified sequence
atgcctctcgctgcttattgctatctacgtgtggtcgggaaaggaagctatggggaggtaacactggtgaagcatcgtagagatgggaagcaatacgttattaaaaagctcaaccttcgtaacgcttctagccgggagaggagagcagcggaacaggaggcacagttgctcagccagttaaaacatccgaatatcgtcacatataaagagtcttgggaaggcggagacggcttgctgtacattgtcatggggttttgcgaagggggtgatttatacagaaagctcaaggaacagaagggacagctgctgcccgaaaaccaggtcgtggagtggtttgtgcagattgctatggcactgcagtacctgcatgagaagcatattctgcatagggatctgaagactcaaaacgtttttttaacccggaccaacattattaaagttggggatctcggcattgctcgcgtgctagaaaaccactgcgatatggcctccaccttaattggtactccgtattacatgagtcccgaactgtttagcaacaaaccctacaattataaatccgacgtgtgggcgcttggttgttgcgtctacgaaatggctactctgaaacacgctttcaatgccaaggatatgaacagcttggtatacaggataatcgaggggaagctgcctcccatgcccagagactatagtcccgagctggccgaactgatacgaaccatgctttcaaaacggcctgaggagaggccttccgtgagatcgattctgcgtcagccatatataaagcgccagatcagctttttcctggaggccaccaagatcaaaacttcgaaaaacaacatcaagaacggcgactcccagagcaaaccatttgctacagttgtgtcaggcgaagcagagagcaatcacgaggtgattcaccctcagcctctgagtagcgaggggagtcagacttacattatgggggaaggcaagtgtctgtctcaggagaagccccgagccagcggactactgaagtctcccgctagccttaaagctcatacttgtaagcaggacctgtcgaacaccaccgaactggctacaatcagctctgtcaacattgacatcttgcctgccaaaggccgagatagcgtgtccgatggcttcgtccaggagaatcagcctcgatatctggatgcaagcaatgagctgggtgggatctgcagcatcagtcaagttgaggaggaaatgctacaggacaatactaagagttctgcacagcctgagaacctaatccccatgtggagcagtgacatcgtgacgggcgaaaaaaatgaacctgtgaagccgttgcaaccattgatcaaggagcagaaacctaaagaccaatccctggcactgagccctaagctggaatgttctggaactattctggcccatagcaacttacgcctactgggctctagtgactccccagcatctgcttctcgcgtcgcgggtattactggtgtgtgccaccatgcccaggaccaggtcgccggtgaatgcataatcgaaaagcagggtagaatccaccccgacctccagccccacaattccggcagtgagcccagtctgagccgccaaaggaggcagaagcgcagggaacagaccgagcaccggggagagaagaggcaggtgcgacgagatctgtttgccttccaggagtcaccaccccgattcctcccttctcaccccatcgtgggcaaggtcgacgtgacatccacccagaaagaggccgagaaccaacgtcgcgtggtgaccggatccgtcagtagtagccgctcttctgaaatgagtagtagtaaagaccgcccactaagcgccagggaacgaagaagactcaagcagagtcaggaggagatgagctcttctggaccgagcgtgcggaaggcttcattgagcgtcgcaggtcctggcaagccacaggaggaagaccagcccttgccagccagaagactttctagtgattgctccgttacccaggaacgaaaacagatacactgcctctccgaggacgagctgtcttcgtcaacctcctccacagacaagtctgatggcgattacggagagggtaagggccagaccaatgaaattaatgcgctagtgcagcttatgactcaaacgctcaaactcgactctaaagagtcttgtgaggatgttccagtcgccaatccggtctccgagttcaagcttcaccggaagtatcgcgataccctgatcttgcatgggaaagtggcggaggaggcggaagagatccacttcaaagaacttccgagtgccataatgcctggaagcgaaaagatcagacggctggtcgaggtcttgcgcactgacgtgattcggggactcggcgtgcaactgcttgagcaggtctatgatctcctggaagaggaggatgagttcgaccgggaagtacgtctaagagaacatatgggtgagaaatatactacatattcagtgaaggctcgccagctgaagtttttcgaggaaaatatgaacttctag

SEQ ID NO: 135724 - DNA, 3722 bp, Artificial Sequence
  derived and/or modified sequence
agcatgcgcagaactgctcccggcccggatcgctatggcagcggcgtcgtcgcgggccgggccccagcaatcccgcccgggcccggctgcctcaacagccgcccccactgccccctctcgggcatgaaccgagcttcttgttgccgcccgctgccctacccgccgctgccgccgcatcccgactctgggccagcgctgggaacatgcccctggccgcctactgctacctgcgggtcgtgggcaaggggagctatggagaggtgacgcttgtgaagcaccggcgggacggcaagcagtatgtcatcaaaaaactgaacctccgaaatgcctctagccgagagcggcgagctgctgaacaggaagcccagctcttgtctcagttgaagcatcccaacattgtcacctacaaggagtcatgggaaggaggagatggtctgctctacattgtcatgggcttctgtgaaggaggtgatttgtaccgaaagctcaaggagcagaaagggcagcttctgcctgagaatcaggtggtagagtggtttgtacagatcgccatggctttgcagtatttacatgaaaaacacatccttcatcgagatctgaaaactcaaaatgtcttcctaacaagaacaaacatcatcaaagtaggggacctaggaattgcccgagtgttagagaaccactgtgacatggctagcaccctcattggcacaccctactacatgagccctgaattgttctcaaacaaaccctacaactataagtctgatgtttgggctctaggatgctgtgtctatgaaatggccaccttgaagcatgctttcaatgcaaaagatatgaattctttagtttatcggattattgaaggaaagctgccaccaatgccaagagattacagcccagagctggcagaactgataagaacaatgctgagcaaaaggcctgaagaaaggccgtctgtgaggagcatcctgaggcagccttatataaagcggcaaatctccttctttttggaggccacaaagataaaaacctccaaaaataacattaaaaatggtgactctcaatccaagccttttgctacagtggtttctggagaggcagaatcaaatcatgaagtaatccacccccaaccactctcttctgagggctcccagacatatataatgggtgaaggcaaatgtttgtcccaggagaaacccagggcctctggtctcttgaagtcacctgccagtctgaaagcccatacctgcaaacaggacttgagcaataccacagaactagccacaatcagtagcgtaaatattgacatcttacctgcaaaagggagggattcagtgagtgatggctttgttcaggagaatcagccaagatatttggatgcctctaatgagttaggaggtatatgcagtatttctcaagtggaagaggagatgctgcaggacaacactaaatccagtgcccagcctgaaaacctgattcccatgtggtcctctgacattgtcactggggaaaagaatgaaccagtgaagcctctgcagcccctaatcaaagaacaaaagccaaaggaccagagtcttgccctgtcgcccaagctggagtgcagtggcacaatcttggctcacagcaacctccgcctcctgggttcaagtgattctccagcctcagcctcccgagtagctgggattacaggcgtgtgccaccacgcccaggatcaagttgctggtgaatgtattatagaaaaacagggcagaatccacccagatttacagccacacaactctgggtctgaaccttccctgtctcgacagcgacggcaaaagaggagagaacagactgagcacagaggggaaaagagacaggtccgcagagatctctttgctttccaagagtcgcctcctcgatttttgccttctcatcccattgttgggaaagtggatgtcacatcaacacaaaaagaggctgaaaaccaacgtagagtggtcactgggtctgtgagcagttcaaggagcagtgagatgtcatcatcaaaggatcgaccattatcagccagagagaggaggcgactaaagcagtcacaggaagaaatgtcctcttcaggcccttcagtgaggaaagcgtctctgagtgtagcagggccaggaaaaccccaggaagaagaccagcccttgcctgcccgacggctctcctctgactgcagcgtcactcaggaaaggaaacagattcattgtctgtctgaggatgagttaagttcttctacaagttcaactgataagtcagatggggattacggggaagggaaaggtcagacaaatgaaattaatgccttggtacaattgatgactcagaccctgaaactggattctaaagagagctgtgaagatgtcccggtagcaaacccagtgtcagaattcaaacttcatcggaaatatcgggacacactgatacttcatgggaaggttgcagaagaggcagaggaaatccattttaaagagctaccttcagctattatgccaggttctgaaaagatcaggagactagttgaagtcttgagaactgatgtaattcgtggcctgggagttcagcttttagagcaggtgtatgatcttttggaggaggaggatgaatttgatagagaggtacgtttgcgggagcacatgggtgaaaagtatacaacttacagtgtgaaagctcgccagttgaaattttttgaagaaaacatgaatttttgagcatttgtcctaatctgctgccagaattaaagacctatttttagaggattttggcttaaaaagcaagggcaaacagtcatttggaagccactcaccactgttttatatctcttttttatatctctttggcgtttccctacagaaaagaaattggacagaacagaataatatgaagcaggatcacaaaagaaaaaaaactttggctttcatattctctttgtgaggacaaatctgttgtttgtttgattactgtttactgagccttaatccaccaagtttatatttagaattttatttttttaaggtactaattaacttaaacacagagctataaaatgctggattgaaaattttatattgtaatgtagagataaaagcagtaggagaaacaaatgacataatatgtcgtcataattcctgctattgttaataaccttaaggagtagttgataaattataaaattttaaaaagtcaattcagttctagaaatagatttaaagaatatgaagttctatctagtacttgagcagctgtatttcttttctacacattgatggacttttaatattttattctcatttaatataaacctcatctagggtatatacaaattaaaactgagacacattggctttgtaaatcagtatgtttttacataatggttttgttagatttatttttccatcagtgaaaacatttcttaaacacaaatttcatttccatttaagcaatttgtaagcaaagtccaggtccatttagtttttggatatatttaatgtttgtctcctgaagtttgtcttcatgtactgtaagatattagttgtctttccatgttttaaatgtatgattatatagcacatattttattagttgtttaataagaggtaatacccatctaggaaagaaattttatgaagttaaatacaagtcttgaatagtacattttcacttctgtattcgagggactctaaaaataaatattgctccagaaa

SEQ ID NO: 135725 - DNA, 828 bp, Artificial Sequence
  derived and/or modified sequence
atgagaagactgacggtggatgacttcgagattggccggcctttgggaaagggcaagtttggtaatgtgtatctggcaaggcttaaagagtctcacttcatcgtggcactgaaagtgttgtttaagtcccagatcgagaaggagggactggagcaccagttaaggcgcgagatcgagattcaggcccaccttcagcaccctaacattctgagactgtacaattatttccacgatgcccggcgcgtgtacctcatacttgagtacgcccctagaggtgagctgtataaggaacttcagaagagcgagaaacttgatgagcagaggacagccaccatcatagaggagctcgccgacgcactgacgtactgtcacgacaagaaggtcattcaccgtgacattaagcccgaaaatctcctgctgggctttcggggcgaggtgaaaatcgctgacttcggttggtcagtgcacacacctagcctaaggcgcaaaaccatgtgcgggaccttggattatcttccccctgaaatgatagagggtaggacgtacgacgagaaagtcgacctctggtgtattggagtcctctgttacgagcttctagtgggctatcctccatttgagtccgcaagtcacagtgaaacctacagacgtattctcaaagttgatgtgcggttcccactgagcatgccactgggggcgagagatctcatatctcggctgctgaggtatcagcctcttgagaggctccctttggcccagattctcaaacatccttgggtccaggcccacagccgtcgcgtcttgcccccatgtgcacagatggcttcatag

SEQ ID NO: 135726 - DNA, 828 bp, Artificial Sequence
  derived and/or modified sequence
atgaggcggctgactgtggatgactttgaaattggccggcccctgggcaagggcaagtttggaaatgtgtacctggcccggctgaaggagagccacttcatcgtggccctgaaggtgctcttcaagagccagatcgagaaggagggcctggagcaccagctgcggcgggagattgagatccaggcccacctgcagcaccccaacatcctgcggctgtacaactacttccatgatgcccggcgggtgtacctgatcctggagtatgcccccagaggagagctgtacaaggagctgcagaagtctgagaagctggatgagcagaggacagccaccatcatcgaggagctggctgatgccctgacctactgccacgacaagaaggtgatccaccgggacatcaagccagagaacctgctgctgggcttccggggggaggtgaagattgctgactttggctggagcgtgcacacccccagcctgcggaggaagaccatgtgtggcaccctggactacctgcccccagagatgattgagggccgcacctatgatgagaaggtggacctgtggtgcattggagtgctgtgctatgagctgctggtgggctaccccccatttgaaagtgccagccacagcgagacctaccgccgcatcctgaaggtggatgtgcgcttccccctgtccatgcccctgggcgcccgggacctgatcagccggctgctgcgctaccagcccctggagcggctgcccctggcccagatcctgaagcacccctgggtgcaggcccacagccggcgggtgctgcccccctgtgcccagatggccagctag

SEQ ID NO: 135727 - DNA, 828 bp, Artificial Sequence
  derived and/or modified sequence
atgcggcggctgaccgtggacgacttcgagatcggccggcccctgggcaagggaaagttcggtaatgtgtacctagctcggctgaaagagagccatttcattgtcgctttgaaagttctctttaagtctcagatcgaaaaggaagggttggagcatcagttaaggagagagatcgagatccaggcccatttacagcaccccaacatattaagactgtataactactttcacgacgcaaggagagtctacctgatcttggaatacgccccacggggagaactttacaaagagctccaaaagtctgaaaaacttgacgaacagagaactgccaccatcattgaggagctggccgacgcccttacatactgccacgacaagaaggtcatccaccgtgacatcaagcctgaaaaccttctgttaggctttagaggcgaggtaaaaatcgcagacttcggatggtcagtgcacaccccttccctgcgccgcaagacaatgtgtggcacattggattacctccctcctgagatgatagagggaagaacatacgacgaaaaagtggacctttggtgcataggagtcttatgctacgagctcctggtcggctacccccccttcgaatcagcctctcactctgaaacataccgacgaattcttaaggttgatgttcgattccccctgtccatgcctcttggggctcgggacctgattagtagacttcttcgatatcaaccgttggagagactgccactggctcagattctcaaacatccctgggtccaagctcactccagacgcgtgctacctccatgcgcgcagatggcctcctag

SEQ ID NO: 135728 - DNA, 828 bp, Artificial Sequence
  derived and/or modified sequence
atgagacgacttacagttgatgatttcgagatcggcagacccctcgggaagggcaaatttggcaacgtgtatcttgcccgattgaaagagtcccacttcatcgtagccctgaaggtgcttttcaaatcccaaatcgaaaaagaaggattggaacaccaattgcgcagagagatagaaatacaggcacacctacagcatcccaatatcctgagactgtacaactacttccacgatgctcgcagggtatacctgattctggagtacgctcctaggggggaactctacaaggaactccagaagtccgagaagttagatgagcaacgtacagcgacaattattgaagaactggcagatgctttaacctactgccacgacaagaaagtcattcaccgcgatattaagccagagaatttgctcctcggcttcaggggagaggtgaaaattgctgacttcggttggtcggttcacacccccagtctgcggcgaaaaacaatgtgtggcacattggattacttgcctccagagatgatcgaggggcgtacttacgacgaaaaagtcgacctctggtgtattggggttctctgctatgagctgctggtgggctatcccccttttgagagcgcttctcactcggaaacttataggcgcatactgaaagtggatgttaggtttccattatcaatgcctctgggcgctcgggatcttatcagcaggttacttaggtaccagccattagaaagactccctctggctcagatccttaaacacccatgggtccaggctcacagccggagagtcctgcctccctgtgcgcaaatggccagttag

SEQ ID NO: 135729 - DNA, 828 bp, Artificial Sequence
  derived and/or modified sequence
atgagaagactgaccgtggacgacttcgagatcggcagacccctgggcaagggcaagttcggcaacgtgtacctggccagactgaaggagagccacttcatcgtggccctgaaggtgctgttcaagagccagatcgagaaggagggcctggagcaccagctgagaagagagatcgagatccaggcccacctgcagcaccccaacatcctgagactgtacaactacttccacgacgccagaagagtgtacctgatcctggagtacgcccccagaggcgagctgtacaaggagctgcagaagagcgagaagctggacgagcagagaaccgccaccatcatcgaggagctggccgacgccctgacctactgccacgacaagaaggtgatccacagagacatcaagcccgagaacctgctgctgggcttcagaggcgaggtgaagatcgccgacttcggctggagcgtgcacacccccagcctgagaagaaagaccatgtgcggcaccctggactacctgccccccgagatgatcgagggcagaacctacgacgagaaggtggacctgtggtgcatcggcgtgctgtgctacgagctgctggtgggctacccccccttcgagagcgccagccacagcgagacctacagaagaatcctgaaggtggacgtgagattccccctgagcatgcccctgggcgccagagacctgatcagcagactgctgagataccagcccctggagagactgcccctggcccagatcctgaagcacccctgggtgcaggcccacagcagaagagtgctgcccccctgcgcccagatggccagctag

SEQ ID NO: 135730 - protein, 525 aa, Artificial Sequence
  derived and/or modified sequence
MRRRRRRDGFYPAPDFRDREAEDMAGVFDIDLDQPEDAGSEDELEEGGQLNESMDHGGVGPYELGMEHCEKFEISETSVNRGPEKIRPECFELLRVLGKGGYGKVFQVRKVTGANTGKIFAMKVLKKAMIVRNAKDTAHTKAERNILEEVKHPFIVDLIYAFQTGGKLYLILEYLSGGELFMQLEREGIFMEDTACFYLAEISMALGHLHQKGIIYRDLKPENIMLNHQGHVKLTDFGLCKESIHDGTVTHTFCGTIEYMAPEILMRSGHNRAVDWWSLGALMYDMLTGAPPFTGENRKKTIDKILKCKLNLPPYLTQEARDLLKKLLKRNAASRLGAGPGDAGEVQAHPFFRHINWEELLARKVEPPFKPLLQSEEDVSQFDSKFTRQTPVDSPDDSTLSESANQVFLGFTYVAPSVLESVKEKFSFEPKIRSPRRFIGSPRTPVSPVKFSPGDFWGRGASASTANPQTPVEYPMETSGIEQMDVTMSGEASAPLPIRQPNSGPYKKQAFPMISKRPEHLRMNL

SEQ ID NO: 135731 - DNA, 5375 bp, Artificial Sequence
  derived and/or modified sequence
ggctgcggcgggtccgggcccatgaggcgacgaaggaggcgggacggcttttacccagccccggacttccgagacagggaagctgaggacatggcaggagtgtttgacatagacctggaccagccagaggacgcgggctctgaggatgagctggaggaggggggtcagttaaatgaaagcatggaccatgggggagttggaccatatgaacttggcatggaacattgtgagaaatttgaaatctcagaaactagtgtgaacagagggccagaaaaaatcagaccagaatgttttgagctacttcgggtacttggtaaagggggctatggaaaggtttttcaagtacgaaaagtaacaggagcaaatactgggaaaatatttgccatgaaggtgcttaaaaaggcaatgatagtaagaaatgctaaagatacagctcatacaaaagcagaacggaatattctggaggaagtaaagcatcccttcatcgtggatttaatttatgcctttcagactggtggaaaactctacctcatccttgagtatctcagtggaggagaactatttatgcagttagaaagagagggaatatttatggaagacactgcctgcttttacttggcagaaatctccatggctttggggcatttacatcaaaaggggatcatctacagagacctgaagccggagaatatcatgcttaatcaccaaggtcatgtgaaactaacagactttggactatgcaaagaatctattcatgatggaacagtcacacacacattttgtggaacaatagaatacatggcccctgaaatcttgatgagaagtggccacaatcgtgctgtggattggtggagtttgggagcattaatgtatgacatgctgactggagcacccccattcactggggagaatagaaagaaaacaattgacaaaatcctcaaatgtaaactcaatttgcctccctacctcacacaagaagccagagatctgcttaaaaagctgctgaaaagaaatgctgcttctcgtctgggagctggtcctggggacgctggagaagttcaagctcatccattctttagacacattaactgggaagaacttctggctcgaaaggtggagcccccctttaaacctctgttgcaatctgaagaggatgtaagtcagtttgattccaagtttacacgtcagacacctgtcgacagcccagatgactcaactctcagtgaaagtgccaatcaggtctttctgggttttacatatgtggctccatctgtacttgaaagtgtgaaagaaaagttttcctttgaaccaaaaatccgatcacctcgaagatttattggcagcccacgaacacctgtcagcccagtcaaattttctcctggggatttctggggaagaggtgcttcggccagcacagcaaatcctcagacacctgtggaatacccaatggaaacaagtggcatagagcagatggatgtgacaatgagtggggaagcatcggcaccacttccaatacgacagccgaactctgggccatacaaaaaacaagcttttcccatgatctccaaacggccagagcacctgcgtatgaatctatgacagagcaatgcttttaatgaatttaaggcaaaaaaggtggagagggagatgtgtgagcatcctgcaaggtgaaacgactcaaaatgacagtttcagagagtcaatgtcattacatagaacacttcagacacaggaaaaataaacgtggattttaaaaaatcaatcaatggtgcaaaaaaaaacttaaagcaaaatagtattgctgaactcttaggcacatcaattaattgattcctcgcgacatcttctcaaccttatcaaggattttcatgttgatgactcgaaactgacagtattaagggtaggatgttgcttctgaatcactgttgagttctgattgtgttgaagaagggttatcctttcattaggcaaagtacaaaattgcctataatacttgcaactaaggacaaattagcatgcaagcttggtcaaactttttccagcaaaatggaagcaaagacaaaagaaacttaccaattgatgttttacgtgcaaacaacctgaatcttttttttatataaatatatatttttcaaatagatttttgattcagctcattatgaaaaacatcccaaactttaaaatgcgaaattattggttggtgtgaagaaagccagacaacttctgtttcttctcttggtgaaataataaaatgcaaatgaatcattgttaaccacagctgtggctcgtttgagggattggggtggacctggggtttattttcagtaacccagctgcaatacctgtctgtaatatgagaaaaaaaaaatgaatctatttaatcatttctacttgcagtactgctatgtgctaagcttaactggaagccttggaatgggcataagttgtatgtcctacatttcatcattgtcccgggcctgcattgcactggaaaaaaaaatcgccacctgttcttacaccagtatttggttcaagacaccaaatgtcttcagcccatggctgaagaacaacagaagagagtcaggataaaaaatacatactgtggtcggcaaggtgagggagatagggatatccaggggaagagggtgttgctgtggcccactctctgtctaatctctttacagcaaattggtaagattttcagttttacttctttctactgtttctgctgtctaccttccttatatttttttcctcaacagttttaaaaagaaaaaaaggtctatttttttttctcctatacttgggctacattttttgattgtaaaaatatttgatggccttttgatgaatgtcttccacagtaaagaaaacttagtggcttaatttaggaaacatgttaacaggacactatgtttttgaaattgtaacaaaatctacataaatgatttacaggttaaaagaataaaaataaaggtaactttacctttcttaaatatttcctgccttaaagagagcatttccatgactttagctggtgaaagggtttaatatctgcagagctttataaaaatatatttcagtgcatactggtataatagatgatcatgcagttgcagttgagttgtatcaccttttttgtttgtcttttataatgtcttcagtctgagtgtgcaaagtcaatttgtaatattttgcaaccctaggatttttttaaatagatgctgcttgctatgttttcaaacctttttgagccataggatccaagccataaaattctttatgcatgttgaattcagtcagaaaagagcaaggctttgctttttgaaattgcaactcaaatgagatgggatgaaatcctatgacagtaagcaaaaacagaaccatgaaaaatgattggacatacaccttttcaattgtggcaataattgaaagaatcgataaaagttcatctttggacagaaagcctttaaaaaaaaaatcactccctcttccccctcctcccttattgcagcagcctactgagaactttgactgttgctggtaaattagaagctacaataataattaagggcagaaattatacttaaaaagtgcagatccttgttctttgacaatttgtgatgtctgaaaaaacagaacccgaaaagctatggtgatatgtacaggcattatttcagactgtaaatggcttgtgatactcttgatacttgttttcaaatatgtttactaactgtagtgttgactgcctgaccaaattccagtgaaacttatacaccaaaatattcttcctaggtcctatttgctagtaacatgagcactgtgattggctggctataaccaccccagttaaaccattttcataattagtagtgccagcaatagtggcaaacactgcaacttttctgcataaaaagcattaattgcacagctaccatccacacaaatacatagtttttctgacttcacatttattaagtgaaatttatttcccatgctgtggaaagtttattgagaacttgtttcataaatggatatccctactatgactgtgaaaacatgtcaagtgtcacattagtgtcacagacagaaagcacacacctatgcaatatggcttatctatatttatttgtaaaaatccaagcatagtttaaaatatgatgtcgatattactagtcttgagtttctaagagggttctttatgttataccaggtaagtgtataaaagagattaagtgcttttttttcatcacttgattattttctttaaaatcagctattacaggatatttttttattttatacatgctgttttttaattaaaatataatcactgaagtttactaatttgattttataaggtttgtagcattacagaataactaaactgggatttataaaccagctgtgattaacaatgtaaagtattaattattgaactttgaaccagatttttaggaaaattatgttctttttccccctttatggtcttaactaatttgaatccttcaagaaggatttttccatactattttttaagatagaagataatttgtgggcaggggtggaggatgcatgtatgatactccataaattcaacattctttactataggtaatgaatgattataaacaagatgcatcttagatagtattaatatactgagccttggattatatatttaatataggacctattttgaatattcagttaatcatatggttcctagcttacaagggctagatctaagattattcccatgagaaatgttgaatttatgaagaatagattttaaggctttgaaaatggttaatttctcaaaaacatcaatgtccaaacatctaccttttttcataggagtagacactagcaagctggacaaactatcacaaaagtatttgtcacacataacctgtggtctgttgctgattaatacagtactttttcttgtgtgattcttaacattatagcacaagtattatctcagtggattatccggaataacatctgaaagatgggttcatctatgtttgtgtttgctctttaaactattgtttctcctatcccaagttcgctttgcatctatcagtaaataaaattcttcagctgccttattaggagtgctatgagggtaacacctgttctgcttttcatcttgtatttagttgactgtattatttgatttcggattgaatgaatgtaaatagaaattaaatgcaaatttgaatgaacataaatagaagtgatttatttttttattatcttaaagataggaaggaattagtatacgtatcaggtgtataaatggtttaaatttattttaacatgtcagatgtgttcaagttgtcatataaataaactatgtatgtaaggaa

SEQ ID NO: 135732 - DNA, 2046 bp, Artificial Sequence
  derived and/or modified sequence
agggaagctgaggacatggcaggagtgtttgacatagacctggaccagccagaggacgcgggctctgaggatgagctggaggagggggaagcgctcagctgttagaagtgacagctgaaaacttctgtcgggagtagcactgccgctgctgttacagccaccaggagttttatttcgggagcaagggggctctgctgcatcttccaatcttccaggggtcagttaaatgaaagcatggaccatgggggagttggaccatatgaacttggcatggaacattgtgagaaatttgaaatctcagaaactagtgtgaacagagggccagaaaaaatcagaccagaatgttttgagctacttcgggtacttggtaaagggggctatggaaaggtttttcaagtacgaaaagtaacaggagcaaatactgggaaaatatttgccatgaaggtgcttaaaaaggcaatgatagtaagaaatgctaaagatacagctcatacaaaagcagaacggaatattctggaggaagtaaagcatcccttcatcgtggatttaatttatgcctttcagactggtggaaaactctacctcatccttgagtatctcagtggaggagaactatttatgcagttagaaagagagggaatatttatggaagacactgcctgcttttacttggcagaaatctccatggctttggggcatttacatcaaaaggggatcatctacagagacctgaagccggagaatatcatgcttaatcaccaaggtcatgtgaaactaacagactttggactatgcaaagaatctattcatgatggaacagtcacacacacattttgtggaacaatagaatacatggcccctgaaatcttgatgagaagtggccacaatcgtgctgtggattggtggagtttgggagcattaatgtatgacatgctgactggagcacccccattcactggggagaatagaaagaaaacaattgacaaaatcctcaaatgtaaactcaatttgcctccctacctcacacaagaagccagagatctgcttaaaaagctgctgaaaagaaatgctgcttctcgtctgggagctggtcctggggacgctggagaagttcaagctcatccattctttagacacattaactgggaagaacttctggctcgaaaggtggagcccccctttaaacctctgttgcaatctgaagaggatgtaagtcagtttgattccaagtttacacgtcagacacctgtcgacagcccagatgactcaactctcagtgaaagtgccaatcaggtctttctgggttttacatatgtggctccatctgtacttgaaagtgtgaaagaaaagttttcctttgaaccaaaaatccgatcacctcgaagatttattggcagcccacgaacacctgtcagcccagtcaaattttctcctggggatttctggggaagaggtgcttcggccagcacagcaaatcctcagacacctgtggaatacccaatggaaacaagtggcatagagcagatggatgtgacaatgagtggggaagcatcggcaccacttccaatacgacagccgaactctgggccatacaaaaaacaagcttttcccatgatctccaaacggccagagcacctgcgtatgaatctatgacagagcaatgcttttaatgaatttaaggcaaaaaaggtggagagggagatgtgtgagcatcctgcaaggtgaaacgactcaaaatgacagtttcagagagtcaatgtcattacatagaacacttcagacacaggaaaaataaacgtggattttaaaaaatcaatcaatggtgcaaaaaaaaacttaaagcaaaatagtattgctgaactcttaggcacatcaattaattgattcctcgcgacatcttctcaaccttatcaaggattttcatgttgatgactcgaaactgacagtattaagggtaggatgttgcttctgaatcactgttgagttctgattgtgttgaagaagggttatcctttcattaggcaaagtacaaaattgcctataata

SEQ ID NO: 135733 - DNA, 1578 bp, Artificial Sequence
  derived and/or modified sequence
atgaggcgccggaggcgacgcgacgggttctacccagctcctgacttccgagaccgagaagccgaggacatggccggagtgttcgacatcgatctcgaccagcccgaagatgcaggctcagaagacgaactagaggagggcggccagctcaacgagagcatggaccacgggggggtgggcccctatgagcttgggatggagcattgtgagaaattcgaaataagtgagactagcgtaaacagggggcctgagaaaattagacccgagtgtttcgaactgctgcgggtgctcggcaaaggtggatacggcaaggtgtttcaggtaaggaaggttaccggggccaatactggcaagatctttgccatgaaagtgctcaagaaggctatgatagtgcggaacgcaaaggatacggcgcacacaaaggcagagcggaacattctcgaggaggttaagcatcctttcattgtagatttgatctacgcatttcaaaccggggggaaactttatctgatcctagagtacctcagtggtggggagctttttatgcagctggaacgcgagggaatcttcatggaagatactgcatgtttctacttagctgaaatttctatggctctcggccatctgcaccaaaaaggcatcatttacagagaccttaaaccagagaacatcatgttgaatcatcaggggcatgtaaagctgacagactttggcctttgcaaagaaagcattcacgacggaacagttacccataccttctgcgggaccatcgagtatatggcaccagagatcctgatgcggagtggccataacagagctgtggactggtggagcttaggtgctctcatgtacgacatgctcacaggggctccgccattcaccggcgaaaaccgtaagaagactatcgacaagattctgaaatgcaaattgaatttaccaccctatcttacccaagaggccagggatctactgaaaaaattgctgaagcggaacgccgcaagcagactgggcgccgggcccggcgatgcaggggaggtgcaggctcatccattctttagacatatcaactgggaagagctgctggcgcgcaaggttgaaccaccttttaaacccctgctccaaagcgaagaggatgtgtctcagttcgactcgaagttcaccagacaaacccccgtagattccccggacgattccacgctctctgagtctgccaatcaggtttttcttggatttacctacgtagcccccagcgttttagaatcggttaaagaaaagttcagtttcgaaccaaagatccgcagcccaaggagatttatcggcagtccaagaacacctgtctcaccagtcaagttttcccccggcgacttttgggggcgtggtgcgagcgctagtaccgccaacccccagacccctgttgagtatcccatggagacctctgggattgagcagatggacgtgacaatgagcggggaagcgagcgctccgttacctattaggcagcccaattcaggcccgtataaaaagcaggccttcccaatgatttctaagcgcccagaacacctcagaatgaacctttag

SEQ ID NO: 135734 - DNA, 1578 bp, Artificial Sequence
  derived and/or modified sequence
atgagaagaagaagaagaagagatggcttctacccagccccagacttccgggaccgggaggccgaggacatggccggcgtgtttgacatcgacctggaccagccagaagatgctggctctgaagatgagctggaggagggcggccagctgaatgaatccatggaccacggcggcgtgggcccctatgagctgggcatggagcactgtgagaagtttgagatcagcgagacctctgtgaacagaggccctgagaagatccggccagaatgttttgagctgctgcgggtgctgggcaaaggaggctacggcaaggtgttccaggtgaggaaggtgactggagccaacacaggcaagatctttgccatgaaggtgctgaagaaggccatgattgtgagaaatgccaaggacacagcccacaccaaggccgagaggaacatcctggaggaggtgaagcaccccttcatcgtggacctgatctatgccttccagacaggaggcaagctgtacctgatcctggagtacctgagcggcggggagctgttcatgcagctggagcgggagggcatcttcatggaggacacagcctgcttctacctggccgagatctccatggccctgggccacctgcaccagaagggcatcatctacagagacctgaagccagagaacatcatgctgaaccaccagggccacgtgaagctgacagactttggcctgtgcaaggagagcatccatgatggcaccgtgacccacaccttctgtggcaccatcgagtacatggcccctgagatcctgatgaggagcggccacaacagagctgtggactggtggagcctgggcgccctgatgtatgacatgctgaccggggccccacccttcaccggggagaacaggaagaagaccatcgacaagatcctgaagtgcaagctgaacctgcccccctacctgacccaggaggcccgggacctgctgaagaagctgctgaagagaaatgctgccagccggctgggcgccggccctggagatgctggggaggtgcaggcccaccccttcttccgccacatcaactgggaggagctgctggccaggaaggtggagccccccttcaagcccctgctgcagagtgaagaagatgtgtcccagtttgacagcaagttcacccggcagacccctgtggacagcccagatgacagcaccctgtctgagagcgccaaccaggtgttcctgggcttcacctacgtggcccccagcgtgctggagagcgtgaaggagaagttctcctttgagcccaagatccgcagcccccggcgcttcatcggcagccccaggacccctgtgtcccctgtgaagttcagccctggggacttctggggccgcggggccagcgccagcacagccaacccccagacccctgtggagtaccccatggagaccagcggcatcgagcagatggatgtgaccatgtctggagaggccagcgcccccctgcccatccggcagcccaacagcggcccctacaagaagcaggccttccccatgatcagcaagaggcctgagcacctgaggatgaacctgtag

SEQ ID NO: 135735 - DNA, 1578 bp, Artificial Sequence
  derived and/or modified sequence
atgcggcggcggcggcggcgggacggcttctaccccgcccccgacttcagggatcgcgaagccgaggacatggcaggggtcttcgacattgatctagatcaacccgaggatgcaggaagcgaggatgagctggaggagggcggtcagcttaacgaatcaatggaccatggtggggtgggcccctatgaacttgggatggaacattgtgagaagtttgaaatttcagaaacgtctgtcaatcgagggcctgagaaaataaggcctgagtgttttgagcttctgcgcgtgctggggaaaggcggttatgggaaagtgttccaggtgcgaaaagtcaccggtgctaacactggaaagattttcgctatgaaggttttaaaaaaggccatgattgttagaaatgccaaggacactgctcatacaaaagctgaacggaatatactggaagaagtgaaacatccttttattgtagacctgatctacgcatttcagactgggggcaaactatacctcattttggaatacctgtctggcggggagctgttcatgcagttagaacgagaaggaatttttatggaggatacggcctgcttctatctggcagagatttccatggccctgggccatctccatcagaaaggcatcatctaccgggatctcaaacccgaaaatatcatgctgaaccatcaggggcacgtcaagctgaccgacttcggcttgtgcaaggagagcatacatgacggtactgtgacacataccttttgcggaacaatcgagtacatggctccagaaatactgatgcggagcggccacaatcgggcagtcgactggtggtccttgggtgcactcatgtatgatatgctgacaggtgcaccacccttcacgggtgaaaatcggaaaaagacaatagacaaaattcttaagtgcaagttaaatctgccgccttacctaacacaggaagcccgagacctcctgaagaaactcctcaaacggaacgccgcttccaggttgggtgctggtcctggagatgctggagaagttcaagcacacccattcttcagacacattaactgggaggagctgctagctagaaaagtcgagccaccctttaaaccactgctccagtctgaagaggacgtctctcagtttgacagcaaattcactagacagacaccggttgatagccctgacgatagcaccctgagtgaatccgcgaaccaggtcttcctgggcttcacttacgtcgcaccctctgtcttggagtcagttaaagagaaattttcttttgaaccgaagatccggagtccccggaggttcatcggatcccctcgcacgcccgtgtcgccggtgaaattttcccccggggatttttggggtcgtggggcatccgcctccactgccaatccacagacaccagtggagtacccaatggaaacttcaggtatcgaacagatggatgtgacaatgtctggagaggcatccgctccactacctatccgccagcctaattcaggtccttacaagaaacaggcctttccaatgatcagcaagcgacctgagcacctccggatgaatctgtag

SEQ ID NO: 135736 - DNA, 1578 bp, Artificial Sequence
  derived and/or modified sequence
atgcgacggagaaggcgtagagacggattttaccctgcccctgactttagagacagagaagcggaggatatggcaggcgttttcgatattgatctggaccagccagaggacgcaggcagcgaggacgagctcgaagagggcggacagctcaacgagagcatggatcatgggggagtgggtccttacgaactgggcatggagcactgcgagaagtttgaaattagcgaaacaagcgtgaacaggggaccagagaaaatccggccagagtgctttgagctcttacgcgtcctaggcaagggaggatacggaaaggtgtttcaggttagaaaagtgacaggcgctaatacagggaagattttcgctatgaaggtacttaaaaaagctatgattgtccggaacgcgaaggacaccgcccacactaaggctgagagaaacatccttgaagaagtgaaacaccccttcattgtggacctgatttacgcctttcagactggaggtaagctgtacctaatccttgagtacctcagcggcggagaactgtttatgcaactagagcgcgagggcatttttatggaggatacagcctgcttctacctggctgagataagtatggctctcggacatttgcaccagaagggcattatttatagggacctgaagccggaaaatataatgctcaaccatcagggccatgtgaagctcactgatttcgggctgtgtaaggagtctatccatgatggcaccgttacacataccttctgcgggacaatagagtacatggccccagaaatacttatgagaagcggacataaccgagctgtcgactggtggtcgctcggcgcacttatgtatgacatgctaacaggcgctccgccatttaccggcgaaaaccgaaaaaagacgatagacaaaatcctgaagtgcaagttaaacctgcctccttaccttacgcaagaggccagagacctcctcaagaagctcttgaagaggaatgcagcctccagactgggcgctggccctggtgatgccggagaagtacaggctcacccttttttcagacacataaattgggaggaactactggcccgaaaagtggagccccctttcaagcctttactccaatctgaggaagacgtgtctcagtttgattcaaaatttacccgtcagaccccggtggattcaccagacgattctactctatcagaatccgccaatcaggtgttcctaggattcacctacgtggcccctagtgtactcgaatccgttaaggagaaattcagctttgagccaaagatacgttccccacggcgtttcatcggctctcctcgcacccctgtatccccagtcaagttttcccccggagatttctggggaaggggggcttccgccagcaccgctaatccccagacccccgtggagtacccaatggagacctctgggatcgaacagatggacgtgaccatgtccggcgaagcgtctgccccattacccatacgccagcctaacagcggcccatataagaagcaggcattccccatgatttcaaaaagaccggaacatcttcggatgaacctctag

SEQ ID NO: 135737 - DNA, 1578 bp, Artificial Sequence
  derived and/or modified sequence
atgagaagaagaagaagaagagacggcttctaccccgcccccgacttcagagacagagaggccgaggacatggccggcgtgttcgacatcgacctggaccagcccgaggacgccggcagcgaggacgagctggaggagggcggccagctgaacgagagcatggaccacggcggcgtgggcccctacgagctgggcatggagcactgcgagaagttcgagatcagcgagaccagcgtgaacagaggccccgagaagatcagacccgagtgcttcgagctgctgagagtgctgggcaagggcggctacggcaaggtgttccaggtgagaaaggtgaccggcgccaacaccggcaagatcttcgccatgaaggtgctgaagaaggccatgatcgtgagaaacgccaaggacaccgcccacaccaaggccgagagaaacatcctggaggaggtgaagcaccccttcatcgtggacctgatctacgccttccagaccggcggcaagctgtacctgatcctggagtacctgagcggcggcgagctgttcatgcagctggagagagagggcatcttcatggaggacaccgcctgcttctacctggccgagatcagcatggccctgggccacctgcaccagaagggcatcatctacagagacctgaagcccgagaacatcatgctgaaccaccagggccacgtgaagctgaccgacttcggcctgtgcaaggagagcatccacgacggcaccgtgacccacaccttctgcggcaccatcgagtacatggcccccgagatcctgatgagaagcggccacaacagagccgtggactggtggagcctgggcgccctgatgtacgacatgctgaccggcgccccccccttcaccggcgagaacagaaagaagaccatcgacaagatcctgaagtgcaagctgaacctgcccccctacctgacccaggaggccagagacctgctgaagaagctgctgaagagaaacgccgccagcagactgggcgccggccccggcgacgccggcgaggtgcaggcccaccccttcttcagacacatcaactgggaggagctgctggccagaaaggtggagccccccttcaagcccctgctgcagagcgaggaggacgtgagccagttcgacagcaagttcaccagacagacccccgtggacagccccgacgacagcaccctgagcgagagcgccaaccaggtgttcctgggcttcacctacgtggcccccagcgtgctggagagcgtgaaggagaagttcagcttcgagcccaagatcagaagccccagaagattcatcggcagccccagaacccccgtgagccccgtgaagttcagccccggcgacttctggggcagaggcgccagcgccagcaccgccaacccccagacccccgtggagtaccccatggagaccagcggcatcgagcagatggacgtgaccatgagcggcgaggccagcgcccccctgcccatcagacagcccaacagcggcccctacaagaagcaggccttccccatgatcagcaagagacccgagcacctgagaatgaacctgtag

SEQ ID NO: 135738 - protein, 780 aa, Artificial Sequence
  derived and/or modified sequence
MDEQAGPGVFFSNNHPGAGGAKGLGPLAEAAAAGDGAAAAGAARAQYSLPGILHFLQHEWARFEVERAQWEVERAELQAQIAFLQGERKGQENLKKDLVRRIKMLEYALKQERAKYHKLKYGTELNQGDMKPPSYDSDEGNETEVQPQQNSQLMWKQGRQLLRQYLQEVGYTDTILDVKSKRVRALLGFSSDVTDREDDKNQDSVVNGTEAEVKETAMIAKSELTDSASVLDNFKFLESAAADFSDEDEDDDVDGREKSVIDTSTIVRKKALPDSGEDRDTKEALKEFDFLVTSEEGDNESRSAGDGTDWEKEDQCLMPEAWNVDQGVITKLKEQYKKERKGKKGVKRPNRSKLQDMLANLRDVDELPSLQPSVGSPSRPSSSRLPEHEINRADEVEALTFPPSSGKSFIMGADEALESELGLGELAGLTVANEADSLTYDIANNKDALRKTWNPKFTLRSHFDGIRALAFHPIEPVLITASEDHTLKMWNLQKTAPAKKSTSLDVEPIYTFRAHKGPVLCVVMSSNGEQCYSGGTDGLIQGWNTTNPNIDPYDSYDPSVLRGPLLGHTDAVWGLAYSAAHQRLLSCSADGTLRLWNTTEVAPALSVFNDTKELGIPASVDLVSSDPSHMVASFSKGYTSIFNMETQQRILTLESNVDTTANSSCQINRVISHPTLPISITAHEDRHIKFYDNNTGKLIHSMVAHLEAVTSLAVDPNGLYLMSGSHDCSIRLWNLESKTCIQEFTAHRKKFEESIHDVAFHPSKCYIASAGADALAKVFV

SEQ ID NO: 135739 - protein, 755 aa, Artificial Sequence
  derived and/or modified sequence
RPPWTSRRVPASSSATTTRAQYSLPGILHFLQHEWARFEVERAQWEVERAELQAQIAFLQGERKGQENLKKDLVRRIKMLEYALKQERAKYHKLKYGTELNQGDMKPPSYDSDEGNETEVQPQQNSQLMWKQGRQLLRQYLQEVGYTDTILDVKSKRVRALLGFSSDVTDREDDKNQDSVVNGTEAEVKETAMIAKSELTDSASVLDNFKFLESAAADFSDEDEDDDVDGREKSVIDTSTIVRKKALPDSGEDRDTKEALKEFDFLVTSEEGDNESRSAGDGTDWEKEDQCLMPEAWNVDQGVITKLKEQYKKERKGKKGVKRPNRSKLQDMLANLRDVDELPSLQPSVGSPSRPSSSRLPEHEINRADEVEALTFPPSSGKSFIMGADEALESELGLGELAGLTVANEADSLTYDIANNKDALRKTWNPKFTLRSHFDGIRALAFHPIEPVLITASEDHTLKMWNLQKTAPAKKSTSLDVEPIYTFRAHKGPVLCVVMSSNGEQCYSGGTDGLIQGWNTTNPNIDPYDSYDPSVLRGPLLGHTDAVWGLAYSAAHQRLLSCSADGTLRLWNTTEVAPALSVFNDTKELGIPASVDLVSSDPSHMVASFSKGYTSIFNMETQQRILTLESNVDTTANSSCQINRVISHPTLPISITAHEDRHIKFYDNNTGKLIHSMVAHLEAVTSLAVDPNGLYLMSGSHDCSIRLWNLESKTCIQEFTAHRKKFEESIHDVAFHPSKCYIASAGADALAKVFV

SEQ ID NO: 135740 - DNA, 2343 bp, Artificial Sequence
  derived and/or modified sequence
atggacgagcaggccggccccggcgtgttcttcagcaacaaccaccccggcgccggcggcgccaagggcctgggccccctggccgaggccgccgccgccggcgacggcgccgccgccgccggcgccgccagagcccagtacagcctgcccggcatcctgcacttcctgcagcacgagtgggccagattcgaggtggagagagcccagtgggaggtggagagagccgagctgcaggcccagatcgccttcctgcagggcgagagaaagggccaggagaacctgaagaaggacctggtgagaagaatcaagatgctggagtacgccctgaagcaggagagagccaagtaccacaagctgaagtacggcaccgagctgaaccagggcgacatgaagccccccagctacgacagcgacgagggcaacgagaccgaggtgcagccccagcagaacagccagctgatgtggaagcagggcagacagctgctgagacagtacctgcaggaggtgggctacaccgacaccatcctggacgtgaagagcaagagagtgagagccctgctgggcttcagcagcgacgtgaccgacagagaggacgacaagaaccaggacagcgtggtgaacggcaccgaggccgaggtgaaggagaccgccatgatcgccaagagcgagctgaccgacagcgccagcgtgctggacaacttcaagttcctggagagcgccgccgccgacttcagcgacgaggacgaggacgacgacgtggacggcagagagaagagcgtgatcgacaccagcaccatcgtgagaaagaaggccctgcccgacagcggcgaggacagagacaccaaggaggccctgaaggagttcgacttcctggtgaccagcgaggagggcgacaacgagagcagaagcgccggcgacggcaccgactgggagaaggaggaccagtgcctgatgcccgaggcctggaacgtggaccagggcgtgatcaccaagctgaaggagcagtacaagaaggagagaaagggcaagaagggcgtgaagagacccaacagaagcaagctgcaggacatgctggccaacctgagagacgtggacgagctgcccagcctgcagcccagcgtgggcagccccagcagacccagcagcagcagactgcccgagcacgagatcaacagagccgacgaggtggaggccctgaccttcccccccagcagcggcaagagcttcatcatgggcgccgacgaggccctggagagcgagctgggcctgggcgagctggccggcctgaccgtggccaacgaggccgacagcctgacctacgacatcgccaacaacaaggacgccctgagaaagacctggaaccccaagttcaccctgagaagccacttcgacggcatcagagccctggccttccaccccatcgagcccgtgctgatcaccgccagcgaggaccacaccctgaagatgtggaacctgcagaagaccgcccccgccaagaagagcaccagcctggacgtggagcccatctacaccttcagagcccacaagggccccgtgctgtgcgtggtgatgagcagcaacggcgagcagtgctacagcggcggcaccgacggcctgatccagggctggaacaccaccaaccccaacatcgacccctacgacagctacgaccccagcgtgctgagaggccccctgctgggccacaccgacgccgtgtggggcctggcctacagcgccgcccaccagagactgctgagctgcagcgccgacggcaccctgagactgtggaacaccaccgaggtggcccccgccctgagcgtgttcaacgacaccaaggagctgggcatccccgccagcgtggacctggtgagcagcgaccccagccacatggtggccagcttcagcaagggctacaccagcatcttcaacatggagacccagcagagaatcctgaccctggagagcaacgtggacaccaccgccaacagcagctgccagatcaacagagtgatcagccaccccaccctgcccatcagcatcaccgcccacgaggacagacacatcaagttctacgacaacaacaccggcaagctgatccacagcatggtggcccacctggaggccgtgaccagcctggccgtggaccccaacggcctgtacctgatgagcggcagccacgactgcagcatcagactgtggaacctggagagcaagacctgcatccaggagttcaccgcccacagaaagaagttcgaggagagcatccacgacgtggccttccaccccagcaagtgctacatcgccagcgccggcgccgacgccctggccaaggtgttcgtgtag

SEQ ID NO: 135741 - DNA, 2268 bp, Artificial Sequence
  derived and/or modified sequence
agacccccctggaccagcagaagagtgcccgccagcagcagcgccaccaccaccagagcccagtacagcctgcccggcatcctgcacttcctgcagcacgagtgggccagattcgaggtggagagagcccagtgggaggtggagagagccgagctgcaggcccagatcgccttcctgcagggcgagagaaagggccaggagaacctgaagaaggacctggtgagaagaatcaagatgctggagtacgccctgaagcaggagagagccaagtaccacaagctgaagtacggcaccgagctgaaccagggcgacatgaagccccccagctacgacagcgacgagggcaacgagaccgaggtgcagccccagcagaacagccagctgatgtggaagcagggcagacagctgctgagacagtacctgcaggaggtgggctacaccgacaccatcctggacgtgaagagcaagagagtgagagccctgctgggcttcagcagcgacgtgaccgacagagaggacgacaagaaccaggacagcgtggtgaacggcaccgaggccgaggtgaaggagaccgccatgatcgccaagagcgagctgaccgacagcgccagcgtgctggacaacttcaagttcctggagagcgccgccgccgacttcagcgacgaggacgaggacgacgacgtggacggcagagagaagagcgtgatcgacaccagcaccatcgtgagaaagaaggccctgcccgacagcggcgaggacagagacaccaaggaggccctgaaggagttcgacttcctggtgaccagcgaggagggcgacaacgagagcagaagcgccggcgacggcaccgactgggagaaggaggaccagtgcctgatgcccgaggcctggaacgtggaccagggcgtgatcaccaagctgaaggagcagtacaagaaggagagaaagggcaagaagggcgtgaagagacccaacagaagcaagctgcaggacatgctggccaacctgagagacgtggacgagctgcccagcctgcagcccagcgtgggcagccccagcagacccagcagcagcagactgcccgagcacgagatcaacagagccgacgaggtggaggccctgaccttcccccccagcagcggcaagagcttcatcatgggcgccgacgaggccctggagagcgagctgggcctgggcgagctggccggcctgaccgtggccaacgaggccgacagcctgacctacgacatcgccaacaacaaggacgccctgagaaagacctggaaccccaagttcaccctgagaagccacttcgacggcatcagagccctggccttccaccccatcgagcccgtgctgatcaccgccagcgaggaccacaccctgaagatgtggaacctgcagaagaccgcccccgccaagaagagcaccagcctggacgtggagcccatctacaccttcagagcccacaagggccccgtgctgtgcgtggtgatgagcagcaacggcgagcagtgctacagcggcggcaccgacggcctgatccagggctggaacaccaccaaccccaacatcgacccctacgacagctacgaccccagcgtgctgagaggccccctgctgggccacaccgacgccgtgtggggcctggcctacagcgccgcccaccagagactgctgagctgcagcgccgacggcaccctgagactgtggaacaccaccgaggtggcccccgccctgagcgtgttcaacgacaccaaggagctgggcatccccgccagcgtggacctggtgagcagcgaccccagccacatggtggccagcttcagcaagggctacaccagcatcttcaacatggagacccagcagagaatcctgaccctggagagcaacgtggacaccaccgccaacagcagctgccagatcaacagagtgatcagccaccccaccctgcccatcagcatcaccgcccacgaggacagacacatcaagttctacgacaacaacaccggcaagctgatccacagcatggtggcccacctggaggccgtgaccagcctggccgtggaccccaacggcctgtacctgatgagcggcagccacgactgcagcatcagactgtggaacctggagagcaagacctgcatccaggagttcaccgcccacagaaagaagttcgaggagagcatccacgacgtggccttccaccccagcaagtgctacatcgccagcgccggcgccgacgccctggccaaggtgttcgtgtag

SEQ ID NO: 135742 - DNA, 2343 bp, Artificial Sequence
  derived and/or modified sequence
atggacgagcaggccgggcctggggtgtttttctccaataatcaccccggagctggaggtgccaaaggcctgggcccactcgccgaagcagctgccgccggcgatggagccgccgccgccggggctgcgagagcccaatacagcctgccagggattctgcattttctccagcacgagtgggcaagatttgaggttgaacgggcccagtgggaagtagaacgggcggagttacaggcccagatcgctttccttcagggcgaaagaaagggacaagagaacctgaagaaggatctggttagacgcataaaaatgctcgagtacgccctcaagcaggagagagcaaagtatcacaagctcaagtacggcacagagcttaaccagggtgatatgaaaccgcccagctatgactctgatgaaggcaatgaaacagaagtgcagcctcagcaaaacagtcagctgatgtggaagcagggtcggcagttgctgcggcaatacctacaagaggtggggtacactgacaccatcttagacgtgaagagcaagagggtgagagctctcctgggcttttccagcgatgtcaccgatcgagaggatgacaagaatcaggattcagttgtcaatggaacagaggctgaggtcaaagaaaccgcgatgattgctaagagcgaactgacagattccgccagcgttctagacaattttaagttccttgaatccgctgcggctgatttcagcgacgaggatgaggacgacgacgtggatggaagggagaagtccgttatcgatacaagcacgatcgtccgaaagaaggccctcccagactctggagaagacagggacactaaagaggctctaaaagaattcgactttctggtaacatctgaggagggtgacaatgaaagcagaagcgctggggatggaacagattgggaaaaagaggaccagtgtctgatgcccgaagcttggaatgtggatcaaggtgtgatcacaaaactcaaagagcagtataaaaaagaacgcaaggggaaaaagggtgtgaaacgcccgaatcgcagcaaacttcaggacatgttagccaacctgagggatgtcgacgagctgccgagtctccagcctagtgtcggcagccctagccgccccagcagcagccggttacccgagcacgaaattaaccgtgccgacgaagtcgaggctctgacatttccaccatcgagcggaaagtctttcattatgggtgccgacgaggccctggaatctgagttgggcctgggagaattggctggcctgacagtggcgaatgaggcagacagtctcacatacgatattgctaataataaggatgcccttcggaagacctggaatccaaagttcactttgcggagccatttcgacggcattcgcgcactggccttccaccccatagagccagttcttataacggcctcggaggatcacactctgaaaatgtggaacctgcaaaagaccgctccagcgaagaagtccactagcttggatgtggagcctatctatacttttcgcgctcacaagggaccagtgctatgcgtcgtcatgtcttccaacggcgaacagtgctattcaggtggtacagacggactgattcaaggatggaataccacaaatccgaacatagacccttatgactcctacgatcctagtgtgttgcgtggaccactcctgggccacactgatgccgtgtggggcctagcatactccgcagcccaccagagacttctgtcgtgctctgcggatggcaccctgagactttggaacaccaccgaggtggctccggctctctccgttttcaacgacaccaaagagctgggtattccagccagcgtagaccttgtttcttccgatccgtcccatatggtcgcgagttttagtaagggttacacatccatcttcaacatggaaacacagcagcggattctaactctagagagtaacgtcgatactaccgctaactcctcctgtcaaataaaccgggtgatctcacaccccactctgccaatctctatcactgctcatgaggatcgacacatcaagttttatgataacaacaccggcaaactcatccactctatggttgcccaccttgaggccgtgacttccctcgccgttgaccctaacggattgtatttgatgtctggcagccacgactgcagcatcagactgtggaacctggaatctaagacctgcattcaggagtttaccgcgcaccgtaaaaagtttgaagagtcgatacacgatgtcgcatttcacccatccaaatgctacatcgccagcgctggagccgacgcccttgctaaggtgttcgtatag

SEQ ID NO: 135743 - DNA, 2268 bp, Artificial Sequence
  derived and/or modified sequence
cgaccgccttggacttctcgccgcgtgcccgcttcctcctcagccaccaccaccagggcacagtacagcttgccggggatcctgcacttcttacagcacgaatgggctcggtttgaggtggagcgcgcccaatgggaggtggagagagctgagctgcaagcccagattgcctttctgcagggggaacggaagggccaggaaaatttaaaaaaagatttggtgagacggatcaagatgcttgagtatgccttgaaacaagagcgcgccaagtaccacaagctaaagtatggcacagagctgaatcagggagacatgaaaccccctagttatgacagtgacgaggggaatgaaacagaggttcagccccaacaaaattcacagttgatgtggaagcagggaaggcagcttctgagacaatatctccaggaggtcggatacacggacaccatcctggacgtgaagtctaaaagagtgagggctctcctgggattcagcagtgatgttacggaccgtgaggacgataagaatcaggatagcgtggtgaatggaacagaggcggaagtaaaggagaccgctatgatcgcaaagtcggaactgactgattccgccagcgtcctggataattttaaattccttgagtccgccgcagcggatttttctgatgaggacgaagatgacgacgttgacggccgggagaagtcagtgatagacacaagcacgattgttcggaagaaagcgcttccagactccggcgaagatcgggacactaaggaagcactgaaggagtttgacttcttggttacttccgaagagggcgacaacgaatcccggtcagcgggtgacggaacggattgggaaaaggaggaccagtgccttatgcctgaggcgtggaatgtggaccagggggtgataacgaagctgaaagaacagtataagaaggagagaaagggaaagaagggcgtgaagcgcccaaaccggagtaagctgcaggatatgctcgccaatctgagggatgtggatgagttgccttctctccaaccatcggtcgggtctcccagtcgaccttcgagtagtcgactgcccgaacacgaaattaaccgcgccgacgaggtggaggcactgactttccctccttccagcggcaaatcctttatcatgggagcagatgaagctctggagagcgagctgggcctgggggaactcgccgggctgactgtcgctaatgaggccgactcgcttacctatgacattgcaaataacaaggatgctctccgaaaaacatggaatcctaaatttaccctacggtcccacttcgacgggatccgggcgttggcctttcacccaatcgaacccgtactcataaccgcttctgaagaccataccctcaagatgtggaacctgcagaagacagcacctgcaaagaaaagcacgtctctagacgttgaacctatatacactttccgggctcacaagggaccagtgttatgcgtggtcatgagcagcaatggggaacagtgctattcaggtggcaccgatggcctaatccaaggatggaacactacaaaccccaacattgacccttacgatagttacgacccatccgtgctcagagggccactcttaggccacaccgatgcagtgtggggtctggcctactccgccgcccatcaaagattgttaagctgtagcgctgacggaaccctccggctgtggaataccaccgaagtagcccctgctttgagcgtgtttaatgacacgaaagagctgggaatccctgccagcgtggacttggtcagctctgatccgagtcacatggtggcgagcttctccaagggatatacttctatcttcaacatggagacccaacagaggatccttaccctggagtcgaacgtcgataccacagcaaacagctcttgccaaatcaatagagtcatcagccaccctacacttccgattagcattacggcccacgaggacaggcatatcaagttctacgataataatacagggaagcttatccattctatggtcgcgcatctggaggcggttacaagcctggccgtcgaccctaacggtctttacctgatgtccggaagccacgattgttctattcgcctgtggaacctggaaagcaagacctgtattcaggagtttaccgctcatcgcaagaaattcgaagaaagcatccacgatgttgctttccatccctcgaaatgctatatcgcatctgcgggcgccgacgcactcgccaaggtgtttgtgtag

SEQ ID NO: 135744 - DNA, 2343 bp, Artificial Sequence
  derived and/or modified sequence
atggatgagcaggccggccctggggtcttcttcagcaacaaccaccctggggccggcggggccaagggcctgggccccctggccgaggccgctgctgctggagatggagctgctgctgctggggccgcccgggcccagtacagcctgcccggcatcctgcacttcctgcagcacgagtgggccaggtttgaggtggagcgggcccagtgggaggtggagagagctgagctgcaggcccagatcgccttcctgcagggcgagaggaagggccaggagaacctgaagaaggacctggtgcggcgcatcaagatgctggagtatgccctgaagcaggagcgggccaagtaccacaagctgaagtatggaacagagctgaaccagggcgacatgaagccacccagctatgacagtgatgagggcaatgaaacagaggtgcagccccagcagaacagccagctgatgtggaagcagggccggcagctgctgcggcagtacctgcaggaggtgggctacacagacaccatcctggatgtgaagagcaagagggtgcgggccctgctgggcttcagcagtgatgtgacagacagagaagatgacaagaaccaggacagcgtggtgaatggaacagaagctgaggtgaaggagacagccatgattgccaagtctgagctgacagattctgcctctgtgctggacaacttcaagttcctggagagcgctgctgctgacttcagtgatgaagatgaagatgatgatgtggatggccgggagaagtctgtgattgacaccagcaccatcgtgaggaagaaggccctgcctgattctggagaagatcgggacaccaaggaggccctgaaggagtttgacttcctggtgaccagcgaggagggggacaatgaaagccgctctgctggagatggaacagactgggagaaggaggaccagtgcctgatgcctgaggcctggaatgtggaccagggcgtcatcaccaagctgaaggagcagtacaagaaggagaggaagggcaagaagggcgtgaagaggcccaacagaagcaagctgcaggacatgctggccaacctgagagatgtggatgagctgcccagcctgcagcccagcgtgggcagccccagccggcccagcagcagccggctgcctgagcacgagatcaacagagcagatgaggtggaggccctgaccttcccccccagcagcggcaagagcttcatcatgggcgcagatgaggccctggagagcgagctgggcctgggggagctggccggcctgactgtggccaatgaagctgacagcctgacctatgacatcgccaacaacaaggatgccctgaggaagacctggaaccccaagttcaccctgcggagccactttgatggcatccgggccctggccttccaccccatcgagcctgtgctgatcacagccagcgaggaccacaccctgaagatgtggaacctgcagaagacagccccagccaagaagagcaccagcctggatgtggagcccatctacaccttccgggcccacaagggccctgtgctgtgtgtggtgatgagcagcaatggagagcagtgctacagcggcggcacagatggcctcatccagggctggaacaccaccaaccccaacatcgacccctatgacagctatgaccccagcgtgctgcggggccccctgctgggccacacagatgctgtgtggggcctggcctacagcgctgcccaccagaggctgctgagctgcagcgcagatggcaccctgcggctgtggaacaccacagaggtggccccagccctgagcgtcttcaatgacaccaaggagctgggcatcccagcctctgtggacctggtgtccagtgaccccagccacatggtggccagcttcagcaagggctacaccagcatcttcaacatggagacccagcagaggatcctgaccctggagagcaatgtggacaccacagccaacagcagctgccagatcaacagagtcatcagccaccccaccctgcccatcagcatcacagcccacgaggacagacacatcaagttctatgacaacaacacaggcaagctgatccacagcatggtggcccacctggaggccgtgaccagcctggccgtggaccccaacggcctgtacctgatgagcggcagccatgactgcagcatccggctgtggaacctggagagcaagacctgcatccaggagttcaccgcccacaggaagaagtttgaggagagcatccatgatgtggccttccaccccagcaagtgctacatcgccagcgctggagcagatgccctggccaaggtgtttgtgtag

SEQ ID NO: 135745 - DNA, 2268 bp, Artificial Sequence
  derived and/or modified sequence
cggcccccctggaccagcagaagagtgcctgccagcagcagcgccaccaccacccgggcccagtacagcctgcccggcatcctgcacttcctgcagcacgagtgggccaggtttgaggtggagcgggcccagtgggaggtggagcgggcagagctgcaggcccagatcgccttcctgcagggcgagaggaagggccaggagaacctgaagaaggacctggtgcggcgcatcaagatgctggagtatgccctgaagcaggagcgggccaagtaccacaagctgaagtatggaacagagctgaaccagggcgacatgaagcccccatcctatgacagtgatgagggcaatgaaacagaggtgcagccccagcagaacagccagctgatgtggaagcagggccggcagctgctgcggcagtacctgcaggaggtgggctacacagacaccatcctggatgtgaagagcaagagggtgcgggccctgctgggcttcagcagtgatgtgacagaccgggaggatgacaagaaccaggacagcgtggtgaatggaacagaggccgaggtgaaggagacagccatgattgccaagtctgagctgacagacagcgcctctgtgctggacaacttcaagttcctggagagcgctgctgctgacttcagtgatgaagatgaagatgatgatgtggatggccgggagaagagcgtcatcgacaccagcaccatcgtgaggaagaaggccctgcctgacagcggggaggaccgggacaccaaggaggccctgaaggagtttgacttcctggtgaccagcgaggagggggacaatgaaagccgctctgctggagatggaacagactgggagaaggaggaccagtgcctgatgcctgaggcctggaatgtggaccagggcgtcatcaccaagctgaaggagcagtacaagaaggagaggaagggcaagaagggcgtgaagaggcccaacagaagcaagctgcaggacatgctggccaacctgagagatgtggatgagctgcccagcctgcagcccagcgtgggcagccccagccggcccagcagcagccggctgcctgagcacgagatcaacagagcagatgaggtggaggccctgaccttcccccccagcagcggcaagagcttcatcatgggcgcagatgaggccctggagagcgagctgggcctgggggagctggccggcctgactgtggccaatgaggccgacagcctgacctatgacatcgccaacaacaaggatgccctgaggaagacctggaaccccaagttcaccctgcggagccactttgatggcatccgggccctggccttccaccccatcgagcctgtgctgatcacagccagcgaggaccacaccctgaagatgtggaacctgcagaagacagccccagccaagaagagcaccagcctggatgtggagcccatctacaccttccgggcccacaagggccctgtgctgtgtgtggtgatgagcagcaatggagagcagtgctacagcggcggcacagatggcctcatccagggctggaacaccaccaaccccaacatcgacccctatgacagctatgaccccagcgtgctgcggggccccctgctgggccacacagatgctgtgtggggcctggcctacagcgctgcccaccagaggctgctgagctgcagcgcagatggcaccctgcggctgtggaacaccacagaggtggccccagccctgtctgtgttcaatgacaccaaggagctgggcatcccagcctctgtggacctggtgtccagtgaccccagccacatggtggccagcttcagcaagggctacaccagcatcttcaacatggagacccagcagaggatcctgaccctggagagcaatgtggacaccacagccaacagcagctgccagatcaacagagtcatcagccaccccaccctgcccatcagcatcacagcccatgaagatagacacatcaagttctatgacaacaacacaggcaagctgatccacagcatggtggcccacctggaggccgtgaccagcctggccgtggaccccaacggcctgtacctgatgagcggcagccatgactgcagcatccggctgtggaacctggagagcaagacctgcatccaggagttcaccgcccacaggaagaagtttgaggagagcatccatgatgtggccttccaccccagcaagtgctacatcgccagcgctggagcagatgccctggccaaggtgtttgtgtag

SEQ ID NO: 135746 - DNA, 2343 bp, Artificial Sequence
  derived and/or modified sequence
atggacgagcaggccggccccggcgtgttcttcagcaacaaccacccgggtgccggcggtgcgaagggactcgggcctctagccgaggctgcagcggcaggcgatggtgcagctgcagctggagcggcccgtgcccagtattcactcccgggaatcttgcattttctccagcacgagtgggcacggttcgaggtcgaaagggcacagtgggaggtggagcgtgctgaacttcaagcgcaaatcgcctttcttcagggcgagagaaaaggccaggagaatctgaagaaggacctagtgaggcggattaagatgctggagtacgccttgaagcaggagcgggcaaagtatcataagctcaagtatggtaccgaactgaatcagggggatatgaaacccccctcttatgactccgacgaagggaatgagaccgaagtccagcctcagcagaatagccagctgatgtggaaacaaggccgccagctgttgcgccagtacctgcaagaagtgggctacacagacacaattctggacgtaaagtccaaacgggtgcgagccctgctgggtttttcttccgacgtcaccgatagggaggatgacaagaaccaggacagcgtagtcaacgggaccgaggctgaagtaaaggagacggctatgattgctaagagcgaactcaccgactcagcctccgttcttgataattttaagttcttagagtccgctgccgccgacttttccgacgaggatgaggacgacgatgtagacggacgggaaaagagtgtaattgacacctctacaattgtgcggaagaaggctttacccgactcaggcgaggacagagacacaaaagaggccctgaaagaatttgatttcctggtaacctctgaagaaggcgataatgagagccggtccgctggcgacgggacggactgggagaaggaggatcagtgcctgatgcccgaggcctggaatgtggatcagggtgtaatcacgaagctgaaggaacagtataagaaggaacgcaagggcaagaaaggagtgaagagaccaaaccgttccaaattgcaggacatgcttgcaaacctgagggacgtagacgagctcccgagtctgcagcccagcgtgggaagtccatccagaccctcttcttcaaggttaccagagcacgagattaacagggccgacgaggtggaggctctgacgtttccccctagttcaggtaaaagttttataatgggggctgacgaggcactggaatccgagctcggcctgggagaactggccggccttacagtggccaacgaagccgactcacttacctacgacattgccaataataaagacgcgttgagaaagacctggaatcccaagttcactctgcgatctcattttgatggtatccgggctctggcatttcaccctattgagccagtcctcattaccgcatcagaagatcacacacttaaaatgtggaatttgcagaagaccgcacccgcaaagaagtccacctcactcgatgtggaacccatctacacgtttcgcgctcacaaaggccctgtgctgtgcgtcgtgatgagttctaatggcgaacagtgctacagcggtggaacagatggactgatccagggatggaacacaacaaacccgaatatcgacccctacgactcctacgatcccagtgtccttcgggggcccttgcttggccacaccgacgcagtgtggggattggcttactcggcagcacaccagcgccttctgagttgctctgctgacggcacactgaggttatggaacaccactgaagtggcaccggccttgtcggtgtttaacgatactaaggaattggggatcccagctagcgtggatctggtgtcatccgaccccagccacatggtcgcatcattttctaaagggtacacttctatatttaatatggagacgcagcagaggattctcactttggaaagcaacgtggatacaaccgctaatagctcttgtcagatcaatcgggtgattagtcacccaactctgcctatctccatcactgcccacgaggataggcacatcaagttttacgacaataacacaggcaaacttatccacagcatggtcgctcacctggaagctgtgaccagcctggccgttgatccaaatggactgtacctcatgagcggctcacacgactgcagtattagattatggaatctggaaagtaaaacatgcatccaagagttcactgctcaccgcaaaaagttcgaggagagtattcatgacgttgcgtttcatccttcgaagtgttatatagctagcgccggcgctgatgcactcgcaaaagtgttcgtgtag

SEQ ID NO: 135747 - DNA, 2268 bp, Artificial Sequence
  derived and/or modified sequence
cggcccccctggaccagccggcgggtgcccgccagcagcagcgccaccactacgagggcccaatactctttaccaggaattctccatttcctacaacacgaatgggccaggtttgaggtcgaaagagcccaatgggaagtggagcgggccgagctgcaggcacagatcgcttttctgcagggcgaacgcaaaggacaggagaacctgaaaaaggatctggttagaaggatcaagatgctggaatatgccctgaagcaggaaagagctaaataccataaactgaagtacggtaccgaacttaaccaaggcgatatgaagcctccctcttacgactccgatgagggaaacgaaactgaggtgcagcctcagcagaattcccagctgatgtggaagcaagggagacagctgctgcggcagtacctgcaggaagttggctacacagacacaatactggatgtgaagtctaagcgggttcgagcattgctcggattttcttccgacgtgaccgatagggaggatgacaagaatcaggactcagtcgtgaatggcaccgaggcagaggtgaaagagacggctatgattgcgaagtctgagctgacagactccgcgagtgtgctggacaacttcaagttcctggaatctgctgccgccgacttttccgatgaggacgaagacgatgatgtagatggccgtgagaagagtgttattgatacctctacaatcgtcagaaagaaagcgctcccagattctggggaagatcgcgacaccaaggaggccctcaaggagtttgattttctggttaccagtgaagagggcgataacgagagccgatctgccggcgacggaacggattgggaaaaagaggaccagtgtctgatgccagaagcgtggaacgtcgaccaaggggtaataactaagctcaaagagcagtacaagaaagaaaggaagggcaagaaaggggttaagagacctaatcgttcaaagctacaggacatgctcgctaacttgcgtgatgtggacgagcttcctagcctccagccatctgtgggcagcccttcaagaccctcatcaagcaggctccccgagcatgagattaatagggcggacgaggtcgaggccctgacctttccccctagttctggaaagtctttcatcatgggagcggatgaggcattagagtccgagctaggattgggcgagctcgcaggactgacagtggcgaacgaagctgactcattgacctatgacatcgccaataacaaggacgcgttgaggaagacctggaatccaaagtttacactgaggtcccatttcgatggcatccgagctctcgcatttcaccctatcgaaccagtcctgattaccgcctcagaggatcacactctcaagatgtggaatctgcagaagactgcccctgcaaaaaagtccacctcgctcgatgtggaacccatttacacgttccgggctcacaaaggcccagttttgtgcgttgtgatgagcagcaatggggagcaatgttacagcggcgggacggacggcctcattcagggctggaacacaacgaatcccaatatcgatccatacgatagttatgacccttctgttctacgtggacctctccttggacacactgacgctgtatgggggctggcctattctgcagcacatcagcggctgctctcatgcagcgccgatggcaccttgcgactgtggaatactactgaggtggccccggcactctctgtgttcaatgatacaaaagaattgggcatcccggcctccgtagatctcgtgagcagcgacccatctcatatggtcgccagcttctcaaagggatacacaagtattttcaatatggagacacaacagagaatactaacccttgaatcaaatgtggatactaccgctaattccagctgccaaattaatagggttatcagccaccccacactgccaattagcatcacagcccacgaagacagacacatcaagttctatgataacaacacaggtaaacttattcactccatggttgctcacctcgaagcagtcacttccttggcggttgatcccaatggtctctacctcatgtcaggctcacacgattgcagcattagattatggaatctggaaagtaaaacctgtatccaagaattcaccgcccatagaaaaaaattcgaagagtcaatccatgatgtggctttccacccgagcaaatgttatatcgcctctgcaggggctgacgccttggctaaggtttttgtgtag

SEQ ID NO: 135748 - DNA, 2343 bp, Artificial Sequence
  derived and/or modified sequence
atggacgagcaggctgggccaggagtcttcttctcaaataatcacccaggagccggaggagcaaagggtctcggtcccctcgccgaagccgcagccgcaggggatggagccgctgcagccggtgctgcccgtgcccaatactctctgcccggaatactccacttcttacagcatgagtgggcgagatttgaagtggagagggcccagtgggaagtcgagcgagcagaactgcaggcacaaatcgctttcctgcagggcgagagaaagggccaggagaacttgaaaaaagatcttgtacggaggatcaagatgctggagtacgccctcaagcaggagagggcaaaataccacaaactaaaatacgggacagagctgaatcagggtgatatgaaaccaccgagttacgactcagatgaggggaacgagaccgaggttcagccacagcaaaactcccagttaatgtggaagcagggtcggcaacttctgcggcaatacctgcaggaggttggatacactgacaccattttggatgttaagagcaaacgggtccgcgctctgttgggtttttctagcgacgtgaccgatagggaagacgacaaaaatcaggactctgttgttaacggaactgaagctgaggtaaaggagacagcaatgattgccaagtccgagctgaccgattcagcctccgtgctcgacaactttaagttcctagagtcagccgctgccgacttcagcgacgaagatgaagacgatgacgtggacggtcgagagaaatccgtgatcgatacctccacgattgtgcgcaagaaagccctcccagattcaggtgaagatcgcgacacaaaggaagcgctcaaagagtttgactttcttgtgacatcggaagaaggcgataatgagtcccgctcagctggcgatggcacggattgggagaaagaggatcagtgtctgatgcctgaggcatggaatgttgaccagggagtaataactaaactcaaggaacaatacaaaaaggaacgaaagggtaaaaagggagttaaacggccaaatcggtcaaaactgcaggacatgcttgcaaaccttcgcgatgttgacgaactcccaagcctgcagccgtcagtgggctctccatcacgcccaagctcaagtaggctccccgagcacgagatcaaccgggcagatgaggtcgaggccctgactttccccccttctagtggcaaaagctttatcatgggagcagacgaagcactggaatcagaactggggttaggtgagctggcaggcctcaccgtcgccaatgaggcagattctctcacctatgatattgccaataacaaagacgctctgcgtaagacgtggaatccaaagtttacgcttagatcccactttgacggcattcgcgcactggcgttccaccctattgagcccgtcctgatcacagcaagtgaagaccacaccctgaagatgtggaacctgcagaaaacagcgcctgcaaaaaagagcacttctctagatgtggagcctatatacactttcagagcacacaaaggcccagttctgtgcgtcgtgatgagtagcaatggcgagcagtgctattctgggggtacggatggtctcattcagggctggaataccaccaatcctaatattgacccatatgatagctacgatccctcggtgctcagaggaccattgctgggccataccgacgcagtctggggcttggcctacagcgctgctcaccaacgcttgctgtcatgtagtgctgacggcaccctacgcttgtggaacaccactgaagtcgccccagctctgtccgtgttcaacgatacgaaagaattgggcattcctgcttcagtggacctagtcagttccgacccctcccacatggttgcctcctttagtaaggggtatacatctatcttcaatatggagacccaacagcgcattttgacactcgaaagcaacgtcgacacaaccgcgaactctagttgccagatcaacagagtgatctctcaccccactttacccattagcattactgcccacgaggataggcacattaagttttacgataataacaccggaaaattgatccatagcatggtggcacatttagaggctgttacatcactcgccgtagatccaaacgggctctatctaatgtccggatcccatgactgcagtataagattatggaacctggaaagtaagacttgcatccaggagtttaccgctcatcgcaaaaagtttgaggagagtattcacgacgtggcatttcatccctcaaagtgctatatcgcatccgctggtgctgacgccctcgctaaggtcttcgtgtag

SEQ ID NO: 135749 - DNA, 2268 bp, Artificial Sequence
  derived and/or modified sequence
agaccaccatggacatctcgcagagtaccagcaagtagtagcgctactacaactcgcgcacagtacagcctgccaggcattctccatttcttgcagcacgagtgggccagatttgaagtagaacgtgcgcagtgggaagtcgaacgtgcggagcttcaggcacagattgccttcctgcaaggggaacgaaaaggccaagagaacctgaagaaggatctggtgagacggattaaaatgctcgagtatgctttgaagcaagaacgggctaagtaccataaactgaagtacggaaccgaacttaaccagggagacatgaaacccccttcatatgattccgacgaaggaaacgagaccgaagtccagccccagcagaattcacagcttatgtggaagcaagggagacaacttctccgacaatacctgcaggaggtcgggtacacggacaccattctggacgtcaaaagcaaaagggtcagagctctcctcgggttctcttcagacgtcactgatcgggaagatgataagaatcaggattctgtagtgaacgggaccgaggctgaggtgaaggaaacggcaatgatcgcaaaatccgagctgacggacagcgcatctgttcttgataactttaaatttctggagtcggccgcagccgacttctcagacgaggatgaggacgacgacgtcgacggaagagaaaaatccgtgattgatactagtactatcgttcgcaagaaggctctgcccgattccggggaggatcgcgataccaaggaagcgctcaaggagttcgactttcttgtgacctccgaggaaggggataacgaaagccgatccgcgggagatggcaccgactgggagaaggaggatcagtgcctcatgcctgaggcctggaacgtggatcagggagtcattacaaagctgaaagaacagtacaagaaggaaaggaaagggaagaaaggggtaaaacgtcccaaccgctccaaactgcaggatatgctggccaacctgcgagatgtggacgagttgccctcattgcagccaagtgtcggctctccaagcaggccatcatcgtcacgtctaccagaacacgaaatcaacagagctgatgaggtcgaagcgctcacatttcctccatcttcagggaagtcgtttattatgggtgccgacgaagccctcgagtccgagctcggacttggagagttagcaggcctgaccgtagcgaatgaagcagacagcctgacctacgacatcgcaaacaataaggacgccctgcggaagacctggaacccaaagtttacgctgcgatctcattttgacgggatacgagctctggcatttcacccaatcgagcctgttttaataacagcatctgaagatcacaccctaaagatgtggaatctgcaaaagactgcaccagctaagaagagcactagtctggacgtagaacctatctacacctttagagcccacaagggccctgtcctgtgcgtcgttatgagctcaaacggcgagcagtgctattccggaggcactgatggtttgattcaaggatggaacaccactaatcctaacatcgacccatacgattcctacgacccatcagtactgcggggaccactcctcggccatactgacgccgtttggggcctggcttactccgccgctcaccaaaggcttctgtcctgctctgcggacggcacattacgactctggaacaccacagaggtggctccagcactcagtgtcttcaatgataccaaggagctcggtatacccgcaagcgtggaccttgtgtccagcgacccctctcacatggttgccagtttttccaaggggtacacctccatcttcaatatggagacccaacaacgcatcttaaccctagaaagtaacgtggacacgactgctaacagttcttgtcagatcaacagagtgatctcacacccaaccttgcctatttccattaccgctcatgaagaccgacatatcaagttttatgacaacaatactggcaagctgattcacagtatggtggcccacttggaggctgtcacaagtttggcagtcgatccaaacggcctctacctaatgtctggtagccatgattgctccattcgcttgtggaatttggaatccaaaacctgtatccaggagtttactgctcaccggaaaaaattcgaggaatcaattcacgatgtagcctttcacccctccaaatgttacatcgcctctgcaggggcagacgcactggccaaggtgttcgtgtag

SEQ ID NO: 135750 - DNA, 8168 bp, Artificial Sequence
  derived and/or modified sequence
gcggccgccatggacgagcaggcgggtcccggcgtcttcttcagcaacaaccacccgggcgccggcggtgccaaggggctcgggcctctggcggaggctgccgcggccggcgacggggcggctgcggcgggggcggcccgagcccagtacagtctcccggggatcctgcacttcctgcagcacgagtgggcccgcttcgaggtggagagagcccagtgggaggtggagcgggcggagctgcaggcccagattgccttcctgcagggagaaaggaagggccaagaaaatttgaagaaggatcttgtgaggaggatcaaaatgttggagtatgctcttaaacaggaaagagccaaataccacaagttgaaatacgggacagaattgaatcagggagatatgaagcctccaagctatgattctgatgaaggtaatgaaacagaagtgcagccacaacaaaacagccagttaatgtggaaacaaggtcgacaactactcagacagtatctacaggaggtgggttatacagatactattctagatgtgaaatctaaacgagtgcgagctttgttgggcttttcaagtgatgtcacggacagggaagatgacaaaaatcaggactcagttgtaaatggcacagaggctgaagttaaagagacagcaatgattgcaaaatctgagttaacagattctgcctccgtgctggataatttcaaattccttgaaagtgcagctgcagatttcagtgatgaagatgaagatgatgatgttgatggaagagagaaaagcgtcattgatacttcaacaattgttaggaaaaaagcattgcctgacagcggtgaagatcgagatacaaaagaagctctaaaggagtttgacttcttggttacatcagaggaaggagacaatgaatctagaagtgcaggcgatggaacagactgggaaaaggaagaccagtgtctcatgcctgaagcctggaatgtggaccagggagtaattaccaaactcaaggaacaatacaaaaaggagagaaaggggaaaaagggggtgaagaggcccaataggtcaaaactacaagatatgcttgctaatttgagagatgttgatgaacttccttcattgcagccatctgtgggttcaccttccagacccagcagctccaggcttcctgaacatgaaattaatagggcagatgaagtggaagcattgacatttcctccttcttctggaaagtcattcatcatgggagcagatgaagcccttgaaagtgaactgggacttggagaactagcaggccttacggtggccaatgaagcagactcactaacttatgatatagcaaacaataaagatgcattgaggaagacatggaaccctaagtttacattgagaagtcactttgatggcatccgagcccttgctttccatcccattgagcctgttttgataacagcatcagaggatcacacattaaaaatgtggaatttacagaaaacagccccagccaaaaagagcacttctcttgatgtagaacctatctatacattcagagcccataaaggtccagtgctttgtgtggtaatgagcagcaatggtgagcagtgttacagtggtggtactgatggactgatccagggctggaataccactaatcccaacatcgacccctatgattcttatgatccttctgttttacgaggccctctgctaggccacacggatgcagtctggggtttggcttatagtgcagcacatcagcgtttgttgtcctgttcagcagatggcactctgcgtttatggaatacaactgaggttgctccagcactaagtgtatttaatgatactaaagaactgggaatccctgcctctgtggatctagtgagcagtgacccgagccatatggtagcatcattcagcaagggatatacaagcatttttaacatggaaacacaacaacgcattctcactttagaatccaatgtagatacaacagccaactcttcctgccaaataaatagagtcatcagtcatcctactcttccgatcagcatcactgctcatgaagacaggcacatcaaattctatgataacaatacaggcaaactgatccactcgatggtagcccacctagaagctgttacaagtttagcagttgatcccaatggcctttacttgatgtctggcagtcatgactgttcaatacgtttatggaatctagaaagtaagacgtgtatccaagaattcacagctcatcgaaaaaagtttgaagaatcgattcatgatgtagctttccacccatccaaatgctatatagccagtgctggagctgacgcactggctaaagtctttgtatgacgcaatgcatcatcttcaccttctagctgtttataagtaatcaactgcacacaagagatacagaagacgagggcaagaatcatctcgtcctgcccttttgttctgctgaaggagcacagagaacatttgttgaagtatagttttgcaattcatatactgttttctaaaactaaggtttgttcaggttgctgcaagctcagctgaatctgtgagcctgaggtctgtttcaaatttctccccaataggcgcctttatttctgaggtggttctaattcgctaggcaggcctgagcgaatacaagtttagcttgtccctgttgagtaagtagggcatgctacaatggataatttaaaagcttgatagctgggactgaatagaagaaaacgggaaacttagaccaagttctcccctgagaaatcttgttaaaacacattaagtagtcaaaatagtaatctttatcatatctgccatattaacccctttgtgtataatgaccaggcagtgttaaactgagtttttaatttgactctcctttcagctgttcacataaagcacctggcaaagcattttacctgttagggggagaaaaatgcaataatatgttaaatatattattattcagaaatgctagacaaatagtttgcaagcagatttctatattgtattacagttttgaaaacagatttggtatcattctaaagtttagctatcaagcactcaccattgtgaagaatagttgatcgactctgcttttactaacagatttaacttattcaggtttgaaattctgtttatttttaagggtaaacagggcatatctctttaataatttctattttaaaattcactttattcatgtgacatttatagtaccagagtgattatttcataccaatgaaatcttacttttcagtgactgaaaagatagaatttatttgctaataatcatttatcaacacccacctaatcatgcttcagatgatctgtgctctttcttctttgtcacgttcaagttatctgacatctaccaagaacagttcataattattaatagcccaaagagtatggttaacttcacgcagctgcttttgcagaagcactaataaaaacaaatattttgtaccctagaagtcctctattaatccctgtaagaatctcctggaaacctggatgaaagagtttaatgccaaatattggctaaaaagttctgtctttctctctccctattcctcccccattgtttaattgagatatacatgttttaatgggcagtggatcagtattgtttctggggaaatccacaccttaaaaggccaggcttccccagcccaacttacctgtgacccacctacatgtgttcaccttttgggattctgaagaccctgctatctagacctagtctcctgtcataaagacattatttctatagtggtttatgtctctcttactctttgtcccaaatgacagagaccaatctagaaattggaaataaattattaacgtccaactttccaccaaaaaacatataaataggctcttagattttaaaaatattaaatctatagatattttaaccaattaaaacaatttctacatattccattccccacattttccatcgtcataacaatgatgcttctcatgatacgtacatctactccttgaaaaagtattctggtggtggtgtggctaatgattgacaaatatttctgtaaaatttctgcctgtttgcctctagaattctgcattatacaggcaaattttctttaaagctagagacttgtgctaaatttgcctgattttcatacagatatgctgtagtaatacagctaccttttcatttcatctttgtgctttggttaacaagcaggctcaagagactgctttgtgtaattaaatgaattgacctaaacatgagctgtcaggtgaatacttaatatttccatgcagatacagaattccatattgtgttcagtaaatttcttttggttcttcacagtgaagaaagaatgtttctaacctaacatttgtagaaggatactggaaaattccttccaggaaggaaggaaggaagatgccattacttggtgtatttatgatggatgaccacaaagctattgttctaccagttattaattaccttctaagatcttcagttactgctttattaatgtcactgaaattctaaaaaccaggacattcttcccccgttcattttatgcttcatggttgaaatttttctgtcagtgagtggaaaataaccatgagatacatagactgtagcgcaaatggaactgttgaaagttccttagaaagccagtgctgtggcattggagactacggagagagtcttctctaccagcactgcatgatctcagcctagaaatgagccaaagctgtcttccaaccagagtagcatatacatgtgtctgacttttcccctagcctgttgaacattcaatgaaaattcacagaatgaacaaattcaatgtttaaacagccattgaaatgctttcatagtgcttcatttgtaaatattttgtttgaaatgtattggaatagtatgaaaattagcgggaggtttggatccctgccttattttcatatgctgtggatacatctctgggagcttgcagcacccttctcaaaactcaactgtcatatggagctcatttgctactcaaaccatagacagattatttaacaaaagtgatataatgaccttcagtatttttctattgaacaagtttaacaacttttgccattaaacaaatacttagttatgcaaaatatttcgcttttataatcattttagttatgactaaaacgggggaaattgagctgcatcactgatgatgaactttgtgagaaattttttttttaatctgactttcattccttcagtattcttgctataaatttcttttggagataatgatgaagatttatttgaaaatgtctaaaatgtatgtatattttataaatatatattatatatattgtaagaatatatataatatataaactatatatatatatatatatatatatatatatatatatatataaaccataggtgcattttactgttttgtattttcatttttggaggtagtatacacagcagataatgatgagtatgatgagtgttgtgctgtttgcttttgcagtataatatatagttctaagtgtttaaattactgtatatacaatattcattataggctagcatgcttgttttaaagactgtcattctagtgtattaaaatctgaatgtaagaaaacctggctattcaaatgtgaattgaaaaatattttattctcagtactgaactatttccattgaacattcagactttttaacaaaaacaaatatcatcaagaaggcaatagctagaaaatgagaggtgcctttaaaaaaaaaaatgcagccttacagtgaggatgaagattgagtttggggagggggtgggagggggggcacagagagagagagagagttagtgtgtgtgtgtgtgtgtgtgtgtgtgtgtgtgtgtgcatgcatgcgtgtgtgtgtgtgtgtgtgtgtttaccaatctgtgaaggtcctgatttgtgaccatcaatgtctttttaatgtatctgctcaacttctaggacttcaggggacatttcatgcgctttgtgctcttctgagcaccatatatactttccaagaattttgaatgtgaattcctagaaatttcagtagagaaaacaatagctattctttaattatagtaaagttcaggtagaaggagaaattatttgttcaccaaaattatgggatctcattaatgttggctaagtaaatgtaattttttaaaggctcactttttaatacttcatatatttccctcttacaaaacagcatgtcatgaagttcttatgtggtaaagattcaactagtaaatatttttaggttaaatacctgaactagttaaaattccacctaagaatagtcttaaaatatttaaaaagcatctctcatatctacctctttgtcattgctgccattttaactgaagcaaatctttatgacatctgaaatgatggttggatgcaattaaaaaaaaatctatgttggtgcttttctcaggctttgtcatttaagttatattgtattaagatgtcacaaatcagactgaaaggcttagaattaattttgtttttctttgaaagaattgcttaaaattaaccatcaatgtttttagcgagtggagataatgaatctttggttggtgtctgtctgtgtgatgttttcaaccaatagccaaataattattgaacttacatgaaaaagagtgctaagtataattttatttagattactttattctttgaaagtgactacaaggctattaagtacataatcattcattttatttactcagaagttgcctctccattactgttaacttgtttagtaatttatataattgcagtacttttaagtgttggacactgggattcaggttgtatacaaagtagtagctgacgaaaaatatgtatatttttgtgaaatgtatcaagccctaaagttcattttagagaaaggcccagaaaaacgtatctgtgtttaaaaacaaaggacaggtcattcgtcaatttgaatcatttttacttttgccactacaaactttttaattggcaatatccatcatccaactggatcttcatgtcagtgtcagggatgccaggttgacaaagtatttaacagatcctttcagtttttgttttgtttttttaattctaaaaaaaacaaatgttaggccaaacagatccctagatcccactcattgattctggcggtattcctaaagtggtgcttagggggtcagaattttctggatctttgctaatccaagctttagatttaatttaaccaggaccacatgcttgtcatctctctgatgcaaattttcaaaatcattttaatttagattctaatgtctgcctgggtttttaacaggctgtgaaccagtgagtgccttgttaatgtagaatgatttttcccccctgggtgggtgttagttagctcctctctgaaaatgtctcagagaatggtattttaattgacttgtagagagctgctaaatttgttattatcagcaatcagaaagtctttggtctaccacacatctccctccctactatctcttcattgtttggctgaagtttgcctcttgtgagaaaacaatacaactccccttctccacacactttttttccagcccagattaataggtatcccctaccctaatcccaactctatgatctaataccttttttaggaggaaccacttctttttaatattgaaatctgctggttactttatgttttctcaagttcagttgactagagctgaccacagggtgtcatcaattcagattcctaaataaccctttctctccacacccagtcctccagctggtgagccctgggccagattgtttgatcttcaggtattttaaattttagttacatcaattaatgtaaattaatccaaatgctaatttttgtggtgcaagaagtttcttatgtaaattcagggtatggataagctaattaagatatccatctttggtggctctaagtgtattatttgtttttaaataaagtgtacaaatatagataacatgctataggtgtctcatgaattggaatatttgtcagatttgggatctagctgtggctttacagtaatcagttaaattaacatagtctgatttggggcttttgggggaggagttgtagaggggtgcagagaaataaaaggatattagacaaagta

SEQ ID NO: 135751 - DNA, 3395 bp, Artificial Sequence
  derived and/or modified sequence
cggccgccatggacgagcaggcgggtcccggcgtcttcttcagcaacaaccacccgagcccagtacagtctcccggggatcctgcacttcctgcagcacgagtgggcccgcttcgaggtggagagagcccagtgggaggtggagcgggcggagctgcaggcccagattgccttcctgcagggagaaaggaagggccaagaaaatttgaagaaggatcttgtgaggaggatcaaaatgttggagtatgctcttaaacaggaaagagccaaataccacaagttgaaatacgggacagaattgaatcagggagatatgaagcctccaagctatgattctgatgaaggtaatgaaacagaagtgcagccacaacaaaacagccagttaatgtggaaacaaggtcgacaactactcagacagtatctacaggaggtgggttatacagatactattctagatgtgaaatctaaacgagtgcgagctttgttgggcttttcaagtgatgtcacggacagggaagatgacaaaaatcaggactcagttgtaaatggcacagaggctgaagttaaagagacagcaatgattgcaaaatctgagttaacagattctgcctccgtgctggataatttcaaattccttgaaagtgcagctgcagatttcagtgatgaagatgaagatgatgatgttgatggaagagagaaaagcgtcattgatacttcaacaattgttaggaaaaaagcattgcctgacagcggtgaagatcgagatacaaaagaagctctaaaggagtttgacttcttggttacatcagaggaaggagacaatgaatctagaagtgcaggcgatggaacagactgggaaaaggaagaccagtgtctcatgcctgaagcctggaatgtggaccagggagtaattaccaaactcaaggaacaatacaaaaaggagagaaaggggaaaaagggggtgaagaggcccaataggtcaaaactacaagatatgcttgctaatttgagagatgttgatgaacttccttcattgcagccatctgtgggttcaccttccagacccagcagctccaggcttcctgaacatgaaattaatagggcagatgaagtggaagcattgacatttcctccttcttctggaaagtcattcatcatgggagcagatgaagcccttgaaagtgaactgggacttggagaactagcaggccttacggtggccaatgaagcagactcactaacttatgatatagcaaacaataaagatgcattgaggaagacatggaaccctaagtttacattgagaagtcactttgatggcatccgagcccttgctttccatcccattgagcctgttttgataacagcatcagaggatcacacattaaaaatgtggaatttacagaaaacagccccagccaaaaagagcacttctcttgatgtagaacctatctatacattcagagcccataaaggtccagtgctttgtgtggtaatgagcagcaatggtgagcagtgttacagtggtggtactgatggactgatccagggctggaataccactaatcccaacatcgacccctatgattcttatgatccttctgttttacgaggccctctgctaggccacacggatgcagtctggggtttggcttatagtgcagcacatcagcgtttgttgtcctgttcagcagatggcactctgcgtttatggaatacaactgaggttgctccagcactaagtgtatttaatgatactaaagaactgggaatccctgcctctgtggatctagtgagcagtgacccgagccatatggtagcatcattcagcaagggatatacaagcatttttaacatggaaacacaacaacgcattctcactttagaatccaatgtagatacaacagccaactcttcctgccaaataaatagagtcatcagtcatcctactcttccgatcagcatcactgctcatgaagacaggcacatcaaattctatgataacaatacaggcaaactgatccactcgatggtagcccacctagaagctgttacaagtttagcagttgatcccaatggcctttacttgatgtctggcagtcatgactgttcaatacgtttatggaatctagaaagtaagacgtgtatccaagaattcacagctcatcgaaaaaagtttgaagaatcgattcatgatgtagctttccacccatccaaatgctatatagccagtgctggagctgacgcactggctaaagtctttgtatgacgcaatgcatcatcttcaccttctagctgtttataagtaatcaactgcacacaagagatacagaagacgagggcaagaatcatctcgtcctgcccttttgttctgctgaaggagcacagagaacatttgttgaagtatagttttgcaattcatatactgttttctaaaactaaggtttgttcaggttgctgcaagctcagctgaatctgtgagcctgaggtctgtttcaaatttctccccaataggcgcctttatttctgaggtggttctaattcgctaggcaggcctgagcgaatacaagtttagcttgtccctgttgagtaagtagggcatgctacaatggataatttaaaagcttgatagctgggactgaatagaagaaaacgggaaacttagaccaagttctcccctgagaaatcttgttaaaacacattaagtagtcaaaatagtaatctttatcatatctgccatattaacccctttgtgtataatgaccaggcagtgttaaactgagtttttaatttgactctcctttcagctgttcacataaagcacctggcaaagcattttacctgttagggggagaaaaatgcaataatatgttaaatatattattattcagaaatgctagacaaatagtttgcaagcagatttctatattgtattacagttttgaaaacagatttggtatcattctaaagtttagctatcaagcactcaccattgtgaagaatagttgatcgactctgcttttactaacagatttaacttattcaggtttgaaattctgtttatttttaagggtaaacagggcatatctctttaataatttctattttaaaattcactttattcatgtgacatttatagtaccagagtgattatttcataccaatgaaatcttacttttcagtgactgaaaagatagaatttatttgctaataatcatttatcaacacccacctaatcatgcttcagatgatctgtgctctttcttctttgtcacgttcaagttatctgacatctaccaagaacagttcataattattaatagcccaaagagtatggttaacttcacgcagctgcttttgcagaagcactaataaaaacaaatattttgtacccta

SEQ ID NO: 135752 - protein, 557 aa, Artificial Sequence
  derived and/or modified sequence
MTDIMTEGITIVEDINKRREPLPSLEAVYLITPSEKSVHSLISDFKDPPTAKYRAAHVFFTDSCPDALFNELVKSRAAKVIKTLTEINIAFLPYESQVYSLDSADSFQSFYSPHKAQMKNPILERLAEQIATLCATLKEYPAVRYRGEYKDNALLAQLIQDKLDAYKADDPTMGEGPDKARSQLLILDRGFDPSSPVLHELTFQAMSYDLLPIENDVYKYETSGIGEARVKEVLLDEDDDLWIALRHKHIAEVSQEVTRSLKDFSSSKRMNTGEKTTMRDLSQMLKKMPQYQKELSKYSTHLHLAEDCMKHYQGTVDKLCRVEQDLAMGTDAEGEKIKDPMRAIVPILLDANVSTYDKIRIILLYIFLKNGITEENLNKLIQHAQIPPEDSEIITNMAHLGVPIVTDSTLRRRSKPERKERISEQTYQLSRWTPIIKDIMEDTIEDKLDTKHYPYISTRSSASFSTTAVSARYGHWHKNKAPGEYRSGPRLIIFILGGVSLNEMRCAYEVTQANGKWEVLIGSTHILTPTKFLMDLRHPDFRESSRVSFEDQAPTME

SEQ ID NO: 135753 - protein, 435 aa, Artificial Sequence
  derived and/or modified sequence
MAPIGLKAVVGEKIMHDVIKKVKKKGEWKVLVVDQLSMRMLSSCCKMTDIMTEGPDKARSQLLILDRGFDPSSPVLHELTFQAMSYDLLPIENDVYKYETSGIGEARVKEVLLDEDDDLWIALRHKHIAEVSQEVTRSLKDFSSSKRMNTGEKTTMRDLSQMLKKMPQYQKELSKYSTHLHLAEDCMKHYQGTVDKLCRVEQDLAMGTDAEGEKIKDPMRAIVPILLDANVSTYDKIRIILLYIFLKNGITEENLNKLIQHAQIPPEDSEIITNMAHLGVPIVTDSTLRRRSKPERKERISEQTYQLSRWTPIIKDIMEDTIEDKLDTKHYPYISTRSSASFSTTAVSARYGHWHKNKAPGEYRSGPRLIIFILGGVSLNEMRCAYEVTQANGKWEVLIGSTHILTPTKFLMDLRHPDFRESSRVSFEDQAPTME

SEQ ID NO: 135754 - protein, 603 aa, Artificial Sequence [sequence omitted]

SEQ ID NO: 135755 - DNA, 1674 bp, Artificial Sequence
  derived and/or modified sequence
atgaccgacatcatgaccgagggcatcaccatcgtggaggacatcaacaagagaagagagcccctgcccagcctggaggccgtgtacctgatcacccccagcgagaagagcgtgcacagcctgatcagcgacttcaaggacccccccaccgccaagtacagagccgcccacgtgttcttcaccgacagctgccccgacgccctgttcaacgagctggtgaagagcagagccgccaaggtgatcaagaccctgaccgagatcaacatcgccttcctgccctacgagagccaggtgtacagcctggacagcgccgacagcttccagagcttctacagcccccacaaggcccagatgaagaaccccatcctggagagactggccgagcagatcgccaccctgtgcgccaccctgaaggagtaccccgccgtgagatacagaggcgagtacaaggacaacgccctgctggcccagctgatccaggacaagctggacgcctacaaggccgacgaccccaccatgggcgagggccccgacaaggccagaagccagctgctgatcctggacagaggcttcgaccccagcagccccgtgctgcacgagctgaccttccaggccatgagctacgacctgctgcccatcgagaacgacgtgtacaagtacgagaccagcggcatcggcgaggccagagtgaaggaggtgctgctggacgaggacgacgacctgtggatcgccctgagacacaagcacatcgccgaggtgagccaggaggtgaccagaagcctgaaggacttcagcagcagcaagagaatgaacaccggcgagaagaccaccatgagagacctgagccagatgctgaagaagatgccccagtaccagaaggagctgagcaagtacagcacccacctgcacctggccgaggactgcatgaagcactaccagggcaccgtggacaagctgtgcagagtggagcaggacctggccatgggcaccgacgccgagggcgagaagatcaaggaccccatgagagccatcgtgcccatcctgctggacgccaacgtgagcacctacgacaagatcagaatcatcctgctgtacatcttcctgaagaacggcatcaccgaggagaacctgaacaagctgatccagcacgcccagatcccccccgaggacagcgagatcatcaccaacatggcccacctgggcgtgcccatcgtgaccgacagcaccctgagaagaagaagcaagcccgagagaaaggagagaatcagcgagcagacctaccagctgagcagatggacccccatcatcaaggacatcatggaggacaccatcgaggacaagctggacaccaagcactacccctacatcagcaccagaagcagcgccagcttcagcaccaccgccgtgagcgccagatacggccactggcacaagaacaaggcccccggcgagtacagaagcggccccagactgatcatcttcatcctgggcggcgtgagcctgaacgagatgagatgcgcctacgaggtgacccaggccaacggcaagtgggaggtgctgatcggcagcacccacatcctgacccccaccaagttcctgatggacctgagacaccccgacttcagagagagcagcagagtgagcttcgaggaccaggcccccaccatggagtag

SEQ ID NO: 135756 - DNA, 1308 bp, Artificial Sequence
  derived and/or modified sequence
atggcccccatcggcctgaaggccgtggtgggcgagaagatcatgcacgacgtgatcaagaaggtgaagaagaagggcgagtggaaggtgctggtggtggaccagctgagcatgagaatgctgagcagctgctgcaagatgaccgacatcatgaccgagggccccgacaaggccagaagccagctgctgatcctggacagaggcttcgaccccagcagccccgtgctgcacgagctgaccttccaggccatgagctacgacctgctgcccatcgagaacgacgtgtacaagtacgagaccagcggcatcggcgaggccagagtgaaggaggtgctgctggacgaggacgacgacctgtggatcgccctgagacacaagcacatcgccgaggtgagccaggaggtgaccagaagcctgaaggacttcagcagcagcaagagaatgaacaccggcgagaagaccaccatgagagacctgagccagatgctgaagaagatgccccagtaccagaaggagctgagcaagtacagcacccacctgcacctggccgaggactgcatgaagcactaccagggcaccgtggacaagctgtgcagagtggagcaggacctggccatgggcaccgacgccgagggcgagaagatcaaggaccccatgagagccatcgtgcccatcctgctggacgccaacgtgagcacctacgacaagatcagaatcatcctgctgtacatcttcctgaagaacggcatcaccgaggagaacctgaacaagctgatccagcacgcccagatcccccccgaggacagcgagatcatcaccaacatggcccacctgggcgtgcccatcgtgaccgacagcaccctgagaagaagaagcaagcccgagagaaaggagagaatcagcgagcagacctaccagctgagcagatggacccccatcatcaaggacatcatggaggacaccatcgaggacaagctggacaccaagcactacccctacatcagcaccagaagcagcgccagcttcagcaccaccgccgtgagcgccagatacggccactggcacaagaacaaggcccccggcgagtacagaagcggccccagactgatcatcttcatcctgggcggcgtgagcctgaacgagatgagatgcgcctacgaggtgacccaggccaacggcaagtgggaggtgctgatcggcagcacccacatcctgacccccaccaagttcctgatggacctgagacaccccgacttcagagagagcagcagagtgagcttcgaggaccaggcccccaccatggagtag

SEQ ID NO: 135757 - DNA, 1812 bp, Artificial Sequence
  derived and/or modified sequence
atggcccccatcggcctgaaggccgtggtgggcgagaagatcatgcacgacgtgatcaagaaggtgaagaagaagggcgagtggaaggtgctggtggtggaccagctgagcatgagaatgctgagcagctgctgcaagatgaccgacatcatgaccgagggcatcaccatcgtggaggacatcaacaagagaagagagcccctgcccagcctggaggccgtgtacctgatcacccccagcgagaagagcgtgcacagcctgatcagcgacttcaaggacccccccaccgccaagtacagagccgcccacgtgttcttcaccgacagctgccccgacgccctgttcaacgagctggtgaagagcagagccgccaaggtgatcaagaccctgaccgagatcaacatcgccttcctgccctacgagagccaggtgtacagcctggacagcgccgacagcttccagagcttctacagcccccacaaggcccagatgaagaaccccatcctggagagactggccgagcagatcgccaccctgtgcgccaccctgaaggagtaccccgccgtgagatacagaggcgagtacaaggacaacgccctgctggcccagctgatccaggacaagctggacgcctacaaggccgacgaccccaccatgggcgagggccccgacaaggccagaagccagctgctgatcctggacagaggcttcgaccccagcagccccgtgctgcacgagctgaccttccaggccatgagctacgacctgctgcccatcgagaacgacgtgtacaagtacgagaccagcggcatcggcgaggccagagtgaaggaggtgctgctggacgaggacgacgacctgtggatcgccctgagacacaagcacatcgccgaggtgagccaggaggtgaccagaagcctgaaggacttcagcagcagcaagagaatgaacaccggcgagaagaccaccatgagagacctgagccagatgctgaagaagatgccccagtaccagaaggagctgagcaagtacagcacccacctgcacctggccgaggactgcatgaagcactaccagggcaccgtggacaagctgtgcagagtggagcaggacctggccatgggcaccgacgccgagggcgagaagatcaaggaccccatgagagccatcgtgcccatcctgctggacgccaacgtgagcacctacgacaagatcagaatcatcctgctgtacatcttcctgaagaacggcatcaccgaggagaacctgaacaagctgatccagcacgcccagatcccccccgaggacagcgagatcatcaccaacatggcccacctgggcgtgcccatcgtgaccgacagcaccctgagaagaagaagcaagcccgagagaaaggagagaatcagcgagcagacctaccagctgagcagatggacccccatcatcaaggacatcatggaggacaccatcgaggacaagctggacaccaagcactacccctacatcagcaccagaagcagcgccagcttcagcaccaccgccgtgagcgccagatacggccactggcacaagaacaaggcccccggcgagtacagaagcggccccagactgatcatcttcatcctgggcggcgtgagcctgaacgagatgagatgcgcctacgaggtgacccaggccaacggcaagtgggaggtgctgatcggcagcacccacatcctgacccccaccaagttcctgatggacctgagacaccccgacttcagagagagcagcagagtgagcttcgaggaccaggcccccaccatggagtag

SEQ ID NO: 135758 - DNA, 1674 bp, Artificial Sequence
  derived and/or modified sequence
atgactgacatcatgacagagggaattaccatagtcgaagacattaacaagagaagagagccacttccctcacttgaggccgtgtacctaatcactccatcagaaaagtccgtccacagcctgatcagcgacttcaaggatccacccaccgcgaagtaccgcgccgctcacgtgttctttactgatagttgcccagacgcattgtttaatgaactggtcaaatcccgagctgccaaggtgataaagactctgactgagattaatatcgcgttcctcccttatgaatcgcaggtctatagtctcgatagcgcagattcatttcagtcgttttacagtccccataaagcacagatgaagaatccaatcctggagcggctagccgaacagattgccaccctgtgtgcaacactgaaggaatatccggccgtcaggtataggggcgagtataaagacaatgcactgctggctcagctgattcaagataagttggatgcttataaagccgatgatccgacaatgggggaaggccccgacaaagctagaagtcagcttctaatcctggaccgcggattcgacccgagcagccctgtcctgcacgaactcacattccaagcaatgagctacgatctccttccgattgaaaatgatgtctataagtacgaaacctccgggatcggggaggcacgtgttaaagaagttctcctcgacgaggatgatgacctgtggatcgccctccgtcacaaacatatcgccgaagtgagccaggaggtgactaggtcactaaaggacttctcatcctctaagcggatgaacacaggagagaagaccactatgagagatctaagccagatgttgaaaaagatgcctcagtaccagaaggagctaagtaagtattccactcacctgcatctggctgaagattgtatgaaacattatcagggcaccgtggataaactctgtcgagtggagcaggacctagccatgggaaccgacgctgagggcgagaagataaaggatccaatgcgcgccattgttcctatccttctggacgccaatgtgagcacctacgacaagattcggatcatccttctctatattttcttgaagaacggcattactgaggaaaacctgaataagctgattcagcatgcccaaattcctcctgaggatagtgaaatcatcacgaacatggctcatttgggtgtgccaatcgtgacagattctacactgaggaggagaagtaaacccgagcgaaaggaaaggattagcgaacagacataccagctcagtcggtggacgcctattattaaagatattatggaagatactatcgaggacaaacttgatacgaaacattacccttatattagcaccagatcttctgcgagcttcagcactaccgcagtgagcgccaggtacggccactggcacaagaacaaggcacccggtgagtaccgctctggccccaggcttattatcttcatcctgggaggagtcagtttgaatgagatgaggtgtgcttacgaggtcactcaggccaatggaaagtgggaggtgctcatcggtagtacccacatactgaccccgaccaagttcctaatggatctgcgccatcctgattttcgagaatcttctagagtgtcgttcgaggaccaggcgccaactatggaatag

SEQ ID NO: 135759 - DNA, 1308 bp, Artificial Sequence
  derived and/or modified sequence
atggcgcccatcgggcttaaggcggtggtgggagagaagattatgcatgatgtgataaagaaagtgaagaaaaagggagagtggaaggtgctagtcgtcgatcagctgagtatgagaatgcttagcagttgctgtaagatgaccgacattatgaccgaggggcctgacaaggctcgctcccagttgcttatcctcgaccgcgggttcgatccatcctctcctgtgttgcacgagctgacgttccaggctatgagctatgatcttctgccaatcgaaaacgacgtgtataagtatgagacctccggcatcggcgaggcccgcgtgaaagaggtgctgctcgacgaagatgacgacttgtggatcgcgttaagacacaagcacatcgctgaggtctcccaggaggtgaccaggtccctaaaagatttcagcagctccaaaaggatgaacaccggagagaagacaacgatgagagatctcagtcagatgctcaagaaaatgccgcagtaccagaaggaactgtctaaatattccacccacctccatctggccgaggattgcatgaagcattatcagggcaccgtcgataaactctgtagggtagaacaagatctggcaatgggcaccgacgcggagggagagaagatcaaagatcctatgagggctatcgtgcccatcctgctagatgctaacgtgtcaacatatgacaaaatcaggatcatcctgctgtacatctttctgaaaaacggtatcaccgaggagaatctgaacaagcttatccagcatgcccagatccctcccgaggacagtgagatcatcaccaatatggcacacctgggcgttcccatagtaaccgattcgaccctgcggcggcgcagcaagcccgaacgcaaggagcgcattagcgagcaaacctaccaactgagtaggtggactccaatcattaaagacatcatggaagacaccattgaagacaaactcgatactaaacactatccttacatttccaccagaagttccgcatcttttagtaccacggccgtgagtgccaggtatggccattggcacaaaaataaggccccaggcgagtatcgcagtggcccaaggctcataatctttatactggggggcgtctctttaaatgagatgcggtgcgcttatgaagtcactcaggctaatggcaaatgggaggtgctcattggcagcacccatatcttaacccccacaaaatttctgatggacctgcggcaccctgactttagagaatctagtcgggttagtttcgaggaccaggctcccacaatggagtag

SEQ ID NO: 135760 - DNA, 1812 bp, Artificial Sequence
  derived and/or modified sequence
atggcgccaattggcctgaaagctgtcgttggcgaaaagattatgcatgacgtgattaaaaaggtgaagaagaagggggagtggaaggtactggtcgtggatcagctgagcatgcggatgctatcatcatgctgtaagatgactgacatcatgacagagggtatcactatagtggaagatatcaacaaaagacgagagccccttccttccttagaggcagtgtacctcataacacccagcgaaaagtcggtccactcgctcatatccgatttcaaagatcctcccacggccaagtaccgcgctgcccacgtgttctttactgatagctgccctgatgccctgtttaacgaacttgtgaaatccagggccgccaaagtcatcaagactctaacggaaataaatatcgcatttttgccctatgagagccaggtttactctctggacagcgccgactctttccaatccttctactcccctcataaggcgcaaatgaagaatcccatacttgagcgcttagcagagcaaatagctacgctgtgcgcaaccctgaaagagtatccagccgttcgttataggggcgaatataaagataatgccttgttggcgcagctgatccaggacaaattagatgcctataaagcagacgatcctacaatgggtgagggacctgacaaagcgagatctcagttgttaatcctggataggggattcgatccatcatctcctgtgctgcacgaattaacatttcaggctatgtcatacgacctcctaccaatcgagaacgacgtttacaagtacgaaacgtctggtatcggcgaggcccgtgtcaaagaagttctcctcgatgaggacgacgatctatggatagccttaagacataagcatatcgcggaggtgagtcaggaggtgacaaggagtctgaaagacttttcttcaagcaagcgcatgaacaccggcgagaaaacaaccatgcgagatttgagccagatgctcaaaaagatgccacagtatcagaaggagctttccaaatactccacacatctgcatctcgcagaagattgcatgaagcactaccaaggcactgttgacaaattgtgtagggtagagcaagatctggcaatgggaacggatgcggagggagaaaaaataaaagaccctatgcgcgccattgtgccaatcctgctggacgctaacgtgtcgacttacgataaaattcgcatcatcttgctatacatctttcttaagaatggcatcactgaggaaaacctcaacaagctcatccagcatgctcagatccctcccgaggattccgagatcattactaacatggctcatctgggcgtgcctatagtgactgactcaaccctgagacgcaggtctaagccggaaagaaaggagcgcatcagtgagcagacctaccagctatcccgctggacccctattatcaaggatataatggaggacactattgaagacaaactcgataccaagcactacccatacattagcactaggtcatcagccagtttctcgaccacggccgtgtcggctaggtacggccactggcataagaataaagcccccggagagtaccggtccggccctcggctgatcatattcatccttgggggcgtttccctgaacgagatgaggtgtgcctacgaggtgacccaggctaacggcaagtgggaagttctcatcgggtctacccacattctgaccccaactaagtttcttatggacttacgacaccccgattttagagaaagctctcgcgtcagctttgaagaccaggctccaaccatggaatag

SEQ ID NO: 135761 - DNA, 1674 bp, Artificial Sequence
  derived and/or modified sequence
atgacagacatcatgacagagggcatcaccatcgtggaggacatcaacaagaggcgggagcccctgcccagcctggaggccgtgtacctgatcacccccagcgagaagtctgtgcacagcctcatcagtgacttcaaggaccccccaacagccaagtacagagctgcccacgtgttcttcacagacagctgcccagatgccctcttcaatgagctggtgaagagcagagctgccaaggtgatcaagaccctgacagagatcaacatcgccttcctgccctatgagagccaggtgtacagcctggacagcgctgacagcttccagagcttctacagcccccacaaggcccagatgaagaaccccatcctggagcggctggccgagcagatcgccaccctgtgtgccaccctgaaggagtacccagctgtgcgctacagaggagagtacaaggacaatgccctgctggcccagctgatccaggacaagctggatgcctacaaggcagatgaccccaccatgggagagggccctgacaaggcccggagccagctgctgatcctggaccggggctttgaccccagcagccctgtgctgcacgagctgaccttccaggccatgtcctatgacctgctgcccattgaaaatgatgtgtacaagtatgagaccagcggcattggagaggcccgggtgaaggaggtgctgctggatgaagatgatgacctgtggatcgccctgcggcacaagcacatcgccgaggtgtcccaggaggtgaccaggagcctgaaggacttcagcagcagcaagaggatgaacacaggagagaagaccaccatgagggacctgagccagatgctgaagaagatgccccagtaccagaaggagctgagcaagtacagcacccacctgcacctggccgaggactgcatgaagcactaccagggcaccgtggacaagctgtgccgggtggagcaggacctggccatgggcacagatgctgagggggagaagatcaaggaccccatgagggccatcgtgcccatcctgctggatgccaacgtgtccacctatgacaagatccgcatcatcctgctgtacatcttcctgaagaatggcatcacagaggagaacctgaacaagctgatccagcacgcccagatccccccagaagattctgagatcatcaccaacatggcccacctgggcgtgcccatcgtgacagacagcaccctgcggcggcgcagcaagccagagaggaaggagcgcatcagcgagcagacctaccagctgagccgctggacccccatcatcaaggacatcatggaggacaccatcgaggacaagctggacaccaagcactacccctacatcagcaccaggagcagcgccagcttcagcaccacagctgtgtctgcccgctatggccactggcacaagaacaaggcccctggagagtacagaagtggccccaggctcatcatcttcatcctgggcggcgtgtccctgaatgagatgagatgtgcctatgaggtgacccaggccaacgggaagtgggaggtgctgattggcagcacccacatcctgacccccaccaagttcctgatggacctgcggcacccagacttccgggagagcagccgggtgtcctttgaggaccaggcccccaccatggagtag

SEQ ID NO: 135762 - DNA, 1308 bp, Artificial Sequence
  derived and/or modified sequence
atggcccccatcggcctgaaggctgtggtgggggagaagatcatgcatgatgtgatcaagaaggtgaagaagaagggggagtggaaggtgctggtggtggaccagctgtccatgaggatgctgagcagctgctgcaagatgacagacatcatgacagagggccctgacaaggcccggagccagctgctgatcctggaccggggctttgaccccagcagccctgtgctgcacgagctgaccttccaggccatgtcctatgacctgctgcccattgaaaatgatgtgtacaagtatgagaccagcggcattggagaggcccgggtgaaggaggtgctgctggatgaagatgatgacctgtggatcgccctgcggcacaagcacatcgccgaggtgtcccaggaggtgaccaggagcctgaaggacttcagcagcagcaagaggatgaacacaggagagaagaccaccatgagggacctgagccagatgctgaagaagatgccccagtaccagaaggagctgagcaagtacagcacccacctgcacctggccgaggactgcatgaagcactaccagggcaccgtggacaagctgtgccgggtggagcaggacctggccatgggcacagatgctgagggggagaagatcaaggaccccatgagggccatcgtgcccatcctgctggatgccaacgtgtccacctatgacaagatccgcatcatcctgctgtacatcttcctgaagaatggcatcacagaggagaacctgaacaagctgatccagcacgcccagatccccccagaagattctgagatcatcaccaacatggcccacctgggcgtgcccatcgtgacagacagcaccctgcggcggcgcagcaagccagagaggaaggagcgcatcagcgagcagacctaccagctgagccgctggacccccatcatcaaggacatcatggaggacaccatcgaggacaagctggacaccaagcactacccctacatcagcaccaggagcagcgccagcttcagcaccacagctgtgtctgcccgctatggccactggcacaagaacaaggcccctggagagtacagaagtggccccaggctcatcatcttcatcctgggcggcgtgtccctgaatgagatgagatgtgcctatgaggtgacccaggccaacgggaagtgggaggtgctgattggcagcacccacatcctgacccccaccaagttcctgatggacctgcggcacccagacttccgggagagcagccgggtgtcctttgaggaccaggcccccaccatggagtag

SEQ ID NO: 135763 - DNA, 1812 bp, Artificial Sequence
  derived and/or modified sequence
atggcccccatcggcctgaaggctgtggtgggggagaagatcatgcatgatgtgatcaagaaggtgaagaagaagggggagtggaaggtgctggtggtggaccagctgtccatgaggatgctgagcagctgctgcaagatgacagacatcatgacagagggcatcaccatcgtggaggacatcaacaagaggcgggagcccctgcccagcctggaggccgtgtacctgatcacccccagcgagaagtctgtgcacagcctcatcagtgacttcaaggaccccccaacagccaagtacagagctgcccacgtgttcttcacagacagctgcccagatgccctcttcaatgagctggtgaagagcagagctgccaaggtgatcaagaccctgacagagatcaacatcgccttcctgccctatgagagccaggtgtacagcctggacagcgctgacagcttccagagcttctacagcccccacaaggcccagatgaagaaccccatcctggagcggctggccgagcagatcgccaccctgtgtgccaccctgaaggagtacccagctgtgcgctacagaggagagtacaaggacaatgccctgctggcccagctgatccaggacaagctggatgcctacaaggcagatgaccccaccatgggagagggccctgacaaggcccggagccagctgctgatcctggaccggggctttgaccccagcagccctgtgctgcacgagctgaccttccaggccatgtcctatgacctgctgcccattgaaaatgatgtgtacaagtatgagaccagcggcattggagaggcccgggtgaaggaggtgctgctggatgaagatgatgacctgtggatcgccctgcggcacaagcacatcgccgaggtgtcccaggaggtgaccaggagcctgaaggacttcagcagcagcaagaggatgaacacaggagagaagaccaccatgagggacctgagccagatgctgaagaagatgccccagtaccagaaggagctgagcaagtacagcacccacctgcacctggccgaggactgcatgaagcactaccagggcaccgtggacaagctgtgccgggtggagcaggacctggccatgggcacagatgctgagggggagaagatcaaggaccccatgagggccatcgtgcccatcctgctggatgccaacgtgtccacctatgacaagatccgcatcatcctgctgtacatcttcctgaagaatggcatcacagaggagaacctgaacaagctgatccagcacgcccagatccccccagaagattctgagatcatcaccaacatggcccacctgggcgtgcccatcgtgacagacagcaccctgcggcggcgcagcaagccagagaggaaggagcgcatcagcgagcagacctaccagctgagccgctggacccccatcatcaaggacatcatggaggacaccatcgaggacaagctggacaccaagcactacccctacatcagcaccaggagcagcgccagcttcagcaccacagctgtgtctgcccgctatggccactggcacaagaacaaggcccctggagagtacagaagtggccccaggctcatcatcttcatcctgggcggcgtgtccctgaatgagatgagatgtgcctatgaggtgacccaggccaacgggaagtgggaggtgctgattggcagcacccacatcctgacccccaccaagttcctgatggacctgcggcacccagacttccgggagagcagccgggtgtcctttgaggaccaggcccccaccatggagtag

SEQ ID NO: 135764 - DNA, 1674 bp, Artificial Sequence
  derived and/or modified sequence
atgaccgacatcatgaccgagggcatcaccatcgtggaggacatcaacaagcgtagagagccactcccctcattggaggcagtatacctcataacgccctctgagaaaagtgtgcactcactgatttccgacttcaaggatccgcccacagccaagtatcgggccgcccacgtgttttttactgattcatgccccgacgccctttttaatgagttggtgaagagcagagcggccaaggttatcaaaactttaaccgagatcaatatcgcattcctcccctacgaatcacaagtttatagtctggatagtgctgattccttccagtccttctactctccacacaaagcccagatgaagaaccccattcttgagcggctggcggaacaaattgcaacgctgtgcgctactttgaaggagtatcccgcggtgagatatagaggcgaatacaaggacaatgccctgttggcccagctgatccaagataagttggatgcctacaaagctgatgatccaacaatgggagaagggccagataaggcacggagccagctgttgatactggatagaggctttgacccctcgtctcccgtcctgcatgaacttaccttccaggccatgtcttatgatctcctgccaatcgagaacgacgtctataagtatgaaacttctggcattggggaggcaagggtcaaggaggtgctgttggacgaggatgacgatctctggattgctttacgccacaagcatatcgcagaggtctcccaggaagtcacaaggagcctgaaagatttctcgtccagcaaaagaatgaacaccggggagaaaaccaccatgagagacctctcccaaatgctgaaaaagatgccacagtatcagaaggaactctccaaatatagcacacatctccacttggccgaggattgtatgaagcactatcagggaacagtggacaaattatgcagagttgagcaggacctcgctatggggacggatgcggagggagagaaaataaaggatccgatgagggccattgtgcccatcctcctggacgcgaacgtgtccacttacgacaaaatccgcatcatcctgctttacatatttctgaagaatggcataactgaagagaacctgaataagctcatccaacacgcccaaattccaccagaagacagcgaaattattaccaatatggcccacctgggcgtgccaatcgtgaccgattccaccctcagacgacggtcgaagcccgagcggaaagagcggattagtgaacagacatatcagctttcaaggtggacaccaatcataaaagacatcatggaggacaccatcgaagacaagcttgacacaaagcattacccctacatatccacgcgtagcagtgcctctttttccacaaccgccgtgtccgcacgttacggccattggcacaaaaataaagcccccggggagtataggtctggcccaagactaatcatcttcatcctcggaggtgtgtctctcaacgaaatgcgctgcgcctacgaagtgacgcaggcgaatgggaaatgggaggtgctgattggctctacgcacatattgacccctacgaaattcctaatggatttgcgacatcctgatttcagagaaagttcccgcgtgtcttttgaggaccaggcgccaacaatggagtag

SEQ ID NO: 135765 - DNA, 1308 bp, Artificial Sequence
  derived and/or modified sequence
atggcccccatcggcctgaaggccgtggtgggcgagaagatcatgcacgatgtgataaaaaaggtgaaaaagaagggagaatggaaggtgctggtggttgaccaactgtccatgagaatgctgtcgagttgctgcaagatgacagacatcatgaccgaaggaccggacaaggctcgttcgcagttgcttatcttggatagagggttcgatcccagctcgccagtgttacacgagctgacgtttcaggccatgtcgtatgacctcctgcctattgagaacgatgtctacaagtatgaaacatcagggatcggcgaggcccgtgtcaaggaggtgcttctggatgaagacgacgacttgtggatagccctgcgtcacaagcacattgctgaggtcagccaggaagtcactcgttcactgaaagacttctcgagttcgaaaaggatgaatactggcgaaaagacaaccatgcgtgacctgtcccaaatgctgaagaagatgccacagtaccaaaaggaactcagtaaatattcaactcacctacacctcgccgaagattgtatgaagcactaccagggaaccgtggataaactgtgccgggtggaacaggaccttgctatgggtacagacgctgagggggagaagataaaggatccaatgcgagcaattgtaccaatcctgctggatgccaatgtgtcgacctatgataagatccgcataatacttctctatatttttctcaagaatggcattaccgaggagaacctcaacaagttgattcagcacgcacagattccgccagaggattccgaaattatcaccaacatggctcatcttggcgtgcctatcgtcactgactcaacccttagaagacgctcgaagccagaaagaaaagagcgcatcagtgaacagacctatcagctatcaaggtggaccccgatcatcaaagacatcatggaggacactatcgaggacaaattggatacaaaacactacccttatatttccacccgctccagcgcttcattctcgactacggcagtgtctgcacgatatggtcactggcacaagaacaaagcgcccggggagtaccgcagcggcccaagactgattatattcatcctaggtggagtctcgttgaacgaaatgcgctgcgcctacgaggtgacccaggccaatggaaagtgggaggtccttattggcagcacgcacatcctcacacctactaagttccttatggatctgagacaccctgacttcagagagtcaagcagagtgtccttcgaagaccaggcacctaccatggaatag

SEQ ID NO: 135766 - DNA, 1812 bp, Artificial Sequence
  derived and/or modified sequence
atggcccccatcggcctgaaggccgtggtgggcgagaagatcatgcatgatgtgattaagaaggtcaagaaaaaaggagagtggaaagtcctggtagttgaccagctgtctatgcgaatgctgtcaagttgctgtaagatgacagacatcatgaccgagggcatcacgatcgttgaagatataaacaagcggcgagagcctttgccatcactggaagctgtgtacctaataacgcccagcgagaaaagtgtgcacagtcttatatccgacttcaaagatccccctactgcgaagtaccgcgctgcgcatgtgttttttacagactcctgccctgacgccttgttcaacgagctcgtcaagtccagggcagctaaggttatcaaaacgctcaccgagatcaatatcgccttcctgccctacgaaagccaagtgtactccctggattccgccgactcattccaatcattttattctccacacaaggcgcagatgaagaacccgatcttagagaggctggccgagcagattgctacactgtgcgcaacgctaaaggaatacccagctgtgagataccgcggagaatacaaagacaacgccttgctggctcagctcatccaggataagctggatgcttataaggctgacgatcctacgatgggagaagggcctgataaagcccggagtcaactactgattctcgaccgaggctttgatcctagctctcccgtgttgcacgaactgactttccaggccatgtcatatgaccttttgccaatcgaaaatgatgtctacaaatatgagacctccgggattggggaagctcgtgtaaaggaagtactcctggacgaggatgatgatttgtggatagctctgcgacacaagcacattgctgaagtgtcccaagaagtgactagatcactgaaggacttcagctcatccaagcggatgaatacaggtgaaaagaccaccatgcgggatctgagccagatgctcaaaaaaatgccgcagtaccagaaggagcttagcaagtattccacacatctacacctggccgaagattgcatgaagcactaccagggaacggttgacaaactctgtcgagtagagcaggatctggccatgggtacagacgctgaaggggagaagatcaaagacccaatgcgggcaatcgtccccattctgttagacgcgaacgtgtcaacctacgataagattcggataatcctgctctatatcttcctaaagaatgggatcacggaagagaatttgaacaagcttattcagcatgctcagattcctcctgaggactctgagattattacgaacatggcccacctcggggtccccattgtgaccgattccaccctgagaagaaggagcaagccggaacggaaggagagaatctcagaacaaacataccagctatcccgatggactccaatcatcaaagatattatggaggatacgatcgaagataaacttgacacaaagcattacccttatatcagtactcggtcttctgcgtcgtttagcacaacagcagtctcagctcgctatgggcactggcataaaaacaaggctcctggcgaataccgcagcgggcctcgcttgatcatcttcatccttggtggggtctcccttaatgagatgagatgtgcttacgaagttacccaggcaaacggaaaatgggaggttcttatcggatcaacgcatatcctgaccccaactaaatttctcatggacctgcgacaccccgacttccgggaaagctcaagagtgagtttcgaggaccaagccccaaccatggaatag

SEQ ID NO: 135767 - DNA, 1674 bp, Artificial Sequence
  derived and/or modified sequence
atgaccgatattatgactgaaggcattactattgtggaagacatcaacaagcgaagagaacctctccccagtttggaggccgtgtatctcatcaccccctccgaaaagtcagtccactcacttataagtgattttaaggatccgcctacagctaagtatagagcagctcatgtttttttcaccgactcatgtcctgatgccttatttaatgaactggtgaaaagccgagccgcaaaggtcatcaagacacttacagagattaacatagcgttcctcccttatgaatcacaggtctattccctagattctgcagattcattccaatccttttattcaccacataaggctcagatgaagaaccccattctcgagcgtctggccgaacagatcgctaccctatgtgctactctgaaggaatatcctgccgtgagatatcgtggagagtacaaagacaatgcactcctggcccaactgatccaggataaattggacgcatataaagccgatgatcccacaatgggggagggtcccgacaaagccagatcacagctactgattctcgatcgcggtttcgacccaagctcaccagtcctgcatgaattaacgtttcaggcaatgtcttacgatctgctccctatcgagaacgacgtgtacaagtacgagacaagcggcatcggggaagcaagagtgaaggaggtactacttgatgaggatgatgatctgtggattgctctgcggcacaaacacattgctgaggtgagtcaggaggtgaccagatccctcaaagacttcagttcctcgaagagaatgaacaccggcgaaaagaccacaatgcgagacctcagccaaatgctgaaaaagatgccacagtatcagaaagagctctccaagtattcaacacatcttcacctcgcggaggactgtatgaagcattaccaggggaccgtcgataaactgtgtagggtggagcaggacctggctatgggaacggatgcggagggagagaagatcaaagatccaatgcgggcaatcgtgccaatactgctggacgcaaatgtgagcacgtacgacaagataagaattatcctgttgtatatcttcttaaaaaatgggattacagaagagaatctgaataagcttatacaacatgcacagatcccacctgaagactccgagattattaccaacatggcccacctgggagtgccaatcgtgacagattcaaccttgaggaggcggagcaagcccgagagaaaggaacggatctcggaacagacctatcaactttccagatggactcccatcatcaaagatattatggaagacaccatagaggacaagttagataccaagcattacccttatatcagcacacggtcttccgcaagcttttcaacaactgccgtgtccgccaggtatggacattggcacaaaaacaaggcccctggcgaatatcgaagtggccctcggctgatcattttcatcctgggtggcgtgtctctgaacgagatgcgatgcgcctatgaggtgactcaggcaaacgggaaatgggaggtgctaatcggatctacacacatccttacccccacgaaattcttgatggatctgcgccatcccgatttccgggaaagctcccgggtgtctttcgaggatcaggccccaacaatggaatag

SEQ ID NO: 135768 - DNA, 1308 bp, Artificial Sequence
  derived and/or modified sequence
atggccccaataggcctgaaggccgtggttggcgagaagatcatgcatgatgtgataaaaaaagtgaaaaagaaaggcgagtggaaggtccttgtggtggatcagctgtcgatgaggatgctgagctcctgttgtaagatgaccgatatcatgacagaaggcccagacaaggccaggtcacagttgctcattctcgacagggggtttgacccctcaagtcctgtgctacacgagttgacattccaagctatgagctacgacttactcccaattgaaaacgacgtctataaatatgagacttctggaataggtgaagccagagtgaaagaggtacttctggatgaggatgacgacttgtggattgcgttgcgccataagcacattgctgaagtttcccaggaagtgacccggtcactgaaggatttctcaagctctaaacgaatgaacaccggagaaaagacaacaatgagagatttaagtcagatgttaaagaagatgccgcagtaccaaaaggagctctcaaagtactccactcacctacacttagcagaagactgcatgaaacactatcagggcactgtggacaaactctgtagagtcgagcaagacttagcaatgggtaccgatgccgaaggtgagaagattaaggacccaatgagggcaattgttcccatcttgttagatgcaaacgtcagtacatacgacaaaattaggataatcctgttgtatatcttccttaagaacgggataaccgaagagaacttgaacaaactgattcagcacgcgcaaatccctcccgaagattctgagatcatcacaaatatggcacacctcggggttcctatcgtgaccgattctacactgaggcggcgtagcaagccagagaggaaagagcggatctccgagcagacataccaactttcccgatggacacccatcattaaagacattatggaagatactatagaagacaagctcgacactaagcattatccgtacattagtacacggtcttcggccagcttttcaacaacagctgtgagcgcgagatacggacactggcacaagaataaggcaccgggagaatataggtccgggcctagactaatcatttttattctgggcggtgtgagtctgaatgagatgcggtgcgcttacgaggtgacccaagcgaacggcaagtgggaagtgctgataggatctacacacattcttacgcccactaaatttctgatggatctgagacatccagactttagagagtcgtcccgggtgagttttgaggatcaagctccgaccatggaatag

SEQ ID NO: 135769 - DNA, 1812 bp, Artificial Sequence
  derived and/or modified sequence
atggctcccattggcttgaaagcagtggtgggggagaagatcatgcacgatgtgatcaaaaaagtcaagaaaaagggagaatggaaggtactcgtggtcgatcaattgagtatgaggatgttgagtagctgttgcaaaatgaccgacataatgacagagggtattaccatcgttgaggatatcaataagcggagagagccgctccccagcttggaggctgtctatttaataactccaagcgagaaatcagtacatagtttgatatctgatttcaaagaccctccaacagctaagtaccgggcagcccacgtgttcttcacagattcatgccctgatgcgctcttcaacgagcttgtgaagtcccgtgccgctaaggtaataaaaaccctgaccgaaatcaatatcgctttcctgccgtatgaatctcaggtctacagtcttgattccgctgattctttccagagcttttattccccacacaaagcccagatgaaaaatcccatcctggaaaggctggccgagcaaatcgccacactctgtgccacccttaaagagtaccccgctgtgcgctataggggagagtataaggataacgctctgctggcgcagcttattcaggacaaactcgacgcatacaaggcagacgaccctacgatgggggaaggtcctgataaagccaggtcccaactgctgatattagatcggggttttgacccatcttcgcccgtgctccacgagctcaccttccaagctatgagctacgatttgctccccatcgaaaacgacgtgtataaatacgaaaccagtggcatcggtgaagccagagtgaaggaggtcctgctcgatgaggatgatgacctgtggatcgcgctgcggcataagcacatcgccgaggtgagtcaagaggtgacgagaagccttaaggacttctcatcctctaaaaggatgaacaccggagagaagacgaccatgagagatttgagccagatgctgaaaaaaatgccccagtaccaaaaagaactgagcaaatattcaacgcatctgcaccttgctgaagattgcatgaaacattaccagggaaccgtcgacaagctttgtcgcgttgagcaggatctggctatgggaaccgatgcagaaggtgagaagattaaggacccgatgcgagccatcgtacccatcctcctggacgctaacgtttcaacttacgataagatccggatcatattgctgtatatcttcctaaaaaacgggatcacggaagagaacctgaataaattaatccagcatgcgcagataccgccagaggactcagagataatcactaacatggcgcatctcggagtaccgatcgttaccgattcgaccctccgtaggcgaagcaaacctgaacgtaaggagagaatctccgagcagacgtaccagctgtcacgttggacccctatcataaaagacattatggaagacaccatcgaagacaagctggatacaaaacactacccatatatttcaacgcgtagctctgcttccttttcaacaacggcggtttcggctcggtacggtcattggcacaaaaataaggccccaggtgagtaccgtagcggtccgagactcattatctttatcttgggcggtgtgagcctgaacgaaatgaggtgcgcatatgaagtaactcaggccaatggtaaatgggaggtgctcatcggaagtacccatattctgaccccgaccaagttcctcatggatctccgccaccccgatttcagggagtccagtagagtttcatttgaagaccaagctcccacgatggagtag

SEQ ID NO: 135770 - DNA, 2329 bp, Artificial Sequence
  derived and/or modified sequence
gcccagtccgcgcgtcagtcggtccctagcgcggctgcggggcggagagctgcggctggcccagcgcgcccacctgaggaggcggcggggtccgcaggcgtcgcgggacgaggagatcggagccgggagactcgcgcagcgccatggcccccattggcctcaaagctgttgtcggagagagtaagcaagatgacagacatcatgaccgagggcataacgattgtggaagatatcaataagcgcagagagccgctccccagcctggaggctgtgtatctcatcactccatccgagaagtccgtccactctctcatcagtgactttaaggacccgccgactgctaaataccgggctgcacacgtcttcttcactgactcttgtccagatgccctgtttaatgaactggtaaaatcccgagcagccaaagtcatcaaaactctgacggaaatcaatattgcatttctcccgtatgaatcccaggtctattccttggactctgctgactctttccaaagcttctacagtccccacaaggctcagatgaagaatcctatactggagcgcctggcagagcagatcgcgaccctttgtgccaccctgaaggagtacccggctgtgcggtatcggggggaatacaaggacaatgccctgctggctcagctaatccaggacaagctcgatgcctataaagctgatgatccaacaatgggggagggcccagacaaggcacgctcccagctcctgatcctggatcgaggctttgaccccagctcccctgtgctccatgaattgacttttcaggctatgagttatgatctgctgcctatcgaaaatgatgtatacaagtatgagaccagcggcatcggggaggcacgggtgaaggaggtgctcctggacgaggacgacgacctgtggatagcactgcgccacaagcacatcgcagaggtgtcccaggaagtcacccggtctctgaaagatttttcttctagcaagagaatgaatactggagagaagaccaccatgcgggacctgtcccagatgctgaagaagatgcctcagtaccagaaagagctcagcaagtactccacccacctgcaccttgctgaggactgtatgaagcattaccaaggcaccgtagacaaactctgccgagtggagcaggacctggccatgggcacagatgctgagggagagaagatcaaggaccctatgcgagccatcgtccccattctgctggatgccaatgtcagcacttatgacaaaatccgcatcatccttctctacatctttttgaagaatggcatcacggaggaaaacctgaacaaactgatccagcacgcccagatacccccggaggatagtgagatcatcaccaacatggctcacctcggcgtgcccatcgtcaccgattccacgctgcgtcgccggagcaagccggagcggaaggaacgcatcagcgagcagacctaccagctctcacggtggactccgattatcaaggacatcatggaggacactattgaggacaaacttgacaccaaacactacccttatatctctacccgttcctctgcctccttcagcaccaccgccgtcagcgcccgctatgggcactggcataagaacaaggccccaggcgagtaccgcagtggcccccgcctcatcattttcatccttgggggtgtgagcctgaatgagatgcgctgcgcctacgaggtgacccaggccaacggaaagtgggaggtgctgataggttctactcacattcttactcccaccaaatttctcatggacctgagacaccccgacttcagggagtcctctagggtatcttttgaggatcaggctccaacaatggagtgagagccaaagaaacaaagatccacacacatcctcaccccacagaaactgctggacacactgaagaaactgaataaaacagatgaagaaataagcagttaaaaaaataagtcgcccctccaaaacacgcccccatcccacagcgctccgcagcttcccaccaccgcccgcctcagttcctttgcgtctgttgcctccccagccctgcacgccctggctggcactgttgccgctgcattctcgtgttcagtgatgccctcttcttgtttgaaacaaaagaaaataatgcattgtgttttttaaaaagagtatcttatacatgtatcctaaaaagagaagctcatgtgcaattggtgcacagcaggagaaatttctggactgttaggatgaatggacgccttctccccgttatttaagatttgtgaccttgtacataaccctgggtgacgtgcacattgcttgggtatgg

SEQ ID NO: 135771 - DNA, 1868 bp, Artificial Sequence
  derived and/or modified sequence
agtcggtccctagcgcggctgcggggcggagagctgcggctggcccagcgcgcccacctgaggaggcggcggggtccgcaggcgtcgcgggacgaggagatcggagccgggagactcgcgcagcgccatggcccccattggcctcaaagctgttgtcggagagaagattatgcatgatgtgataaagaaggtcaagaagaagggggaatggaaggtgctggtggtggatcagttaagcatgaggatgctgtcctcctgctgcaagatgacagacatcatgaccgagggcccagacaaggcacgctcccagctcctgatcctggatcgaggctttgaccccagctcccctgtgctccatgaattgacttttcaggctatgagttatgatctgctgcctatcgaaaatgatgtatacaagtatgagaccagcggcatcggggaggcacgggtgaaggaggtgctcctggacgaggacgacgacctgtggatagcactgcgccacaagcacatcgcagaggtgtcccaggaagtcacccggtctctgaaagatttttcttctagcaagagaatgaatactggagagaagaccaccatgcgggacctgtcccagatgctgaagaagatgcctcagtaccagaaagagctcagcaagtactccacccacctgcaccttgctgaggactgtatgaagcattaccaaggcaccgtagacaaactctgccgagtggagcaggacctggccatgggcacagatgctgagggagagaagatcaaggaccctatgcgagccatcgtccccattctgctggatgccaatgtcagcacttatgacaaaatccgcatcatccttctctacatctttttgaagaatggcatcacggaggaaaacctgaacaaactgatccagcacgcccagatacccccggaggatagtgagatcatcaccaacatggctcacctcggcgtgcccatcgtcaccgattccacgctgcgtcgccggagcaagccggagcggaaggaacgcatcagcgagcagacctaccagctctcacggtggactccgattatcaaggacatcatggaggacactattgaggacaaacttgacaccaaacactacccttatatctctacccgttcctctgcctccttcagcaccaccgccgtcagcgcccgctatgggcactggcataagaacaaggccccaggcgagtaccgcagtggcccccgcctcatcattttcatccttgggggtgtgagcctgaatgagatgcgctgcgcctacgaggtgacccaggccaacggaaagtgggaggtgctgataggttctactcacattcttactcccaccaaatttctcatggacctgagacaccccgacttcagggagtcctctagggtatcttttgaggatcaggctccaacaatggagtgagagccaaagaaacaaagatccacacacatcctcaccccacagaaactgctggacacactgaagaaactgaataaaacagatgaagaaataagcagttaaaaaaataagtcgcccctccaaaacacgcccccatcccacagcgctccgcagcttcccaccaccgcccgcctcagttcctttgcgtctgttgcctccccagccctgcacgccctggctggcactgttgccgctgcattctcgtgttcagtgatgccctcttcttgtttgaaacaaaagaaaataatgcattgtgttttttaaaaagagtatcttatacatgtatcctaaaaagagaagctcatgtgcaattggtgcacagcaggagaaatttctggactgttaggatgaatggacgccttctccccgttatttaagatttgtgaccttgtacata

SEQ ID NO: 135772 - DNA, 3909 bp, Artificial Sequence
  derived and/or modified sequence
agtccgcgcgtcagtcggtccctagcgcggctgcggggcggagagctgcggctggcccagcgcgcccacctgaggaggcggcggggtccgcaggcgtcgcgggacgaggagatcggagccgggagactcgcgcagcgccatggcccccattggcctcaaagctgttgtcggagagaagattatgcatgatgtgataaagaaggtcaagaagaagggggaatggaaggtgctggtggtggatcagttaagcatgaggatgctgtcctcctgctgcaagatgacagacatcatgaccgagggcataacgattgtggaagatatcaataagcgcagagagccgctccccagcctggaggctgtgtatctcatcactccatccgagaagtccgtccactctctcatcagtgactttaaggacccgccgactgctaaataccgggctgcacacgtcttcttcactgactcttgtccagatgccctgtttaatgaactggtaaaatcccgagcagccaaagtcatcaaaactctgacggaaatcaatattgcatttctcccgtatgaatcccaggtctattccttggactctgctgactctttccaaagcttctacagtccccacaaggctcagatgaagaatcctatactggagcgcctggcagagcagatcgcgaccctttgtgccaccctgaaggagtacccggctgtgcggtatcggggggaatacaaggacaatgccctgctggctcagctaatccaggacaagctcgatgcctataaagctgatgatccaacaatgggggagggcccagacaaggcacgctcccagctcctgatcctggatcgaggctttgaccccagctcccctgtgctccatgaattgacttttcaggctatgagttatgatctgctgcctatcgaaaatgatgtatacaagtatgagaccagcggcatcggggaggcacgggtgaaggaggtgctcctggacgaggacgacgacctgtggatagcactgcgccacaagcacatcgcagaggtgtcccaggaagtcacccggtctctgaaagatttttcttctagcaagagaatgaatactggagagaagaccaccatgcgggacctgtcccagatgctgaagaagatgcctcagtaccagaaagagctcagcaagtactccacccacctgcaccttgctgaggactgtatgaagcattaccaaggcaccgtagacaaactctgccgagtggagcaggacctggccatgggcacagatgctgagggagagaagatcaaggaccctatgcgagccatcgtccccattctgctggatgccaatgtcagcacttatgacaaaatccgcatcatccttctctacatctttttgaagaatggcatcacggaggaaaacctgaacaaactgatccagcacgcccagatacccccggaggatagtgagatcatcaccaacatggctcacctcggcgtgcccatcgtcaccgattccacgctgcgtcgccggagcaagccggagcggaaggaacgcatcagcgagcagacctaccagctctcacggtggactccgattatcaaggacatcatggaggacactattgaggacaaacttgacaccaaacactacccttatatctctacccgttcctctgcctccttcagcaccaccgccgtcagcgcccgctatgggcactggcataagaacaaggccccaggcgagtaccgcagtggcccccgcctcatcattttcatccttgggggtgtgagcctgaatgagatgcgctgcgcctacgaggtgacccaggccaacggaaagtgggaggtgctgataggttctactcacattcttactcccaccaaatttctcatggacctgagacaccccgacttcagggagtcctctagggtatcttttgaggatcaggctccaacaatggagtgagagccaaagaaacaaagatccacacacatcctcaccccacagaaactgctggacacactgaagaaactgaataaaacagatgaagaaataagcagttaaaaaaataagtcgcccctccaaaacacgcccccatcccacagcgctccgcagcttcccaccaccgcccgcctcagttcctttgcgtctgttgcctccccagccctgcacgccctggctggcactgttgccgctgcattctcgtgttcagtgatgccctcttcttgtttgaaacaaaagaaaataatgcattgtgttttttaaaaagagtatcttatacatgtatcctaaaaagagaagctcatgtgcaattggtgcacagcaggagaaatttctggactgttaggatgaatggacgccttctccccgttatttaagatttgtgaccttgtacataaccctgggtgacgtgcacattgcttgggtatggaacggtagaaatttgggtgtttttaaaaccttgtttggggttgttcctgtccttgttgagaatcatagagatgtctgtgttcttggagtatttcacactgaggactaatctgctatcttcattccagtccctacccctcagtgcctgctctcatccaaataacctgggaggtgacaatcaggatatctcaggaggtccaaggtggaacagacctctttgcctttcccagcgtctcatacccccggtagtgcagctgtgggtggaggctggggtgtctgcacgaagtcaggccagcgtcctcctccacagcctgtcactgccccctccccagcctgtgtccacagtgctgtgatcccgagggaagtcctccagtctaagtcacagtgccctgacaggtgagaagcaaactcccgctggaagcctccatctctttggaaaaacagttagtctggagcctgtggcccaggcccttctgtccccaggcatcatcccaacagctcattttccctagtccgccttcgttcaagggtcaggaatggaccagaacagatgggttctggaggcccctgaacagagggctatggctgtggagaaggttcttggcccgttggactcacacagaccctgtaccctctcggcaagcatcttcagtcagattatcctcagtttcagatacttcataataccttgtgttgtgtggggtcatacatcatcgtgtttgtaagagaagatggtcattttattctctgtataaaacttagctctaaagcagaaactaaagcagcaaatgcaggaaggctgtctcgccatcctcaagactcagcagctctcattctccagtggtgagcacaccatttgtgctgctgctgttgtcgtgaaatataataacagtggaagtcacaaaaatgtcccctgcccagccccctcgccgcccttgacctcctgcaggccatgtgtgtattacttgtctagtgatgtcctctcaaagtgctgtacgcgagctcggcgccacctccgcctccctttcagagcctgctccccgccctctctgctcgctgcattgtggtgttctcttctcaaggctttgaaatctccccttgcactgagattagtcgtcagatctctccccgtctccctcccaacttatacgacctgatttccttaggacggaaccgcaggcacctgcgccgggcgtcttactcccgctgcttgttctgtcccctccctcggaccaaacagtgctcatgcttcaggaccttgtttgtcgaagatgttggtttccctttctctgttatttatataaaaataatttatcaaaaggatattttaaaaaagctagtctgtcttgaaacttgtttaccttaaaattatcagaatctcagtgtttgaaagtactgaagcacaaacatatatcatctctgtaccattctgtactaaagcacttgagtctaataaataaagaaatcagcaccccttcccggtgtccaggggg

SEQ ID NO: 135773 - protein, 285 aa, Artificial Sequence
  derived and/or modified sequence
MSDDFLWFEGIAFPTMGFRSETLRKVRDEFVIRDEDVIILTYPKSGTNWLAEILCLMHSKGDAKWIQSVPIWERSPWVESEIGYTALSETESPRLFSSHLPIQLFPKSFFSSKAKVIYLMRNPRDVLVSGYFFWKNMKFIKKPKSWEEYFEWFCQGTVLYGSWFDHIHGWMPMREEKNFLLLSYEELKQDTGRTIEKICQFLGKTLEPEELNLILKNSSFQSMKENKMSNYSLLSVDYVVDKAQLLRKGVSGDWKNHFTVAQAEDFDKLFQEKMADLPRELFPWE

SEQ ID NO: 135774 - DNA, 858 bp, Artificial Sequence
  derived and/or modified sequence
atgagtgacgatttcctttggttcgagggaatcgcctttcccactatggggttccgcagtgagacgttacgcaaggtaagagatgagtttgtcatccgggacgaagacgtgattatactgacataccccaagtctggtaccaactggctcgccgagatcctttgtctgatgcattcgaagggagacgccaagtggattcagtccgtacctatttgggagcgatccccttgggtggagtctgagattgggtacaccgccttgagcgaaactgagtctccccgactattttcttcccacctgcctatccagctgtttccgaaaagctttttttcctcaaaagccaaagtcatatacctcatgcggaacccgcgggacgtgttagtatcaggctattttttctggaagaatatgaagttcataaagaaacccaagtcgtgggaggaatactttgaatggttctgccagggaaccgttctttatggcagctggttcgatcacatacatgggtggatgccaatgcgtgaggaaaagaatttccttctgcttagctacgaggagctcaagcaagatacaggtagaacaatagagaagatctgccagtttcttgggaagacactggaacccgaagaattaaatcttatccttaaaaacagctctttccaatctatgaaagagaataagatgagcaattacagccttctgagtgttgactatgtagtggacaaggcccagttgctgcgaaagggcgtgtctggagactggaagaatcactttaccgttgcccaagcggaggatttcgacaagctgttccaggagaaaatggctgatcttccccgtgagcttttcccatgggaatag

SEQ ID NO: 135775 - DNA, 858 bp, Artificial Sequence
  derived and/or modified sequence
atgtctgatgacttcctgtggtttgagggcatcgccttccccaccatgggcttccgctctgagaccctgaggaaggtgagagatgaatttgtgatcagagatgaagatgtgatcatcctgacctaccccaagagcggcaccaactggctggccgagatcctgtgcctgatgcacagcaaaggagatgccaagtggatccagagcgtgcccatctgggagaggagcccctgggtggagagcgagatcggctacacagccctgtctgaaacagagagccccaggctcttcagcagccacctgcccatccagctgttccccaagagcttcttcagcagcaaggccaaggtgatctacctgatgaggaaccccagagatgtgctggtgtctggctacttcttctggaagaacatgaagttcatcaagaagcccaagtcctgggaggagtactttgagtggttctgccagggcaccgtgctgtatggctcctggtttgaccacatccacggctggatgcccatgagggaggagaagaacttcctgctgctgtcctatgaggagctgaagcaggacaccggccgcaccatcgagaagatctgccagttcctgggcaagaccctggagcctgaggagctgaacctgatcctgaagaacagcagcttccagagcatgaaggagaacaagatgagcaactacagcctgctgtctgtggactatgtggtggacaaggcccagctgctgaggaagggcgtgtctggggactggaagaaccacttcaccgtggcccaggccgaggactttgacaagctgttccaggagaagatggctgacctgccccgggagctgttcccctgggagtag

SEQ ID NO: 135776 - DNA, 858 bp, Artificial Sequence
  derived and/or modified sequence
atgagcgacgacttcctgtggttcgagggcatcgccttccccaccatgggattccgctcggagaccctgaggaaggtgagagatgagttcgtaattagggacgaggacgtcataatcctgacttaccccaagtctggtactaattggctggctgaaatcctttgcctgatgcatagcaagggtgatgcaaagtggatccagtctgtgcctatttgggagagatctccgtgggtggagagcgagatcggatatacggcgctgtccgaaacagagagtcctaggctgttctcgagccatttgcctatacagctgtttcctaagtcttttttcagctcaaaagccaaggtgatttatctgatgcggaatcccagggatgtgctcgtgtctgggtatttcttctggaaaaacatgaaattcattaaaaaacccaagagctgggaggagtatttcgagtggttctgccagggcacagtcctctatgggagctggttcgaccatatacatggctggatgccgatgagagaagaaaagaattttctcctactgtcttatgaagaacttaaacaggacacaggtcgcacaatagagaaaatctgtcagttcttgggcaagactctagagcctgaggaactcaatcttattctgaaaaactcttcattccagtcaatgaaagagaataagatgtcaaattatagtctgttaagtgtggactatgtggtggataaagcacagttgctgaggaaaggggtgagtggtgactggaagaaccattttactgtggcccaggcggaggactttgacaaactgttccaggagaagatggctgatcttccccgggagctatttccctgggagtag

SEQ ID NO: 135777 - DNA, 858 bp, Artificial Sequence
  derived and/or modified sequence
atgtctgacgacttcctctggttcgaaggcattgcattcccaaccatgggcttcagatccgagaccctgagaaaggtgcgggatgagtttgtgatccgcgacgaggacgtcatcatcttgacttaccccaagtctggcacgaattggttggctgagattctgtgtctgatgcatagcaaaggcgacgccaagtggatccagagcgtcccaatatgggaaaggtccccctgggtcgagagcgaaatcggatataccgccctctctgagacggaatctccaagattgttttcatcccacttacccattcagctctttcctaaatctttttttagctccaaagcaaaggtaatctatctaatgagaaatcccagagatgtccttgtgtcgggatatttcttctggaaaaacatgaagtttatcaagaaacccaaaagctgggaggaatactttgaatggttctgccagggcactgtgctgtacggctcttggtttgatcatatacacgggtggatgcccatgagggaggaaaagaacttcctccttctgtcctacgaggagctgaagcaggatacagggagaactattgagaaaatttgtcaattcctcggaaagacgctcgaacccgaagagctaaatttaattcttaagaacagctcatttcaatcaatgaaggaaaataagatgagcaattacagcctactgagtgtggactatgttgtagataaggctcagctgctgcggaaaggagtgtctggagactggaagaatcattttactgtggcccaggccgaggacttcgataaactgttccaggaaaaaatggcagacctccccagagaactgttcccctgggagtag

SEQ ID NO: 135778 - DNA, 858 bp, Artificial Sequence
  derived and/or modified sequence
atgagcgacgacttcctgtggttcgagggcatcgccttccccaccatgggcttcagaagcgagaccctgagaaaggtgagagacgagttcgtgatcagagacgaggacgtgatcatcctgacctaccccaagagcggcaccaactggctggccgagatcctgtgcctgatgcacagcaagggcgacgccaagtggatccagagcgtgcccatctgggagagaagcccctgggtggagagcgagatcggctacaccgccctgagcgagaccgagagccccagactgttcagcagccacctgcccatccagctgttccccaagagcttcttcagcagcaaggccaaggtgatctacctgatgagaaaccccagagacgtgctggtgagcggctacttcttctggaagaacatgaagttcatcaagaagcccaagagctgggaggagtacttcgagtggttctgccagggcaccgtgctgtacggcagctggttcgaccacatccacggctggatgcccatgagagaggagaagaacttcctgctgctgagctacgaggagctgaagcaggacaccggcagaaccatcgagaagatctgccagttcctgggcaagaccctggagcccgaggagctgaacctgatcctgaagaacagcagcttccagagcatgaaggagaacaagatgagcaactacagcctgctgagcgtggactacgtggtggacaaggcccagctgctgagaaagggcgtgagcggcgactggaagaaccacttcaccgtggcccaggccgaggacttcgacaagctgttccaggagaagatggccgacctgcccagagagctgttcccctgggagtag

SEQ ID NO: 135779 - DNA, 660 bp, Artificial Sequence
  derived and/or modified sequence
gactgggtggatgaggctcaccccggcggggagaagggacgaggaggggcggacagcggaaggtccgggagtgtccgccataaagtcgtttgagttttaacttctagtcatggcgaatgatcgcaggagagcacagactggaccctgctacgatctctcttggagtggatcagactgatgatcaccaacaaccaactcattcccggataaggaagaagagagtgtcacctacttcagtgtggtttcaaccctacttctgcatcttaaagacactgtgtacaacgttggacactgtgcaggatgatgccacttcatcttggatgctaatctgccatgttgacttctgattaaccccaggcccaggaatgcctcaagatttctactttacttactgttgcttgtgtaagccaagacaaccttgatgttatcataaacatgtacttacctaagtcctgtcctttggcaaattatgggctatgagacacagcattcttgcctttccctgaggggtcaatttcagcgatcctacacattccttctgaagcacttatgctctttctatatggtatgtaagctctcggtctggggagtaacagtgcagagatctacctgtcttgttgccacatgtttctaaactttccaataaatcaccttctactg

SEQ ID NO: 135780 - DNA, 1987 bp, Artificial Sequence
  derived and/or modified sequence
acaacaaacatgtgacatgctgggacaaggttaaagatcgttttatccttgctgtaaaagctgatctgcctgtagctgccacagcctccagcggtggctacagttgaaaccctcacaccacgcaggaagaggtcatcatcatgtcggacgatttcttatggtttgaaggcatagctttccctactatgggtttcagatccgaaaccttaagaaaagtacgtgatgagtttgtgataagggatgaagatgtaataatattgacttaccccaaatcaggaacaaactggttggctgagattctctgcctgatgcactccaagggggatgccaagtggatccaatctgtgcccatctgggagcgatcaccctgggtagagagtgagattgggtatacagcactcagtgaaacggagagtccacgtttattctcctcccacctccccatccagttattccccaagtctttcttcagttccaaggccaaggtgatttatctcatgagaaatcccagagatgttttggtgtctggttattttttctggaaaaacatgaagtttattaagaaaccaaagtcatgggaagaatattttgaatggttttgtcaaggaactgtgctatatgggtcatggtttgaccacattcatggctggatgcccatgagagaggagaaaaacttcctgttactgagttatgaggagctgaaacaggacacaggaagaaccatagagaagatctgtcaattcctgggaaagacgttagaacccgaagaactgaacttaattctcaagaacagctcctttcagagcatgaaagaaaacaagatgtccaattattccctcctgagtgttgattatgtagtggacaaagcacaacttctgagaaaaggtgtatctggggactggaaaaatcacttcacagtggcccaagctgaagactttgataaattgttccaagagaagatggcagatcttcctcgagagctgttcccatgggaataacgtccaaaacactctggatcttatatggagaatgacattgattctcctgtccttgtacatgtacctgactggggtcattgtgtaagacttattattttatcctgaaaccttaaatatcaaacctctgcatctctgatcccttccttgttaaaagttaccagggttggccaggcacggtggttcatgcctgtaatcccagcactatgggaggccgagacgggcggatcacgaggtcaggagactgagaccatcctggctaacacggtgaaaccccatctctactaaaaatacaaaaaccaaaaaaaattagccaggcgcattggctcatgtctgtaatcccagcactttgggaggtcgggggggtgggggaggatcacggggtcaggagatcgagaccatcctggccaacatgatgaaaccctatctctactaaaaatacaaaaattagccgggcatggtggtgcacgcctatagtcccagctactcgggaggctgaggtaggagaatcgtttgaactcaggaggcagaggttgcaatgagccaagatcgcgccactgcactccagcctgggtgacagagcgagaccgtctcaaaaagaaagaagtgactagggttcagagaaccagggttcaaagcccagggatgcaaaggttgcagtgagttgagtcatgggatcccagacttttttaaatgtttgcaatgtttcccgtttacagaatgctacaagaataatgtacgtactacctaaaaggatgtctaaatgtttgttaataaaaataagaaatagctacagtgacagattttagagcaaaaattagtaataaaaataagaaataaaattacaggagcaattaaggttccatttcttttcatcacatgtatctccacaatttattattgctctgatcttaaggagtgtaatttgcaatctaattttatcctcttactctgtgttgttaaaccatatacaataaacggtgtttatggag

SEQ ID NO: 135781 - protein, 117 aa, Artificial Sequence
  derived and/or modified sequence
MALETVPKDLRHLRACLLCSLVKTIDQFEYDGCDNCDAYLQMKGNREMVYDCTSSSFDGIIAMMSPEDSWVSKWQRVSNFKPGVYAVSVTGRLPQGIVRELKSRGVAYKSRDTAIKT

SEQ ID NO: 135782 - DNA, 1499 bp, Artificial Sequence
  derived and/or modified sequence
tatttacttcctgcgggtgcacaggctgtggtcgtctatctccctgttgttcttcccatcggcgaagatggccctggagacggtgccgaaggacctgcggcatctgcgggcctgtttgctgtgttcgctggtcaagactatagaccagtttgaatatgatggttgtgacaattgtgatgcatatctacaaatgaagggtaaccgagagatggtatatgactgcactagctcttcctttgatggaatcattgcgatgatgagtccagaggacagctgggtctccaagtggcagcgagtcagtaactttaagccaggtgtatatgcggtgtcagtcactggtcgcctgccccaaggaatcgtgcgggagctgaaaagtcgaggagtggcctacaaatccagagacacagctataaagacctagcaagatgcaaggctgccagcatctttgctctccacctcctgcctctgcttatttcttgttctggaactaaatgaacagaacttcaaatacttcctaccctccaattcagactcagctgactgttgagagagcagcacatcattttatcattttatcttctttggactacaggtggggtgggagggatttgggttggtggattaacagatggaattgaggagagagtaggatgctgattttcctacccgtggcccaggtctgtgccttccccatgccaaggactctaggtcaaatgtcaataaatatgaacctcgagaaagttctgaaggccatgacacctgccttgcctccctcttccattctcttaggcacagtaatagcttatttgccctataagaaccttcccagagcagcagaggcccttctactccctcttgactgtctcagcctctgggattgcagcctttgtagtgtgcttccttgcttcctatcagagggtgctgatccagaggctcagtaaccccatcaacttggtggccctggtgtctcacacttgtatccttctgccctcgagacctggcacagcagtatcccttgaagaaatcctgaggctttgtagagtgctccttgaccatgtttaataattcttccctcccctgcttgtctattttcttctcttcacggctcttcctataccttaggccagtctcaagcactcactggagacccttgggccttgggcgaccattgagtcctagtctcccttgtttgtgcccctgtaggaggtaggtccttttctcctccggcctagtaggggaccttgggtaacatcccatttttcggccaaggtgagttgttttaggataaaaaaatttaccacaaattctcatttaaatttccacagaaatcctgttcgtatccccattttgatttccctaagttccttgttctccctctaaaaagagaatgattgcaccctgcctgtttacctcaggattgttgtgattgtagaaacgaagctatgtgaaaattatataagtattataaaggtgaaatacttttgctctcaaaaaaaaaa

SEQ ID NO: 135783 - DNA, 1489 bp, Artificial Sequence
  derived and/or modified sequence
tatttacttcctgcgggtgcacaggctgtggtcgtctatctccctgttgttcttcccatcggcgaagatggccctggagacggtgccgaaggacctgcggcatctgcgggcctgtttgctgtgttcgctggtcaagactatagaccagtttgaatatgatggttgtgacaattgtgatgcatatctacaaatgaagggtaaccgagagatggtatatgactgcactagctcttcctttgatggaatcattgcgatgatgagtccagaggacagctgggtctccaagtggcagcgagtcagtaactttaagccaggtgtatatgcggtgtcagtcactggtcgcctgccccaaggaatcgtgcgggagctgaaaagtcgaggagtggcctacaaatccagagacacagctataaagacctagcaagatgcaaggctgccagcatctttgctctccacctcctgcctctgcttatttcttgttctggaactaaatgaacagaacttcaaatacttcctaccctccaattcagactcagctgactgttgagagagcagcacatcattttatcattttatcttctttggactacaggtggggtgggagggatttgggttggtggattaacagatggaattgaggagagagtaggatgctgattttcctacccgtggcccaggtctgtgccttccccatgccaaggactctaggtcaaatgtcaataaatatgaacctcgagaaagttctgaaggccatgacacctgccttgcctccctcttccattctcttaggcacagtaatagcttatttgccctataagaaccttcccagagcagcagaggcccttctactccctcttgactgtctcagcctctgggattgcagcctttgtagtgtgcttccttgcttcctatcggagggtgctgatccagaggctcagtaaccccatcaacttggtggccctggtgtctcacacttgtatccttctgccctcgagacctggcacagcagtatcccttgaagaaatcctgaggctttgtagagtgctccttgaccatgtttaataattcttccctcccctgcttgtctattttcttctcttcacggctcttcctataccttaggccagtctcaagcactcactggagacccttgggccttgggcgaccattgagtcctagtctcccttgtttgtgcccctgtaggaggtaggtccttttctcctccggcctagtaggggaccttgggtaacatcccatttttcggccaaggtgagttgttttaggataaaaaaatttaccacaaattctcatttaaatttccacagaaatcctgttcgtatccccattttgatttccctaagttccttgttctccctctaaaaagagaatgattgcaccctgcctgtttacctcaggattgttgtgattgtagaaacgaagctatgtgaaaattatataagtattataaaggtgaaatacttttgctctc

SEQ ID NO: 135784 - DNA, 354 bp, Artificial Sequence
  derived and/or modified sequence
atggccctggagaccgtgcccaaggacctgagacacctgagagcctgcctgctgtgcagcctggtgaagaccatcgaccagttcgagtacgacggctgcgacaactgcgacgcctacctgcagatgaagggcaacagagagatggtgtacgactgcaccagcagcagcttcgacggcatcatcgccatgatgagccccgaggacagctgggtgagcaagtggcagagagtgagcaacttcaagcccggcgtgtacgccgtgagcgtgaccggcagactgccccagggcatcgtgagagagctgaagagcagaggcgtggcctacaagagcagagacaccgccatcaagacctag

SEQ ID NO: 135785 - DNA, 354 bp, Artificial Sequence
  derived and/or modified sequence
atggccctggagaccgtacccaaagatttgagacatctccgcgcctgtctcttgtgttctttagtaaaaactattgatcagtttgagtacgatggctgcgacaactgtgatgcctacctacagatgaagggtaatcgggagatggtttacgattgtaccagctcatccttcgatggcattatcgccatgatgtctcccgaagatagttgggtctctaagtggcagagagtgagtaacttcaaacctggagtgtacgctgtaagcgtgactgggaggctcccacaaggaatcgtgcgcgagttgaaaagccgcggcgtcgcctataaatccagggacacagctattaagacttag

SEQ ID NO: 135786 - DNA, 354 bp, Artificial Sequence
  derived and/or modified sequence
atggccctggagaccgtgcccaaggacctgcggcacctgcgggcctgcctgctgtgcagcctggtgaagaccatcgaccagtttgaatatgatggctgtgacaactgtgatgcctacctgcagatgaagggcaaccgggagatggtgtatgactgcaccagcagcagctttgatggcatcatcgccatgatgagcccagaagattcctgggtgtccaagtggcagagggtgagcaacttcaagccaggagtgtatgctgtgtctgtgacaggccgcctgccccagggcatcgtgcgggagctgaagagcagaggagtggcctacaagagccgggacacagccatcaagacctag

SEQ ID NO: 135787 - DNA, 354 bp, Artificial Sequence
  derived and/or modified sequence
atggccctggagaccgtgcccaaggacctgcggcacctgcgggcctgtctgctgtgcagtttggtcaaaacgatagatcagttcgagtacgatggctgcgacaactgtgacgcatacctccaaatgaagggcaatagggaaatggtgtatgactgtacatcgtctagtttcgatgggattattgccatgatgtctccagaggatagctgggtaagtaaatggcaacgagtgtccaattttaagcctggtgtgtatgccgttagtgtcaccggccgactgccacaggggattgtgagagagttgaagtccaggggcgtggcctacaaatcgcgcgacacagcgatcaagacctag

SEQ ID NO: 135788 - DNA, 354 bp, Artificial Sequence
  derived and/or modified sequence
atggccttggagactgtccctaaagacttacgtcatctgcgtgcatgcctgctctgctccctggttaaaacgatcgaccagttcgaatatgacggctgcgataattgcgacgcttatctgcagatgaaggggaatcgcgagatggtctatgattgtactagcagtagttttgatggtatcatcgctatgatgtcacctgaggactcttgggtctccaaatggcagagggtttctaactttaaaccgggagtctatgcagttagcgtgaccggcagattgccccaggggatagtgagggaactgaagtcacgcggtgtagcatataaaagccgcgacacagctatcaagacctag

SEQ ID NO: 135789 - protein, 786 aa, Artificial Sequence
  derived and/or modified sequence
MSFSRALLWARLPAGRQAGHRAAICSALRPHFGPFPGVLGQVSVLATASSSASGGSKIPNTSLFVPLTVKPQGPSADGDVGAELTRPLDKNEVKKVLDKFYKRKEIQKLGADYGLDARLFHQAFISFRNYIMQSHSLDVDIHIVLNDICFGAAHADDLFPFFLRHAKQIFPVLDCKDDLRKISDLRIPPNWYPDARAMQRKIIFHSGPTNSGKTYHAIQKYFSAKSGVYCGPLKLLAHEIFEKSNAAGVPCDLVTGEERVTVQPNGKQASHVSCTVEMCSVTTPYEVAVIDEIQMIRDPARGWAWTRALLGLCAEEVHLCGEPAAIDLVMELMYTTGEEVEVRDYKRLTPISVLDHALESLDNLRPGDCIVCFSKNDIYSVSRQIEIRGLESAVIYGSLPPGTKLAQAKKFNDPNDPCKILVATDAIGMGLNLSIRRIIFYSLIKPSINEKGERELEPITTSQALQIAGRAGRFSSRFKEGEVTTMNHEDLSLLKEILKRPVDPIRAAGLHPTAEQIEMFAYHLPDATLSNLIDIFVDFSQVDGQYFVCNMDDFKFSAELIQHIPLSLRVRYVFCTAPINKKQPFVCSSLLQFARQYSRNEPLTFAWLRRYIKWPLLPPKNIKDLMDLEAVHDVLDLYLWLSYRFMDMFPDASLIRDLQKELDGIIQDGVHNITKLIKMSETHKLLNLEGFPSGSQSRLSGTLKSQARRTRGTKALGSKATEPPSPDAGELSLASRLVQQGLLTPDMLKQLEKEWMTQQTEHNKEKTESGTHPKGTRRKKKEPDSD

SEQ ID NO: 135790 - protein, 263 aa, Artificial Sequence
  derived and/or modified sequence
MSFSRALLWARLPAGRQAGHRAAICSALRPHFGPFPGVLGQVSVLATASSSASGGSKIPNTSLFVPLTVKPQGPSADGDVGAELTRPLDKNEVAVIDEIQMIRDPARGWAWTRALLGLCAEEVHLCGEPAAIDLVMELMYTTGEEVEVRDYKRLTPISVLDHALESLDNLRPGDCIVCFSKNDIYSVSRQIEIRGLESAVIYGSLPPGTKLAQAKKFNDPNDPCKILVATDAIGMGLNLSIRRIIFYSLIKPSINEKGERELE

SEQ ID NO: 135791 - DNA, 2361 bp, Artificial Sequence
  derived and/or modified sequence
atgagcttcagcagagccctgctgtgggccagactgcccgccggcagacaggccggccacagagccgccatctgcagcgccctgagaccccacttcggccccttccccggcgtgctgggccaggtgagcgtgctggccaccgccagcagcagcgccagcggcggcagcaagatccccaacaccagcctgttcgtgcccctgaccgtgaagccccagggccccagcgccgacggcgacgtgggcgccgagctgaccagacccctggacaagaacgaggtgaagaaggtgctggacaagttctacaagagaaaggagatccagaagctgggcgccgactacggcctggacgccagactgttccaccaggccttcatcagcttcagaaactacatcatgcagagccacagcctggacgtggacatccacatcgtgctgaacgacatctgcttcggcgccgcccacgccgacgacctgttccccttcttcctgagacacgccaagcagatcttccccgtgctggactgcaaggacgacctgagaaagatcagcgacctgagaatcccccccaactggtaccccgacgccagagccatgcagagaaagatcatcttccacagcggccccaccaacagcggcaagacctaccacgccatccagaagtacttcagcgccaagagcggcgtgtactgcggccccctgaagctgctggcccacgagatcttcgagaagagcaacgccgccggcgtgccctgcgacctggtgaccggcgaggagagagtgaccgtgcagcccaacggcaagcaggccagccacgtgagctgcaccgtggagatgtgcagcgtgaccaccccctacgaggtggccgtgatcgacgagatccagatgatcagagaccccgccagaggctgggcctggaccagagccctgctgggcctgtgcgccgaggaggtgcacctgtgcggcgagcccgccgccatcgacctggtgatggagctgatgtacaccaccggcgaggaggtggaggtgagagactacaagagactgacccccatcagcgtgctggaccacgccctggagagcctggacaacctgagacccggcgactgcatcgtgtgcttcagcaagaacgacatctacagcgtgagcagacagatcgagatcagaggcctggagagcgccgtgatctacggcagcctgccccccggcaccaagctggcccaggccaagaagttcaacgaccccaacgacccctgcaagatcctggtggccaccgacgccatcggcatgggcctgaacctgagcatcagaagaatcatcttctacagcctgatcaagcccagcatcaacgagaagggcgagagagagctggagcccatcaccaccagccaggccctgcagatcgccggcagagccggcagattcagcagcagattcaaggagggcgaggtgaccaccatgaaccacgaggacctgagcctgctgaaggagatcctgaagagacccgtggaccccatcagagccgccggcctgcaccccaccgccgagcagatcgagatgttcgcctaccacctgcccgacgccaccctgagcaacctgatcgacatcttcgtggacttcagccaggtggacggccagtacttcgtgtgcaacatggacgacttcaagttcagcgccgagctgatccagcacatccccctgagcctgagagtgagatacgtgttctgcaccgcccccatcaacaagaagcagcccttcgtgtgcagcagcctgctgcagttcgccagacagtacagcagaaacgagcccctgaccttcgcctggctgagaagatacatcaagtggcccctgctgccccccaagaacatcaaggacctgatggacctggaggccgtgcacgacgtgctggacctgtacctgtggctgagctacagattcatggacatgttccccgacgccagcctgatcagagacctgcagaaggagctggacggcatcatccaggacggcgtgcacaacatcaccaagctgatcaagatgagcgagacccacaagctgctgaacctggagggcttccccagcggcagccagagcagactgagcggcaccctgaagagccaggccagaagaaccagaggcaccaaggccctgggcagcaaggccaccgagccccccagccccgacgccggcgagctgagcctggccagcagactggtgcagcagggcctgctgacccccgacatgctgaagcagctggagaaggagtggatgacccagcagaccgagcacaacaaggagaagaccgagagcggcacccaccccaagggcaccagaagaaagaagaaggagcccgacagcgactag

SEQ ID NO: 135792 - DNA, 2361 bp, Artificial Sequence
  derived and/or modified sequence
atgtcattcagtagagccctgctgtgggctaggctgccggctggtagacaggctggtcacagagcggcaatttgctcggctcttagaccacatttcggcccttttcctggagtactgggacaggtgtctgtgctggccaccgcctcgagttccgcatccggcgggtctaaaatcccaaacacctctttattcgttccgctcaccgtcaaacctcagggcccttccgcagacggtgatgtaggtgcagagcttaccaggccactcgacaagaatgaagtgaaaaaagtcctcgacaagttttataaacgtaaggagattcagaagcttggggccgactacgggctggacgcacgactgttccaccaggcttttatcagtttcaggaactatattatgcaatcccattctctggatgttgacatccacatcgtattgaatgatatctgtttcggggctgcacacgcagatgacctgtttcctttcttcctcaggcatgccaaacagatctttcctgtgttagattgcaaggatgatctacgcaaaatatctgacctgcgcattcctccaaactggtacccagatgcccgagccatgcagcgtaagattatttttcactcaggccccactaattctggaaaaacataccatgcaattcagaagtatttcagtgccaagtctggcgtttactgtggccctctgaagttgctagcccatgaaatcttcgagaaaagtaacgcggcaggtgtcccttgtgacctcgtcacaggagaagagcgcgtcaccgtgcagccgaacggaaaacaagcgtcgcatgtctcttgcaccgtcgaaatgtgttccgtcacaacaccttacgaagtggctgttatagatgaaatccagatgatccgtgacccggccagaggatgggcgtggacgagagccctgttaggactgtgcgctgaagaggtgcacttgtgcggagagcctgcagctatcgatctggtaatggagcttatgtatacaactggcgaggaagttgaagtgagagattataagcgattgacacccataagcgtgctcgaccatgctttggaatctctcgataatctgagaccaggggactgtatagtatgcttctctaaaaacgatatctacagtgtatctcggcaaatcgagatccgcggactcgagtccgcagtgatctatgggagcctgccacctgggaccaaactggctcaggctaaaaagttcaacgatcccaacgacccttgcaaaattctggttgccaccgatgcaataggcatgggacttaatcttagtatcaggaggatcatcttttacagcctgatcaaaccctcaataaatgagaagggggagcgtgaactggagcctatcactaccagccaggcccttcagatcgcggggcgggcaggccggttcagttcacggttcaaggagggagaagtgactactatgaatcacgaagatctgagtttgcttaaagaaatactaaagaggcctgttgacccgatcagagccgccggactccaccccactgctgaacagatcgaaatgtttgcctatcacctgccagacgccaccctatcgaacttaatagatatcttcgtggactttagtcaggtcgacggacaatatttcgtatgtaacatggatgacttcaaattctcagcagagttgatccagcacatacctttatccttgcgggtcagatatgtcttttgcacagcacctattaacaagaaacaacccttcgtttgctctagtctgctccagttcgccaggcagtactcccgcaacgagcctttgacctttgcctggttgaggagatatatcaaatggcccctgctaccacctaaaaatatcaaggacctcatggacttggaggcagttcacgatgtgttagatctctatttgtggctatcataccgcttcatggacatgtttccggacgcctccctgatacgagatctgcagaaagagctcgatggcatcatccaagacggagtgcataacatcacaaaacttatcaaaatgagcgaaacccacaaactactgaacctggaagggtttccaagcgggagccaatcccgtctgagtggtactctgaagtctcaggcaagaaggaccaggggcaccaaggcccttggctcgaaggccactgaacccccctcgccggacgctggagaattgagcttggcgtccaggttggtccagcaaggcttgcttacccccgatatgcttaaacagctagaaaaagaatggatgacacagcaaaccgaacacaacaaggagaaaaccgaaagtgggacacatcccaaaggtactcgccggaagaagaaagagccagacagtgattag

SEQ ID NO: 135793 - DNA, 87 bp, Artificial Sequence
  derived and/or modified sequence
atgaccccaaactccatgaccgaaatggctttgcaacccggcacaaatagaagcactgtgcagactgaaaataccactgggtcctag

SEQ ID NO: 135794 - DNA, 2361 bp, Artificial Sequence
  derived and/or modified sequence
atgtccttcagccgggccctgctgtgggcccggctgcctgctggccggcaggccggccaccgggccgccatctgcagcgccctgcggccccacttcggccccttccctggggtgctgggccaggtgtctgtgctggccacagccagcagcagcgccagcggcggcagcaagatccccaacaccagcctgtttgtgcccctgactgtgaagccccagggccccagcgcagatggagatgtgggcgctgagctgacccggcccctggacaagaatgaggtgaagaaggtgctggacaagttctacaagaggaaggagatccagaagctgggcgctgactatggcctggatgcccggctcttccaccaggccttcatctccttcaggaactacatcatgcagagccacagcctggatgtggacatccacatcgtgctgaatgacatctgcttcggggccgcccatgctgatgacctcttccccttcttcctgcggcatgccaagcagatcttccctgtgctggactgcaaggatgacctgaggaagatcagtgacctgcgcatcccccccaactggtacccagatgcccgggccatgcagaggaagatcatcttccacagcggccccaccaacagcggcaagacctaccacgccatccagaagtacttcagcgccaagagcggcgtgtactgcggccccctgaagctgctggcccacgagatctttgagaagagcaatgctgctggggtgccctgtgacctggtgactggagaggagcgggtgacagtgcagcccaacgggaagcaggccagccacgtgtcctgcaccgtggagatgtgcagcgtgaccaccccctatgaggtggccgtgattgatgagatccagatgatccgggaccctgcccggggctgggcctggacccgggccctgctgggcctgtgtgccgaggaggtgcacctgtgtggggagcctgctgccatcgacctggtgatggagctgatgtacaccaccggggaggaggtggaggtgcgggactacaagaggctgacccccatctctgtgctggaccacgccctggagagcctggacaacctgcggcctggggactgcatcgtgtgcttcagcaagaatgacatctacagcgtgtcccggcagatcgagatccggggcctggagagcgctgtgatctacggcagcctgcccccaggcaccaagctggcccaggccaagaagttcaatgaccccaatgacccctgcaagatcctggtggccacagatgccatcggcatgggcctgaacctgagcatccgccgcatcatcttctacagcctcatcaagcccagcatcaatgaaaaaggagagcgggagctggagcccatcaccaccagccaggccctgcagattgctggccgggccggccgcttcagcagccgcttcaaggagggggaggtgaccaccatgaaccacgaggacctgagcctgctgaaggagatcctgaagaggcctgtggaccccatccgggccgccggcctgcaccccacagctgagcagatcgagatgtttgcctaccacctgcctgatgccaccctgagcaacctgattgacatctttgtggacttcagccaggtggatggccagtactttgtgtgcaacatggatgacttcaagttctctgctgagctgatccagcacatccccctgagcctgcgggtgcgctacgtgttctgcacagcccccatcaacaagaagcagccctttgtgtgcagcagcctgctgcagtttgcccggcagtacagcagaaatgagcccctgacctttgcctggctgcggcgctacatcaagtggcccctgctgccccccaagaacatcaaggacctgatggacctggaggccgtgcatgatgtgctggacctgtacctgtggctgagctaccgcttcatggacatgtttcctgatgccagcctcatccgggacctgcagaaggagctggatggcatcatccaggatggagtgcacaacatcaccaagctgatcaagatgtctgagacccacaagctgctgaacctggagggcttccccagcggcagccagagccggctgagcggcaccctgaagagccaggcccggaggacccggggcaccaaggccctgggcagcaaggccacagagccccccagcccagatgctggggagctgagcctggccagccggctggtgcagcagggcctgctgaccccagacatgctgaagcagctggagaaggagtggatgacccagcagacagagcacaacaaggagaagacagaaagtggcacccaccccaagggcaccaggaggaagaagaaggagccagacagcgactag

SEQ ID NO: 135795 - DNA, 2361 bp, Artificial Sequence
  derived and/or modified sequence
atgagcttcagccgggccctgctgtgggcccggctgcccgccggccggcaagcggggcatcgggctgctatatgttctgccttgcggcctcacttcggcccatttccgggagtgctcgggcaggtgtccgtcctcgccaccgcatcatccagtgcgagtggggggagcaagattcctaatacctcactcttcgtgcctttgactgtgaagccccagggcccgtccgcggacggggacgtcggcgccgaactgacgaggccgcttgataaaaacgaggtaaagaaagtgctggataagttctataagaggaaagagattcagaaactgggtgccgactatggtcttgatgccaggttatttcaccaagcattcatttcctttcgcaattacatcatgcagagccactcccttgacgtggatatccacatcgttctgaatgatatctgttttggtgctgcacatgctgacgatctcttcccattcttcttgagacacgcaaagcagatcttccctgttctggactgtaaggatgacctgcgcaagattagtgacctgcggataccccctaattggtacccagacgcccgtgccatgcaacggaagatcatcttccactccgggccaacaaatagcggtaaaacttatcacgctattcaaaaatacttctccgcgaagagcggtgtgtactgcggacccctcaaactcctcgcacacgaaatcttcgagaagtctaatgccgccggcgtgccgtgtgatctcgtgacaggggaagaaagagtgacagtgcagccaaacggtaaacaggccagtcacgtctcctgcacggtcgaaatgtgcagcgtgaccacgccatacgaggtggcagtcatcgatgaaatccaaatgattagggacccagcacgcggttgggcttggacgagggcactcctgggcctctgcgctgaggaggtgcacctgtgcggggaacctgccgctatagatctggtaatggagttgatgtataccactggggaggaagtggaagtgcgagattacaagagacttacacctatcagcgtgctggaccatgcgcttgagtcactggacaacctgaggcctggagattgcattgtgtgttttagtaagaatgatatatactccgttagtagacagattgaaatccgcggactggagtccgctgttatctatggcagtctgcctccaggaacaaaactggctcaggccaaaaagttcaacgaccctaatgatccctgcaagatcctggtagcaactgacgcgatcggaatggggttgaacctttctattagacggataattttctactcccttatcaagcccagtatcaacgaaaaaggggagagggagctggagcctattacaacctcacaggctctacagattgccggccgagctgggcgattttcaagtcggtttaaggaaggtgaggtaaccacgatgaatcatgaagatttgtctctcctcaaagaaatacttaaacggcccgtggacccaataagagccgctggcctgcaccctactgcagagcagattgaaatgttcgcttatcacttacctgatgcgacactctccaaccttatcgacatattcgtcgatttttcccaggtcgacgggcagtacttcgtttgtaatatggatgattttaagttcagcgccgaactgattcaacacattccactgagcttaagagtgagatatgtgttctgcacagcccctattaataaaaagcaacccttcgtgtgctcttcactcctgcaatttgcacgtcagtacagtaggaatgagccgctcacatttgcctggctgaggcgttacatcaagtggccattgctaccaccaaagaacataaaggaccttatggatcttgaggccgtacatgacgtgctggacctgtatctgtggttgtcttaccgcttcatggatatgttccctgacgcgtctctgatcagggatctgcagaaggaactcgacggtattattcaggatggggtgcacaacatcacaaagctgataaagatgagcgaaacccacaaactcctcaatctcgaaggctttccaagcgggagtcaaagcaggctgagcggcacgttgaagtcacaagcaaggaggacccgcggcactaaggcgctaggatctaaagccacagagccacctagccccgacgccggcgagctgagcttggcttcccgcttggtgcagcagggcctgcttacacccgatatgctgaagcaattggagaaagaatggatgacccagcagacagagcacaacaaagaaaaaacggagtcgggcactcaccctaagggcactaggcgcaagaagaaagagccagacagtgactag

SEQ ID NO: 135796 - DNA, 2361 bp, Artificial Sequence
  derived and/or modified sequence
atgtccttcagtcgcgcactgctgtgggccagactacccgctggacggcaggctggacacagagcagctatttgcagcgccttacgccctcattttggaccattccctggagtcctggggcaagtcagcgtcctcgctactgcctcttctagcgcgtccggtgggtcaaaaattcccaatacgtccctattcgtacccctgaccgtaaagccccagggtccatcagccgacggggacgtgggtgcagaactgacaagacctctggataagaacgaggtgaaaaaagtgctggataaattctacaaaaggaaagagattcaaaaactgggagccgactatggactagacgctcggctgttccatcaggcgtttattagctttagaaactatattatgcagtcccattcccttgatgtggacatacatatcgttctgaacgatatttgtttcggggctgcgcacgccgatgatctgttccctttctttcttcgacacgccaagcagatcttcccagtgctggattgtaaagacgatctgaggaagatctcagacttgcgaatcccaccgaactggtaccccgacgctcgagctatgcagcgaaaaattattttccacagcgggccaaccaattcaggcaagacgtaccacgcaattcagaaatacttctcagcgaagtccggggtttactgcggcccactcaaactgctcgcccatgaaatttttgaaaaatccaacgcagcgggagtgccctgcgacttagtaactggtgaggagcgggtgaccgtgcagccaaatggcaaacaggcttctcatgtgtcctgcactgtggagatgtgttcagtgacgactccctacgaggttgccgtgattgatgaaatccagatgataagggaccctgctcgcggatgggcatggacccgggctctcctgggcctgtgcgccgaggaagttcacctgtgtggtgagcccgcagcgatcgacctagtcatggagctgatgtataccacaggggaggaggttgaggtacgcgattataagaggctgactccgatttctgtgctagatcatgccctagagagcctcgataatctgcggccaggagactgcattgtctgcttcagcaaaaatgatatctacagtgttagccgccaaatcgagatacgagggctggagtcggccgtcatatatggaagcctgccaccaggaaccaaactggctcaggcaaagaaattcaacgacccaaatgacccatgcaagatccttgtcgcaacagatgctatcggaatgggtctcaacctctcgattcgaagaattatattctattcattgatcaagccttctatcaacgagaagggggagcgggaactggaaccgatcacaacaagccaggcactccagatcgcgggaagggctggccgattcagcagtcgctttaaagagggcgaggtcaccactatgaatcatgaagacctctcgttactgaaggaaatccttaagcgcccagtcgatccgataagggcagccggtctacatcccaccgccgaacagatcgagatgtttgcttatcacctccccgatgcaacccttagcaatctgatcgacatatttgttgacttctctcaggttgacgggcagtattttgtgtgtaacatggatgactttaagtttagcgccgaactgatccagcacataccactctcgctgagggtgaggtacgtcttctgtactgcacctattaataagaagcaaccattcgtgtgctcatctcttctgcagttcgcccgtcagtatagtcggaacgagcccctgacattcgcctggctgagaagatacattaagtggccactgctgccaccaaagaatatcaaagatcttatggacctagaggccgtgcacgatgtgctggatctgtatttgtggctctcctacagatttatggacatgttcccagatgcttctttaatcagagatctgcaaaaggagcttgacggtatcattcaagatggggttcataatatcactaagctgatcaagatgagcgaaacacacaaactgctaaaccttgagggattccccagcggctcacaatctaggttaagcggcaccctcaagagtcaagctcgccgaacgaggggaacgaaggcactcgggagcaaggctacagaacctccttcacctgacgccggagagctttctctggcttctaggctggtgcagcagggactgctcacccctgatatgctaaaacagctggaaaaagagtggatgactcagcagaccgagcataacaaagaaaagactgagagtggaacacaccccaaaggcaccaggcggaaaaagaaggagccggatagcgattag

SEQ ID NO: 135797 - DNA, 2484 bp, Artificial Sequence
  derived and/or modified sequence
gcgtcactgtccgccgccgtgtccgcggctgcgccagacagtgtagaacctgcggcctcgatgtccttctcccgtgccctattgtgggctcggctcccggcggggcgccaggctggccaccgggcagccatctgctctgcccttcgtccccactttgggccctttcccggggttctggggcaagtttctgtccttgccaccgcctcctcctctgcctccggtggctccaaaataccaaacacgtccttgttcgtgcccctgactgtgaaacctcagggccccagcgccgacggcgacgtcggggccgagctaacccggcctctggacaagaatgaagtaaagaaggtcttagacaaattttacaagaggaaagaaattcagaaactgggtgctgattatggacttgatgctcgtctcttccaccaagctttcataagctttagaaattatattatgcagtctcattccctggatgtggacattcacattgttttgaatgatatttgcttcggtgcagctcatgcggatgatttattcccatttttcttgagacatgccaaacaaatatttcctgtgttggactgtaaggatgatctacgtaaaatcagtgacttaagaataccacctaactggtacccagatgctagagccatgcagcggaagataatatttcattcaggccccacaaacagtggaaagacttatcacgcaatccagaaatacttctcagcaaagtctggagtgtattgtggccctctaaaattactggcacatgagatcttcgaaaagagtaatgctgctggtgtgccatgtgacttggtgacaggtgaagagcgtgtgacagttcagccaaatgggaaacaggcttcacatgtttcttgtacagttgagatgtgcagtgttacaactccttatgaagtggctgtaattgatgaaattcaaatgattagagatccagccagaggatgggcctggaccagagcacttctaggactgtgtgctgaagaggttcatttgtgtggagaacctgctgctattgacctggtgatggagcttatgtacacaacgggggaggaagtggaggttcgagactataagaggcttacccccatttctgtgctggaccatgcactagaatctttagataaccttcggcctggggactgcattgtctgttttagcaagaatgatatttattctgtgagtcggcagattgaaattcggggattagaatcagctgttatatatggcagtctcccacctgggaccaaacttgctcaagcaaaaaagtttaatgatcccaatgacccatgcaaaatcttggttgctacagatgcaattggcatgggacttaatttgagcataaggagaattattttttactcccttataaagcccagtatcaatgaaaagggagagagagaactagaaccaatcacaacctctcaagccctgcagattgctggcagagctggcagattcagctcacggtttaaagaaggagaggttacaacaatgaatcatgaagatctcagtttattaaaggaaattttgaagaggcctgtggatcctataagggcagctggtcttcatccaactgctgagcagattgaaatgtttgcctaccatctccctgatgcaacactgtccaatctcattgatatttttgtagacttttcacaagttgatgggcagtattttgtctgcaatatggatgattttaaattttctgcagagttgatccagcatattccactaagtctgcgagtgaggtatgttttctgcacagctcctatcaacaagaagcagccttttgtgtgttcttcactgttacagtttgccaggcagtatagcaggaatgagcccctgacctttgcatggttacgccgatacatcaaatggcctttacttccacctaagaatattaaagacctcatggatcttgaagctgtccacgatgtcttggatctttacttgtggctaagctaccgatttatggatatgtttccagatgccagccttattcgagatctccagaaagaactagatggtattatccaagatggtgtgcacaatatcactaaattgattaaaatgtctgagacgcataagctgttgaatttggagggctttccatcagggagccagtcacgattgtcaggaaccttaaagagccaagctagaaggacacgcggcaccaaagctctagggagtaaagctactgagccacccagccccgatgcaggagagctgtcccttgcttccagattggtgcagcaaggactcctcactccagacatgctgaaacagctagaaaaagagtggatgacacaacaaactgaacacaacaaagaaaaaacagagtctgggactcatccaaaagggacgagaagaaagaagaaggaacctgattcggactagttttctgttcctgtttttttttttttatttaattttgcaaataaaaatttattttgaatcctt

SEQ ID NO: 135798 - protein, 300 aa, Artificial Sequence
  derived and/or modified sequence
MAAVAALQLGLRAAGLGRAPASAAWRSVLRVSPRPGVAWRPSRCGSSAAEASATKAEDDSFLQWVLLLIPVTAFGLGTWQVQRRKWKLNLIAELESRVLAEPVPLPADPMELKNLEYRPVKVRGCFDHSKELYMMPRTMVDPVREAREGGLISSSTQSGAYVVTPFHCTDLGVTILVNRGFVPRKKVNPETRQKGQIEGEVDLIGMVRLTETRQPFVPENNPERNHWHYRDLEAMARITGAEPIFIDANFQSTVPGGPIGGQTRVTLRNEHLQYIVTWYGLSAATSYLWFKKFLRGTPGV

SEQ ID NO: 135799 - protein, 270 aa, Artificial Sequence
  derived and/or modified sequence
APASAAWRSVLRVSPRPGVAWRPSRCGSSAAEASATKAEDDSFLQWVLLLIPVTAFGLGTWQVQRRKWKLNLIAELESRVLAEPVPLPADPMELKNLEYRPVKVRGCFDHSKELYMMPRTMVDPVREAREGGLISSSTQSGAYVVTPFHCTDLGKKVNPETRQKGQIEGEVDLIGMVRLTETRQPFVPENNPERNHWHYRDLEAMARITGAEPIFIDANFQSTVPGGPIGGQTRVTLRNEHLQYIVTWYGLSAATSYLWFKKFLRGTPGV

SEQ ID NO: 135800 - DNA, 903 bp, Artificial Sequence
  derived and/or modified sequence
atggccgccgtggccgccctgcagctgggcctgagagccgccggcctgggcagagcccccgccagcgccgcctggagaagcgtgctgagagtgagccccagacccggcgtggcctggagacccagcagatgcggcagcagcgccgccgaggccagcgccaccaaggccgaggacgacagcttcctgcagtgggtgctgctgctgatccccgtgaccgccttcggcctgggcacctggcaggtgcagagaagaaagtggaagctgaacctgatcgccgagctggagagcagagtgctggccgagcccgtgcccctgcccgccgaccccatggagctgaagaacctggagtacagacccgtgaaggtgagaggctgcttcgaccacagcaaggagctgtacatgatgcccagaaccatggtggaccccgtgagagaggccagagagggcggcctgatcagcagcagcacccagagcggcgcctacgtggtgacccccttccactgcaccgacctgggcgtgaccatcctggtgaacagaggcttcgtgcccagaaagaaggtgaaccccgagaccagacagaagggccagatcgagggcgaggtggacctgatcggcatggtgagactgaccgagaccagacagcccttcgtgcccgagaacaaccccgagagaaaccactggcactacagagacctggaggccatggccagaatcaccggcgccgagcccatcttcatcgacgccaacttccagagcaccgtgcccggcggccccatcggcggccagaccagagtgaccctgagaaacgagcacctgcagtacatcgtgacctggtacggcctgagcgccgccaccagctacctgtggttcaagaagttcctgagaggcacccccggcgtgtag

SEQ ID NO: 135801 - DNA, 813 bp, Artificial Sequence
  derived and/or modified sequence
gcccccgccagcgccgcctggagaagcgtgctgagagtgagccccagacccggcgtggcctggagacccagcagatgcggcagcagcgccgccgaggccagcgccaccaaggccgaggacgacagcttcctgcagtgggtgctgctgctgatccccgtgaccgccttcggcctgggcacctggcaggtgcagagaagaaagtggaagctgaacctgatcgccgagctggagagcagagtgctggccgagcccgtgcccctgcccgccgaccccatggagctgaagaacctggagtacagacccgtgaaggtgagaggctgcttcgaccacagcaaggagctgtacatgatgcccagaaccatggtggaccccgtgagagaggccagagagggcggcctgatcagcagcagcacccagagcggcgcctacgtggtgacccccttccactgcaccgacctgggcaagaaggtgaaccccgagaccagacagaagggccagatcgagggcgaggtggacctgatcggcatggtgagactgaccgagaccagacagcccttcgtgcccgagaacaaccccgagagaaaccactggcactacagagacctggaggccatggccagaatcaccggcgccgagcccatcttcatcgacgccaacttccagagcaccgtgcccggcggccccatcggcggccagaccagagtgaccctgagaaacgagcacctgcagtacatcgtgacctggtacggcctgagcgccgccaccagctacctgtggttcaagaagttcctgagaggcacccccggcgtgtag

SEQ ID NO: 135802 - DNA, 903 bp, Artificial Sequence
  derived and/or modified sequence
atggcagcagtcgctgcccttcagctcggattgcgagctgcagggctgggccgggcccctgcaagcgccgcttggagatcagtactacgagtttcgccccgacccggcgtggcttggaggccttcacggtgtggctcttccgcggctgaggcctctgccacaaaagcagaagatgatagtttcctccaatgggtgctgttactgatccccgtcaccgcattcggactcggaacctggcaggttcagcgccgaaagtggaaacttaaccttattgccgagcttgagagccgagtattggccgagcctgtgccccttccggccgaccctatggaactcaagaatctggaataccgccccgttaaagtaaggggttgcttcgatcacagcaaagagctgtacatgatgcctcgtactatggttgatccggtgcgggaggccagggaaggcggcctgattagcagctcgacacagtccggcgcttatgtggtgacaccattccactgcacagatctcggcgtcaccattctcgttaacaggggatttgttccccgtaagaaggtgaatccagagactagacagaaaggtcagatcgaaggcgaggtagacctcatagggatggtccgtctaacagaaaccagacagccgttcgttcccgaaaataatcctgagcgcaaccattggcactatcgggatctggaagccatggcccgcattactggggctgagccaatctttatcgacgcgaattttcagagcaccgtgcctggaggacctattggcgggcagacgagggtaacactcagaaatgaacacctgcaatatatcgtgacctggtatggtctcagcgcagctacatcatatctgtggttcaagaaattcctaagggggacaccaggagtgtag

SEQ ID NO: 135803 - DNA, 813 bp, Artificial Sequence
  derived and/or modified sequence
gcaccagccagcgcagcttggcggtcggtgttaagggtgtcccctaggcccggcgtggcttggagaccttcacgatgcgggagctctgcggccgaagctagtgcgactaaggcagaggatgattcattcctgcaatgggtgttactgttgatacctgtgacagcttttggcctcggcacttggcaggtgcaaaggcgcaagtggaaactcaatctcattgctgagctggaatctcgagtgctggcagaaccagtcccgctgcctgctgaccctatggagctgaaaaacctcgaatatcggccagtgaaagtgcgtgggtgtttcgatcactccaaagaactctacatgatgccacgtacaatggtggacccagtccgcgaggcacgagagggtgggctcatttcatcgtcaacacaaagcggcgcctacgtcgtgacccctttccactgcacagatcttgggaaaaaagttaacccagagacacgtcagaaagggcagattgagggagaggtggacctgatcggcatggtccggctgactgagacgcgtcagccatttgtgcctgaaaacaatcccgaacggaatcactggcattatagggacctcgaagccatggcaagaatcaccggggccgagccaattttcatagatgcaaacttccagagtacggtgcccggtggtcccattggagggcagactagggtcaccttgaggaacgagcatctgcagtatatcgtgacttggtacggactgtccgccgccacaagttatctctggtttaaaaaattcctgcgaggtacccctggagtatag

SEQ ID NO: 135804 - DNA, 903 bp, Artificial Sequence
  derived and/or modified sequence
atggctgctgtggccgccctgcagctgggcctgcgggccgccggcctgggccgggccccagccagcgctgcctggaggtctgtgctgcgggtgagccccaggcctggggtggcctggaggcccagccgctgtggcagcagcgctgctgaggccagcgccaccaaggcagaagatgacagcttcctgcagtgggtgctgctgctgatccctgtgacagccttcggcctgggcacctggcaggtgcagaggaggaagtggaagctgaacctgattgctgagctggagagccgggtgctggccgagcctgtgcccctgcctgctgaccccatggagctgaagaacctggagtacagacctgtgaaggtgcggggctgctttgaccacagcaaggagctgtacatgatgcccaggaccatggtggaccctgtgcgggaggcccgggagggcggcctcatcagcagcagcacccagagcggggcctacgtggtgacccccttccactgcacagacctgggcgtgaccatcctggtgaacagaggatttgtgcccaggaagaaggtgaaccctgagacccggcagaagggccagattgaaggagaggtggacctgattggcatggtgcggctgacagagacccggcagccctttgtgcctgagaacaaccctgagaggaaccactggcactacagagacctggaggccatggcccgcatcactggagctgagcccatcttcattgatgccaacttccagagcacagtgcctgggggccccatcggcggccagaccagggtgaccctgagaaatgagcacctgcagtacatcgtgacctggtacggcctgtctgctgccaccagctacctgtggttcaagaagttcctgcggggcaccccaggagtgtag

SEQ ID NO: 135805 - DNA, 813 bp, Artificial Sequence
  derived and/or modified sequence
gccccagccagcgctgcctggaggtctgtgctgcgggtgagccccaggcctggggtggcctggaggcccagccgctgtggcagcagcgctgctgaggccagcgccaccaaggcagaagatgacagcttcctgcagtgggtgctgctgctgatccctgtgacagccttcggcctgggcacctggcaggtgcagaggaggaagtggaagctgaacctgattgctgagctggagagccgggtgctggccgagcctgtgcccctgcctgctgaccccatggagctgaagaacctggagtacagacctgtgaaggtgcggggctgctttgaccacagcaaggagctgtacatgatgcccaggaccatggtggaccctgtgcgggaggcccgggagggcggcctcatcagcagcagcacccagagcggggcctacgtggtgacccccttccactgcacagacctgggcaagaaggtgaaccctgagacccggcagaagggccagattgaaggagaggtggacctgattggcatggtgcggctgacagagacccggcagccctttgtgcctgagaacaaccctgagaggaaccactggcactacagagacctggaggccatggcccgcatcactggagctgagcccatcttcattgatgccaacttccagagcacagtgcctgggggccccatcggcggccagaccagggtgaccctgagaaatgagcacctgcagtacatcgtgacctggtacggcctgtctgctgccaccagctacctgtggttcaagaagttcctgcggggcaccccaggagtgtag

SEQ ID NO: 135806 - DNA, 903 bp, Artificial Sequence
  derived and/or modified sequence
atggccgccgtggccgccctgcagctgggcctgcgggccgccggccttggacgcgctccagcttctgcagcctggcggtccgtgctgcgtgtctccccgagaccaggggtggcctggcgaccttctcgatgtgggagttctgctgctgaagccagcgctaccaaggccgaggacgacagcttccttcagtgggtgcttctactgattcccgtgaccgcatttggtctgggcacctggcaggtccagcgtcgaaaatggaaattgaatctgattgcagaactggagtcaagggtgcttgccgagcccgtacctctgccagcggaccctatggaactcaaaaacttggagtatcggcccgttaaggtccgcggctgtttcgatcacagtaaagaactctatatgatgcccaggactatggtggaccctgtgcgcgaggctagggagggtgggctcattagctcaagtacccaaagcggggcatacgtcgtcacacctttccactgcaccgacctaggggtaaccattctcgtcaaccgcggcttcgtgcctaggaagaaggtgaatcctgaaacaagacaaaaaggccaaattgaaggggaggtggaccttatcggtatggtaaggttaactgagactagacagcctttcgtgcctgaaaataatccagagcgaaaccactggcattaccgcgacctggaggctatggctcggatcacgggcgccgaacccatcttcatcgacgcaaatttccagagcacagtgcccggcggacccatcggcggccaaactagggtcaccttgcgcaatgaacacctccagtacattgtaacctggtatggcctctccgcagctacatcttatctctggtttaagaaattcctgagagggacccctggcgtttag

SEQ ID NO: 135807 - DNA, 813 bp, Artificial Sequence
  derived and/or modified sequence
gcccccgccagcgccgcctggcggagcgtgctgcgggtgagcccccgtcccggtgttgcttggaggccttctaggtgtggctcgtccgcagctgaagcctccgctactaaagccgaagacgactcgtttctccaatgggttctcctcctaatcccagtgaccgcctttggtctggggacatggcaggtgcaacggagaaagtggaagctcaacctcatcgctgagctggagtcccgcgtgctggccgagcctgttcctcttccagccgaccccatggagttgaagaacctggaatatcgtcctgttaaggtaagaggttgttttgatcattcaaaggaattgtatatgatgccaaggacgatggtggatccggtcagggaggcccgcgaaggcgggctcatctccagcagtacccagtctggcgcgtatgtcgtgactccgtttcactgcactgacctggggaagaaggtgaatcccgaaacgagacaaaaaggacaaattgaaggcgaggtcgatctgattgggatggttaggttgacagaaacgcgccagcctttcgtcccggaaaataatcctgaacgaaatcattggcattatcgagatctggaagctatggccagaataactggagccgagccaatttttatcgatgcgaatttccaatcaaccgtgcccggagggccaattggtggccagacacgagttacactgcggaatgaacatttgcagtatattgtcacatggtacggtctctctgctgctacaagttacctgtggtttaagaaattcctccgaggaacccctggggtatag

SEQ ID NO: 135808 - DNA, 903 bp, Artificial Sequence
  derived and/or modified sequence
atggccgcagtagcggcactgcagcttggcctacgggcagctggactggggcgagcccctgcgtccgccgcttggaggtcagttctgcgcgtgtccccgcgaccaggggtcgcttggcggccatcaaggtgtggcagctccgctgctgaagcatcggctacaaaagccgaagacgactcgttccttcagtgggtgctgctcctgatcccagttaccgcatttgggttagggacgtggcaggtgcaacgccgaaagtggaagctcaacctcatagctgagcttgagagccgcgtgctcgccgagccagttccactacccgctgatcctatggagctcaagaatctggagtatagacctgtaaaggtccgaggatgctttgaccattctaaggagttgtacatgatgccgaggacaatggtcgaccccgtccgcgaggccagagagggaggcctgatatcctcttcaactcagtctggcgcttacgtggtcactccctttcattgtacggacctgggcgtcacgattctagtaaataggggcttcgtgccccgtaagaaagtcaaccccgagacacgacagaaaggccagatagagggagaggtggatctgattggtatggtgagattaacagaaaccagacagccttttgtgccagagaataacccagagcggaatcactggcattaccgcgaccttgaggccatggccagaataactggcgcagagcctatctttattgacgcaaatttccagagcacagttcctggtggacccatcggtggccaaacccgagtaaccttgagaaatgaacaccttcagtacattgtgacttggtacgggctcagcgctgcaacctcgtatctatggttcaagaagttcctgagaggcactccgggagtctag

SEQ ID NO: 135809 - DNA, 813 bp, Artificial Sequence
  derived and/or modified sequence
gctccagccagcgcagcatggagatccgtcctgcgtgtctcaccgcgacccggtgtagcatggagacccagccggtgcggctcgagcgccgctgaagccagtgcaactaaggcagaggatgactctttcctgcagtgggtcctgctccttattccagttaccgcattcgggcttggcacatggcaggtgcagagacgcaagtggaagctgaacctgatcgccgaactcgaatccagagttctcgccgagcctgtgcccttgccagcggatcccatggagctcaagaacctagagtataggcccgtcaaagtgagaggttgctttgaccattccaaggagctctacatgatgcctcggaccatggtggatcccgtgcgagaggctcgggaagggggacttattagctcttcgacccagagcggtgcctacgtagtcacaccttttcattgtacagacttgggaaagaaggtcaaccccgagacccgacagaaaggccagatcgagggcgaggtcgatttaatagggatggtacgattgacagagacccgccagccctttgtgcccgagaacaaccctgagagaaatcactggcactatagggacctcgaggctatggccagaatcaccggggcagagccaatatttattgatgcaaattttcagagtaccgtgccaggtggtcccatcggaggacagacccgtgttaccctgagaaacgaacatctccagtatattgtgacctggtatggtctaagtgccgctacgtcatatctgtggtttaagaagtttttgaggggaactcctggagtttag

SEQ ID NO: 135810 - DNA, 1093 bp, Artificial Sequence
  derived and/or modified sequence
gcgtcccggaagcgcccgcggggccgggtgcgatggcggcggtggctgcgttgcagctggggctgcgggcggcggggctgggacgggccccggccagcgccgcctggaggagcgtcctcagggtctccccgcgcccaggggtggcctggaggccaagcagatgtggcagttctgcagcagaagcatctgccacaaaagcggaagatgactcctttcttcagtgggtcctgctcctcatccctgtgactgcctttggcttggggacatggcaggtccagcgtcggaagtggaagctgaacctgattgcagagttggagtccagagttctggctgagcctgtccctctgccagccgacccaatggaactgaaaaatctggagtataggccagtgaaggtcagggggtgctttgaccattccaaggagctgtatatgatgccccggaccatggtggaccctgtccgggaggcccgggagggcggcctcatctcctcctcaactcagagtggggcctatgtggtcactcccttccactgcaccgacctgggagtcaccatcctggtaaatagagggttcgttcccaggaagaaagtgaatcctgaaacccggcagaaaggccagattgagggagaagtggacctcattgggatggtgaggctgacagaaaccaggcagccttttgtccctgagaacaatccagaaaggaaccactggcattatcgagacctggaagctatggccagaatcacaggcgcagagcccatcttcattgatgccaacttccagagcacagtccctggaggacccattggagggcaaaccagagttactctgaggaacgagcatctgcagtacatcgtgacctggtatggactctctgcagctacatcctacctgtggtttaagaaattcctacgtgggacacctggtgtgtgacagatcagctgctgaagccctgtccctggataatgcagtatttcaagactgcctttatgctggatcatgtgctactggtataaagttctggccttctaccttaaatgagctcatgactggttcatcataaaatcctggcttggtttcagtccaaagaa

SEQ ID NO: 135811 - DNA, 813 bp, Artificial Sequence
  derived and/or modified sequence
gccccggccagcgccgcctggaggagcgtcctcagggtctccccgcgcccaggggtggcctggaggccaagcagatgtggcagttctgcagcagaagcatctgccacaaaagcggaagatgactcctttcttcagtgggtcctgctcctcatccctgtgactgcctttggcttggggacatggcaggtccagcgtcggaagtggaagctgaacctgattgcagagttggagtccagagttctggctgagcctgtccctctgccagccgacccaatggaactgaaaaatctggagtataggccagtgaaggtcagggggtgctttgaccattccaaggagctgtatatgatgccccggaccatggtggaccctgtccgggaggcccgggagggcggcctcatctcctcctcaactcagagtggggcctatgtggtcactcccttccactgcaccgacctggggaagaaagtgaatcctgaaacccggcagaaaggccagattgagggagaagtggacctcattgggatggtgaggctgacagaaaccaggcagccttttgtccctgagaacaatccagaaaggaaccactggcattatcgagacctggaagctatggccagaatcacaggcgcagagcccatcttcattgatgccaacttccagagcacagtccctggaggacccattggagggcaaaccagagttactctgaggaacgagcatctgcagtacatcgtgacctggtatggactctctgcagctacatcctacctgtggtttaagaaattcctacgtgggacacctggtgtgtga

SEQ ID NO: 135812 - protein, 412 aa, Artificial Sequence
  derived and/or modified sequence
MAENLKGCSVCCKSSWNQLQDLCRLAKLSCPALGISKRNLYDFEVEYLCDYKKIREQEYYLVKWRGYPDSESTWEPRQNLKCVRILKQFHKDLERELLRRHHRSKTPRHLDPSLANYLVQKAKQRRALRRWEQELNAKRSHLGRITVENEVDLDGPPRAFVYINEYRVGEGITLNQVAVGCECQDCLWAPTGGCCPGASLHKFAYNDQGQVRLRAGLPIYECNSRCRCGYDCPNRVVQKGIRYDLCIFRTDDGRGWGVRTLEKIRKNSFVMEYVGEIITSEEAERRGQIYDRQGATYLFDLDYVEDVYTVDAAYYGNISHFVNHSCDPNLQVYNVFIDNLDERLPRIAFFATRTIRAGEELTFDYNMQVDPVDMESTRMDSNFGLAGLPGSPKKRVRIECKCGTESCRKYLF

SEQ ID NO: 135813 - protein, 215 aa, Artificial Sequence
  derived and/or modified sequence
MAWISRLREHLDGPPRAFVYINEYRVGEGITLNQVAVGCECQDCLWAPTGGCCPGASLHKFAYNDQGQVRLRAGLPIYECNSRCRCGYDCPNRVVQKGIRYDLCIFRTDDGRGWGVRTLEKIRKNSFVMDPALLTVCLKLPAFPMGKAWETDLSVTGTLGRGCGRGEDRLQESPFPVPAPSVGCTYKPPPTFRNSFSTSRLSVVGIHGLLRRSKG

SEQ ID NO: 135814 - protein, 409 aa, Artificial Sequence
  derived and/or modified sequence
MAENLKGCSVCCKSSWNQLQDLCRLAKLSCPALGISKRNLYDFEVEYVRLQEDPRTGILPGEMAWISRLREHLGATAESQVCAYPQAVPQGLRKGAAPAAPPVKDPPAPGPKLGQLPGAEGQAEAGAPSLGAGAQCQAHLGRITVENEVDLDGPPRAFVYINEYRVGEGITLNQVAVGCECQDCLWAPTGGCCPRHCTSLPTMTRARCGFEPGCPSTSATPAAAAAMTAQIVWYRRVSDMTSASSARMMGVAGASAPWRRFARTASSWSTWERSLPQRRQSGGQIYDRQGATYLFDLDYVEDVYTVDAAYYGNISHFVNHSCDPNLQVYNVFIDNLDERLPSLSLPQEPSGQARSSPLITTCKWTPWTWRAPAWTPTLAWLGSLAPLRSGSVLNASVGLSPAANTSSSP

SEQ ID NO: 135815 - DNA, 2745 bp, Artificial Sequence
  derived and/or modified sequence
ctcgcgaggccggctaggcccgaatgtcgttagccgtggggaaagatggcggaaaatttaaaaggctgcagcgtgtgttgcaagtcttcttggaatcagctgcaggacctgtgccgcctggccaagctctcctgccctgccctcggtatctctaagaggaacctctatgactttgaagtcgagtacctgtgcgattacaagaagatccgcgaacaggaatattacctggtgaaatggcgtggatatccagactcagagagcacctgggagccacggcagaatctcaagtgtgtgcgtatcctcaagcagttccacaaggacttagaaagggagctgctccggcggcaccaccggtcaaagaccccccggcacctggacccaagcttggccaactacctggtgcagaaggccaagcagaggcgggcgctccgtcgctgggagcaggagctcaatgccaagcgcagccatctgggacgcatcactgtagagaatgaggtggacctggacggccctccgcgggccttcgtgtacatcaatgagtaccgtgttggtgagggcatcaccctcaaccaggtggctgtgggctgcgagtgccaggactgtctgtgggcacccactggaggctgctgcccgggggcgtcactgcacaagtttgcctacaatgaccagggccaggtgcggcttcgagccgggctgcccatctacgagtgcaactcccgctgccgctgcggctatgactgcccaaatcgtgtggtacagaagggtatccgatatgacctctgcatcttccgcacggatgatgggcgtggctggggcgtccgcaccctggagaagattcgcaagaacagcttcgtcatggagtacgtgggagagatcattacctcagaggaggcagagcggcggggccagatctacgaccgtcagggcgccacctacctctttgacctggactacgtggaggacgtgtacaccgtggatgccgcctactatggcaacatctcccactttgtcaaccacagttgtgaccccaacctgcaggtgtacaacgtcttcatagacaaccttgacgagcggctgccccgcatcgctttctttgccacaagaaccatccgggcaggcgaggagctcacctttgattacaacatgcaagtggaccccgtggacatggagagcacccgcatggactccaactttggcctggctgggctccctggctcccctaagaagcgggtccgtattgaatgcaagtgtgggactgagtcctgccgcaaatacctcttctagcccttagaagtctgaggccagactgactgagggggcctgaagctacatgcacctcccccactgctgccctcctgtcgagaatgactgccagggcctcgcctgcctccacctgcccccacctgctcctacctgctctacgttcagggctgtggccgtggtgaggaccgactccaggagtcccctttccctgtcccagccccatctgtgggttgcacttacaaacccccacccaccttcagaaatagtttttcaacatcaagactctctgtcgttgggattcatggcctattaaggaggtccaaggggtgagtcccaacccagccccagaatatatttgtttttgcacctgcttctgcctggagattgaggggtctgctgcaggcctcctccctgctgccccaaaggtatggggaagcaaccccagagcaggcagacatcagaggccagagtgcctagcccgacatgaagctggttccccaaccacagaaactttgtactagtgaaagaaagggggtccctgggctacgggctgaggctggtttctgctcgtgcttacagtgctgggtagtgttggccctaagagctgtagggtctcttcttcagggctgcatatctgagaagtggatgcccacatgccactggaagggaagtgggtgtccatgggccactgagcagtgagaggaaggcagtgcagagctggccagccctggaggtaggctgggaccaagctctgccttcacagtgcagtgaaggtacctagggctcttgggagctctgcggttgctaggggccctgacctggggtgtcatgaccgctgacaccactcagagctggaaccaagatctagatagtccgtagatagcacttaggacaagaatgtgcattgatggggtggtgatgaggtgccaggcactgggtagagcacctggtccacgtggattgtctcagggaagccttgaaaaccacggaggtggatgccaggaaagggcccatgtggcagaaggcaaagtacaggccaagaattgggggtgggggagatggcttccccactatgggatgacgaggcgagagggaagcccttgctgcctgccattcccagaccccagccctttgtgctcaccctggttccactggtctcaaaagtcacctgcctacaaatgtacaaaaggcgaaggttctgatggctgccttgctccttgctcccccaccccctgtgaggacttctctaggaagtccttcctgactacctgtgcccagagtgcccctacatgagactgtatgccctgctatcagatgccagatctatgtgtctgtctgtgtgtccatcccgccgaccccccagactaacctccaggcatggactgaatctggttctcctcttgtacacccctcaaccctatgcagcctggagtgggcatcaataaaatgaactgtcgactgaacaaaaaaaaaaaaaaaaaa

SEQ ID NO: 135816 - DNA, 1239 bp, Artificial Sequence
  derived and/or modified sequence
atggccgagaacctgaagggctgcagcgtgtgctgcaagagcagctggaaccagctgcaggacctgtgcagactggccaagctgagctgccccgccctgggcatcagcaagagaaacctgtacgacttcgaggtggagtacctgtgcgactacaagaagatcagagagcaggagtactacctggtgaagtggagaggctaccccgacagcgagagcacctgggagcccagacagaacctgaagtgcgtgagaatcctgaagcagttccacaaggacctggagagagagctgctgagaagacaccacagaagcaagacccccagacacctggaccccagcctggccaactacctggtgcagaaggccaagcagagaagagccctgagaagatgggagcaggagctgaacgccaagagaagccacctgggcagaatcaccgtggagaacgaggtggacctggacggcccccccagagccttcgtgtacatcaacgagtacagagtgggcgagggcatcaccctgaaccaggtggccgtgggctgcgagtgccaggactgcctgtgggcccccaccggcggctgctgccccggcgccagcctgcacaagttcgcctacaacgaccagggccaggtgagactgagagccggcctgcccatctacgagtgcaacagcagatgcagatgcggctacgactgccccaacagagtggtgcagaagggcatcagatacgacctgtgcatcttcagaaccgacgacggcagaggctggggcgtgagaaccctggagaagatcagaaagaacagcttcgtgatggagtacgtgggcgagatcatcaccagcgaggaggccgagagaagaggccagatctacgacagacagggcgccacctacctgttcgacctggactacgtggaggacgtgtacaccgtggacgccgcctactacggcaacatcagccacttcgtgaaccacagctgcgaccccaacctgcaggtgtacaacgtgttcatcgacaacctggacgagagactgcccagaatcgccttcttcgccaccagaaccatcagagccggcgaggagctgaccttcgactacaacatgcaggtggaccccgtggacatggagagcaccagaatggacagcaacttcggcctggccggcctgcccggcagccccaagaagagagtgagaatcgagtgcaagtgcggcaccgagagctgcagaaagtacctgttctag

SEQ ID NO: 135817 - DNA, 648 bp, Artificial Sequence
  derived and/or modified sequence
atggcctggatcagcagactgagagagcacctggacggcccccccagagccttcgtgtacatcaacgagtacagagtgggcgagggcatcaccctgaaccaggtggccgtgggctgcgagtgccaggactgcctgtgggcccccaccggcggctgctgccccggcgccagcctgcacaagttcgcctacaacgaccagggccaggtgagactgagagccggcctgcccatctacgagtgcaacagcagatgcagatgcggctacgactgccccaacagagtggtgcagaagggcatcagatacgacctgtgcatcttcagaaccgacgacggcagaggctggggcgtgagaaccctggagaagatcagaaagaacagcttcgtgatggaccccgccctgctgaccgtgtgcctgaagctgcccgccttccccatgggcaaggcctgggagaccgacctgagcgtgaccggcaccctgggcagaggctgcggcagaggcgaggacagactgcaggagagccccttccccgtgcccgcccccagcgtgggctgcacctacaagcccccccccaccttcagaaacagcttcagcaccagcagactgagcgtggtgggcatccacggcctgctgagaagaagcaagggctag

SEQ ID NO: 135818 - DNA, 1230 bp, Artificial Sequence
  derived and/or modified sequence
atggccgagaacctgaagggctgcagcgtgtgctgcaagagcagctggaaccagctgcaggacctgtgcagactggccaagctgagctgccccgccctgggcatcagcaagagaaacctgtacgacttcgaggtggagtacgtgagactgcaggaggaccccagaaccggcatcctgcccggcgagatggcctggatcagcagactgagagagcacctgggcgccaccgccgagagccaggtgtgcgcctacccccaggccgtgccccagggcctgagaaagggcgccgcccccgccgccccccccgtgaaggacccccccgcccccggccccaagctgggccagctgcccggcgccgagggccaggccgaggccggcgcccccagcctgggcgccggcgcccagtgccaggcccacctgggcagaatcaccgtggagaacgaggtggacctggacggcccccccagagccttcgtgtacatcaacgagtacagagtgggcgagggcatcaccctgaaccaggtggccgtgggctgcgagtgccaggactgcctgtgggcccccaccggcggctgctgccccagacactgcaccagcctgcccaccatgaccagagccagatgcggcttcgagcccggctgccccagcaccagcgccacccccgccgccgccgccgccatgaccgcccagatcgtgtggtacagaagagtgagcgacatgaccagcgccagcagcgccagaatgatgggcgtggccggcgccagcgccccctggagaagattcgccagaaccgccagcagctggagcacctgggagagaagcctgccccagagaagacagagcggcggccagatctacgacagacagggcgccacctacctgttcgacctggactacgtggaggacgtgtacaccgtggacgccgcctactacggcaacatcagccacttcgtgaaccacagctgcgaccccaacctgcaggtgtacaacgtgttcatcgacaacctggacgagagactgcccagcctgagcctgccccaggagcccagcggccaggccagaagcagccccctgatcaccacctgcaagtggaccccctggacctggagagcccccgcctggacccccaccctggcctggctgggcagcctggcccccctgagaagcggcagcgtgctgaacgccagcgtgggcctgagccccgccgccaacaccagcagcagcccctag

SEQ ID NO: 135819 - DNA, 555 bp, Artificial Sequence
  derived and/or modified sequence
atggcctggatcagcagactgagagagcacctgggcgccaccgccgagagccaggtgtgcgcctacccccaggccgtgccccagggcctgagaaagggcgccgcccccgccgccccccccgtgaaggacccccccgcccccggccccaagctgggccagctgcccggcgccgagggccaggccgagcccggctgccccagcaccagcgccacccccgccgccgccgccgccatgaccgcccagatcgtgtggtacagaagagtgagcgacatgaccagcgccagcagcgccagaatgatgggcgtggccggcgccagcgccccctggagaagattcgccagaaccgccagcagctggagcacctgggagagaagcctgccccagagaagacagagcggcggcgccagaagcaccaccgtgagagccccccccaccagcctgacctggaccacctggagaacctgcaccccctggatgccccccaccatggccaccagccccaccctgagcaccaccgtggtgacccccacctgcagatgcaccaccagcagctag

SEQ ID NO: 135820 - DNA, 1239 bp, Artificial Sequence
  derived and/or modified sequence
atggcagagaacttgaagggttgctccgtatgctgtaagtcctcttggaaccagctccaggacctttgtagattggcgaagctgtcatgccctgccctgggaatatctaagagaaatctttacgatttcgaggttgagtatctgtgtgactacaagaagattagggaacaggagtattatttagttaaatggcggggttatcccgatagcgagtccacttgggaaccgagacagaatcttaagtgcgtgcgcatccttaaacagtttcataaggacctggaacgcgaactactgaggcgccaccacaggtcaaaaactcccagacatctggacccttctctcgccaactacctggttcagaaggctaagcagagacgtgccttgagaagatgggagcaggaattgaatgcgaagcggtcccacctgggccgtataacagtcgagaatgaagtcgacttggatggacccccgagagcatttgtgtatattaatgagtacagggtcggtgaaggtatcactcttaaccaggtcgctgtaggttgtgagtgtcaggactgcctgtgggcacctactggcggatgctgccctggagcgagccttcacaaatttgcatataacgatcagggccaggtcagactgagggccggactcccgatttacgaatgtaattcacgttgccgctgcggttacgactgtcctaaccgtgttgtgcagaaaggaatccggtatgacttgtgcatcttccgcaccgatgatggtagagggtggggagttagaactctggagaagatcagaaaaaattcatttgtgatggagtacgtgggggagattatcaccagcgaagaggccgagaggcggggccagatttacgacagacagggggcgacatacctcttcgatttagattatgtcgaggacgtctatactgtagatgccgcttattacggcaacatatctcattttgttaatcactcatgcgacccaaacctgcaggtgtataacgtctttattgataatctggacgagcggcttcccagaattgctttctttgcaacgcgcaccataagagcaggcgaagaattgaccttcgattacaatatgcaggtcgatcccgtcgatatggaaagtacacgaatggatagcaattttggcctggctggcctccctgggagcccaaagaagcgcgtccgcattgaatgtaaatgtggaacggagtcatgcaggaaatacctcttttag

SEQ ID NO: 135821 - DNA, 648 bp, Artificial Sequence
  derived and/or modified sequence
atggcctggatctcccgacttcgcgaacatctggatggaccacctagagcgttcgtatacatcaatgagtatcgcgttggggaaggcatcactttgaaccaggtggccgtgggctgcgagtgtcaggactgcctgtgggcccccacaggtgggtgctgcccaggggccagtctccacaaatttgcttataacgaccagggtcaagtgcgcctgcgcgcaggcctgccaatctacgaatgtaactccaggtgccgctgtgggtatgactgtcctaatagagttgtgcagaagggcattcggtacgatctatgcatcttcaggaccgacgacggaaggggttggggtgtacgtacacttgaaaagatcagaaagaatagctttgtcatggatcccgccctgctgaccgtgtgtttaaaattgcccgccttccccatggggaaagcttgggaaacagacctctccgtgacaggcacgctgggacgtgggtgtggcaggggagaggaccgcttgcaggagagtcccttcccagttcctgcacccagcgtcggttgcacctataagccaccgccaacctttaggaactcattttctacgtctcggctcagtgttgtcgggattcacggcctgctgcgaaggagtaaggggtag

SEQ ID NO: 135822 - DNA, 1230 bp, Artificial Sequence
  derived and/or modified sequence
atggccgagaaccttaagggatgcagtgtgtgctgtaaaagttcttggaatcagctacaggatttgtgccgtttggctaagctcagctgcccagcactaggtatctctaaaagaaacttatatgatttcgaagtagagtacgtgagattgcaagaggaccctaggactggcatactccccggggaaatggcttggattagtcggttacgcgaacacctgggagcaaccgctgaaagtcaagtgtgtgcatatcctcaagccgtcccgcaaggattgaggaagggagccgcaccggcagcccctccggtcaaggatccacccgctcccgggcccaaacttggacagctgcctggagccgagggtcaagctgaggccggagccccctcccttggagcgggagcccagtgtcaggcgcacctaggacgaatcaccgtggaaaatgaggtcgacctcgacggccccccgcgagccttcgtgtatattaacgaatatcgcgttggcgaggggatcacccttaatcaggtcgccgtcgggtgtgagtgccaggattgcctttgggcacccaccgggggctgttgcccccggcactgtactagcctgcccactatgacccgggccaggtgcggctttgagcccggatgcccatccacaagtgctacccctgccgccgcagctgctatgactgcgcaaatagtatggtatcggagggttagcgatatgacgagtgcctcgagtgcacgtatgatgggcgtcgcaggtgcctccgcaccctggcgccggttcgcgagaactgcttcttcgtggagtacctgggaaaggtccctgccacaacgaagacaatccgggggccaaatatacgatagacagggagcgacctacctgttcgacctggactacgttgaagatgtttatactgtggatgcagcctattatgggaatatctcccacttcgtaaatcatagctgcgatccgaatctgcaggtctataacgtgtttatagacaacctggacgagcgcctaccttctctgtccctgccccaggagcctagtggacaggctcggagcagccctctgataacgacttgtaaatggacgccatggacttggcgtgcgcctgcatggacccccacactcgcatggttgggctctctggctcccctgcgcagcggttccgttctgaatgcatcggtaggactatcccccgctgctaacacatcaagcagtccctag

SEQ ID NO: 135823 - DNA, 555 bp, Artificial Sequence
  derived and/or modified sequence
atggcttggatcagcaggttacgcgaacatctcggggcgactgccgaatcccaggtgtgcgcgtatccacaagccgtgcctcaaggacttcggaaaggagccgcccccgcagcccccccagttaaagatccacccgcaccggggcccaagctgggccaacttcctggggctgagggccaagcggagccagggtgcccttcaacttcagccacccccgccgccgctgccgccatgactgcgcaaattgtgtggtaccgaagggtctcggacatgaccagcgcttcctcagctcggatgatgggagttgccggagcctcggccccctggcggaggttcgcccgaacagcctcatcatggtcaacctgggaaaggagcctccctcaaaggcggcagtccggtggagcacgatccactacagtccgcgctccacccacttcgctgacttggacaacttggaggacgtgcaccccctggatgccccctacaatggccacttcccccaccctgtccacaaccgttgtgacaccaacgtgccgctgtaccacaagttcttag

SEQ ID NO: 135824 - DNA, 1239 bp, Artificial Sequence
  derived and/or modified sequence
atggccgagaacctgaagggctgcagcgtgtgctgcaagagctcctggaaccagctgcaggacctgtgccgcctggccaagctgagctgcccagccctgggcatcagcaagaggaacctgtatgactttgaggtggagtacctgtgtgactacaagaagatccgggagcaggagtactacctggtgaagtggaggggctacccagacagcgagagcacctgggagccccggcagaacctgaagtgtgtgcgcatcctgaagcagttccacaaggacctggagcgggagctgctgcggcggcaccacaggagcaagacccccaggcacctggaccccagcctggccaactacctggtgcagaaggccaagcagaggcgggccctgcggcgctgggagcaggagctgaatgccaagaggagccacctgggccgcatcaccgtggagaatgaggtggacctggatggccccccccgggcctttgtgtacatcaatgagtacagagtgggggagggcatcaccctgaaccaggtggccgtgggctgtgagtgccaggactgcctgtgggcccccactggaggctgctgccctggggccagcctgcacaagtttgcctacaatgaccagggccaggtgcggctgcgggccggcctgcccatctatgagtgcaacagccgctgccgctgtggctatgactgccccaacagagtggtgcagaagggcatccgctatgacctgtgcatcttcagaacagatgatggccggggctggggcgtgaggaccctggagaagatcaggaagaacagctttgtgatggagtatgtgggggagatcatcaccagcgaggaggccgagcggcggggccagatctatgaccggcagggcgccacctacctgtttgacctggactatgtggaggatgtgtacacagtggatgctgcctactacggcaacatcagccactttgtgaaccacagctgtgaccccaacctgcaggtgtacaacgtgttcatcgacaacctggatgagcggctgcccagaattgccttctttgccaccaggaccatccgggccggggaggagctgacctttgactacaacatgcaggtggaccctgtggacatggagagcaccaggatggacagcaactttggcctggccggcctgcccggcagccccaagaagagggtgagaattgaatgtaaatgtggcacagagagctgcaggaagtacctgttctag

SEQ ID NO: 135825 - DNA, 648 bp, Artificial Sequence
  derived and/or modified sequence
atggcctggatcagccggctgcgggagcacctggatggccccccccgggcctttgtgtacatcaatgagtacagagtgggggagggcatcaccctgaaccaggtggccgtgggctgtgagtgccaggactgcctgtgggcccccactggaggctgctgccctggggccagcctgcacaagtttgcctacaatgaccagggccaggtgcggctgcgggccggcctgcccatctatgagtgcaacagccgctgccgctgtggctatgactgccccaacagagtggtgcagaagggcatccgctatgacctgtgcatcttcagaacagatgatggccggggctggggcgtgaggaccctggagaagatcaggaagaacagctttgtgatggaccctgccctgctgactgtgtgcctgaagctgcctgccttccccatgggcaaggcctgggagacagacctgtctgtgacaggcaccctgggccggggctgcggcagaggagaagatcggctgcaggagagccccttccctgtgcctgcccccagcgtgggctgcacctacaagcccccacccaccttcagaaattccttcagcaccagccggctgtctgtggtgggcatccacggcctgctgcggcgcagcaagggctag

SEQ ID NO: 135826 - DNA, 1230 bp, Artificial Sequence
  derived and/or modified sequence
atggccgagaacctgaagggctgcagcgtgtgctgcaagagctcctggaaccagctgcaggacctgtgccgcctggccaagctgagctgcccagccctgggcatcagcaagaggaacctgtatgactttgaggtggagtatgtgcggctgcaggaggaccccaggacaggcatcctgcccggggagatggcctggatcagccggctgcgggagcacctgggcgccacagctgagagccaggtgtgtgcctacccccaggccgtgccccagggcctgaggaagggggccgccccagctgcccctcctgtgaaggaccccccagcccctggccccaagctgggccagctgcctggagctgagggccaggccgaggccggggcccccagcctgggcgctggggcccagtgccaggcccacctgggccgcatcaccgtggagaatgaggtggacctggatggccccccccgggcctttgtgtacatcaatgagtacagagtgggggagggcatcaccctgaaccaggtggccgtgggctgtgagtgccaggactgcctgtgggcccccactggaggctgctgccccaggcactgcaccagcctgcccaccatgacccgggcccgctgtggctttgagcccggctgccccagcaccagcgccaccccagctgctgctgctgccatgacagcccagatcgtgtggtacagaagagtgtctgacatgaccagcgccagcagcgccaggatgatgggcgtggccggggccagcgccccctggaggagatttgccaggacagccagctcctggagcacctgggagaggagcctgccccagaggcggcagagcggcggccagatctatgaccggcagggcgccacctacctgtttgacctggactatgtggaggatgtgtacacagtggatgctgcctactacggcaacatcagccactttgtgaaccacagctgtgaccccaacctgcaggtgtacaacgtgttcatcgacaacctggatgagcggctgcccagcctgagcctgccccaggagcccagcggccaggcccggagcagccccctcatcaccacctgcaagtggaccccctggacctggagggccccagcctggacccccaccctggcctggctgggcagcctggcccccctgcggagcggctctgtgctgaatgcctctgtgggcctgagccctgctgccaacaccagcagcagcccctag

SEQ ID NO: 135827 - DNA, 1239 bp, Artificial Sequence
  derived and/or modified sequence
atggccgagaacctgaagggctgcagcgtgtgctgcaagagcagctggaaccaactgcaggacctgtgcagattggcaaagctctcatgcccggcccttggtattagcaaaagaaatctatacgacttcgaggtggaatatctttgtgattacaaaaaaatacgggagcaagagtattatttggtgaaatggcggggctacccagattctgagagcacatgggaaccaaggcaaaatttgaagtgtgtacggattctcaaacagttccacaaggatctagaaagagagttacttcgacgacatcaccggtcaaagactcctagacacctagatccatccctcgccaattatctggtacaaaaggctaagcagaggagggctctacgacgctgggaacaagaactaaatgccaagcggagccatctcggaaggatcaccgtggagaatgaagttgatctggatgggcccccacgggcttttgtttatatcaacgagtatagagttggggagggcataacactcaatcaagtcgcggtcgggtgtgaatgtcaggactgtttgtgggcacctacagggggatgctgccccggggcctcccttcataaattcgcctacaacgatcaggggcaggtacgtctgcgagccggcttacccatttatgagtgtaattcccgttgccgctgcggctacgattgtcccaaccgcgtcgttcagaaagggatccgctatgacctgtgcatcttccgaacagatgatgggcgcggctggggagtgaggacgcttgagaaaatacggaagaactcattcgtgatggagtacgtcggggagatcattacatctgaagaagcagagcggcgagggcagatttacgaccgtcagggcgccacctatctcttcgatctcgattatgtggaggatgtgtatacagttgacgctgcttactacggtaacatctctcacttcgtgaatcactcctgtgaccccaatctgcaggtgtacaacgtgtttattgataatctggatgagaggttgcctaggattgcttttttcgcaacaaggaccattagagctggagaggagctgacatttgattataatatgcaggtcgatccagtggacatggaatcaacacggatggattcgaactttggcctggcgggtctgccgggtagtcctaagaagcgggttcggatagaatgcaaatgtgggaccgagtcttgtcgtaaatatctcttttag

SEQ ID NO: 135828 - DNA, 648 bp, Artificial Sequence
  derived and/or modified sequence
atggcctggatcagccggctgcgggagcacctggacggcccccccagagccttcgtgtacattaatgagtatagagtaggcgagggcatcactttgaatcaggtggctgtgggttgcgagtgccaggactgtctttgggccccaacaggaggatgttgccctggggcctccctgcataagtttgcctataacgatcaaggccaggtgcgactaagggctggcctgcccatctatgaatgcaattccaggtgcagatgcgggtatgattgccctaatagggtagttcagaaaggaatcaggtacgacttgtgtattttcaggaccgatgatggccgtgggtggggcgtgcggacccttgaaaagattagaaagaactcttttgttatggaccctgccttattgactgtgtgtctgaaacttccggcctttcccatgggtaaagcctgggagaccgatttgtcagtgactgggaccctagggaggggttgcggaaggggcgaggatcgactgcaagagtctcccttcccagttccagcacctagcgtgggttgcacatacaagcccccaccaacctttcgtaattctttctcaacttcccggttatctgtggtgggaattcacggcttgctgagaaggtctaagggatag

SEQ ID NO: 135829 - DNA, 1230 bp, Artificial Sequence
  derived and/or modified sequence
atggccgagaacctgaagggctgcagcgtgtgctgcaagagcagctggaatcaattacaggacctttgtcggctggccaagctctcttgtccagccctcggcatctctaagaggaatctgtacgattttgaagtcgaatatgttaggctgcaggaagacccaagaaccggcatacttccaggggagatggcctggataagtagactccgagaacaccttggcgctaccgcggagtcccaggtttgtgcctatccacaggctgtccctcaggggttgcgcaagggggctgccccagcagcaccacccgttaaagatccccccgcacctggaccgaaattgggccagctgcctggcgcagaaggtcaggctgaggcaggcgcaccgagcctcggggccggggctcaatgccaggcacatctcggcagaattacagtggagaatgaggttgatctggatgggccccctcgggcttttgtgtatataaacgaataccgagtgggagagggcatcacactgaaccaggtagccgtggggtgcgagtgtcaggattgtctgtgggctccaacaggagggtgctgcccaagacattgcactagtctacctaccatgacccgcgccagatgtgggttcgaacctggctgcccttccactagtgccacacccgccgctgctgccgcaatgaccgcccaaattgtgtggtaccgaagagtttcagatatgaccagcgcctcatcagcgcggatgatgggcgttgccggggccagtgccccttggcggcggtttgcgcgtactgcttcatcctggagtacctgggaacggtcattgccccagcgccggcagtctgggggccaaatctacgaccgccaaggagctacctatctgtttgatcttgattatgtggaagacgtatataccgtggatgcagcctattacgggaacatcagccatttcgttaaccactcctgcgatcccaatctgcaggtttacaacgtctttattgataacctcgacgaacggctgccaagcctgtccctgccacaagagccctccgggcaagcaagaagttcccccctcatcaccacatgtaaatggaccccttggacctggagggcacccgcttggacccctactctggcctggttaggctcactggctcctttgaggtcaggttcagtcctcaatgctagcgtggggctcagccccgcggcaaacaccagttcttccccgtag

SEQ ID NO: 135830 - DNA, 555 bp, Artificial Sequence
  derived and/or modified sequence
atggcctggatcagccggctgcgggagcacctgggcgccaccgccgagagccaggtgtgtgcttatcctcaggcagtgcctcaggggctgcgcaaaggcgccgccccagcagccccgcccgtaaaagatcccccggcccccggccccaaactgggccagctccctggcgctgaaggccaggctgagccaggctgcccatccacttcagcaacacccgcagctgccgcggcaatgacagcacagatcgtgtggtatagacgcgtgtccgatatgacaagcgcctcttctgccagaatgatgggcgtagccggggcgtcggctccttggcgtcggtttgctagaaccgcctcctcgtggagcacctgggaacgctcattaccgcagaggcgacagtcaggcggcgcgagatcgacgacggtgagggccccaccgactagtctgacttggactacgtggcgaacctgtaccccatggatgccccctacaatggctaccagtcctaccctctccacaactgtagtgactcccacttgccgatgtactacttcttcttag

SEQ ID NO: 135831 - DNA, 1239 bp, Artificial Sequence
  derived and/or modified sequence
atggcagaaaacctcaaggggtgcagcgtgtgctgcaaaagctcatggaaccagctccaggatctctgtcgtctagcgaaactctcttgccctgcgctcggaatctccaaacgcaacctttacgatttcgaggtcgagtatttgtgcgactataagaaaatacgcgagcaggaatactaccttgtcaagtggcgtggatatcccgactctgagagcacttgggaacctaggcaaaatctgaaatgtgtgcggatcctgaaacagtttcacaaagatctcgagagggaactactaagacggcatcaccgctccaaaacacctagacatctcgatccatccttggccaattacctggtgcagaaggcaaaacagaggcgagcactaaggagatgggaacaggaattgaatgctaagaggtctcatctggggaggattactgtggagaatgaagttgatttggatggcccacctagggccttcgtatatataaacgaatatcgagtcggcgaaggtattacactgaatcaggtggccgttggctgcgagtgccaggactgtttatgggctcccacggggggatgctgtcctggagcctcattacacaagtttgcttacaatgatcagggtcaggtgcgcttgagagccggactgcccatctatgaatgtaacagtcggtgtcgttgcggctacgattgcccaaaccgggtggtgcagaagggaattcgatatgatctgtgtatatttaggaccgacgatgggagggggtggggggttcggactctcgagaagattcggaaaaattcattcgtgatggagtacgtcggcgagatcataacttcagaggaagccgaaagaaggggccagatatacgaccgtcagggcgctacttacctatttgatctggattacgttgaggacgtgtatacggtcgacgcagcatattacggtaacatctcccacttcgttaatcattcatgcgaccctaatctgcaagtctacaatgtattcatagacaacttagatgaacgactgccgcgtatagccttttttgccacccggacgatccgagcaggagaagagctcacctttgactacaacatgcaggtggatcccgtcgatatggaatcgactagaatggacagtaatttcggtctggctgggcttccgggtagcccaaagaagcgcgttagaatcgagtgcaagtgtggcactgaatcctgtagaaaatacctgttttag

SEQ ID NO: 135832 - DNA, 648 bp, Artificial Sequence
  derived and/or modified sequence
atggcttggatctcgagattgcgtgagcacctcgacggaccaccgagggcattcgtttatatcaatgagtatagggttggggaggggataacactaaatcaggttgcagtgggctgtgaatgtcaggattgtctttgggcgccaacaggaggatgctgccctggcgcatccctacacaaatttgcgtacaacgatcagggccaggtcagactgagggccggattacctatttacgagtgcaattcacgttgtaggtgtgggtatgattgcccgaatcgagttgttcagaaggggatcaggtacgatctctgtatctttagaacggacgatggtcgtggctggggagtcagaacattggagaagattaggaaaaactcattcgtgatggatcccgctttgttaaccgtgtgcttgaaattacctgcatttcctatgggcaaagcctgggaaacagatctgtctgtaaccggaactttaggtcgcggatgcggcaggggcgaggacagactgcaggaatctccgttcccagtgcccgcaccatcagtaggatgtacatataagccacctcccacgtttcgtaactcattctccacttctcgtctctcagtcgtcggaattcacggcctgcttcgaaggtctaagggttag

SEQ ID NO: 135833 - DNA, 1230 bp, Artificial Sequence
  derived and/or modified sequence
atggcagagaaccttaaagggtgtagcgtgtgttgtaaaagttcctggaaccagctgcaagatctgtgtcgcctagcgaagctctcgtgccccgctctgggcattagcaagcgaaatctgtatgatttcgaggtagagtatgtcaggctgcaggaagaccccagaactggcattctgcctggcgaaatggcatggatttctcgcctcagagaacatctcggggctacagcagagtctcaagtgtgtgcctatccacaagctgtcccccagggcctgcgcaaaggcgctgcccctgcagcccctcccgtgaaggaccccccagcgccaggtcctaagctgggtcaactgccaggagccgaagggcaggctgaggctggcgctcctagcttaggggctggagcacaatgccaggctcacctcggtagaattactgtcgaaaatgaggtcgacctcgatggtcctcctcgggcattcgtctatatcaacgagtaccgcgtgggtgagggcattacacttaaccaggtagctgtcggatgcgaatgccaagattgcttgtgggctccaacaggcggatgctgccctagacactgtacatccctgccaacaatgactagagccagatgcgggttcgaaccgggttgtcccagcacatcggctacccccgctgcagctgccgctatgaccgcgcaaatcgtctggtatcggcgtgtttcagatatgactagcgccagcagtgcccgaatgatgggcgtcgctggagccagcgccccatggaggagatttgccagaacagcatccagttggtcgacctgggagcgctctttgccacagagacgccagagcggagggcagatctatgataggcagggggctacatacttgttcgacctggactatgtcgaagacgtgtacaccgttgacgccgcttactacggaaatatctcccactttgttaatcactcgtgcgacccaaatctgcaggtttacaacgttttcatcgataacctcgacgaacgcttgccatctctgagtcttccccaggaacccagtggccaggccagatccagcccactgattactacctgcaaatggaccccatggacatggagagcaccagcttggacccccacgctggcatggctgggttcccttgcccctctgaggagtggctcagtgctgaacgcgtccgttggactctctcccgcagctaacacttccagcagcccttag

SEQ ID NO: 135834 - DNA, 555 bp, Artificial Sequence
  derived and/or modified sequence
atggcttggattagtaggttgagggagcacttaggagctacagccgagtcccaggtgtgcgcatatcctcaggccgttccccaaggcctaaggaagggagcggctcccgctgcccctccagtgaaggacccgccagcaccaggtccgaagctcgggcaactacctggggctgagggacaggcagaacctggctgtcctagtactagtgcaactccagccgcagctgccgcaatgacggctcagattgtctggtatcgcagagtctccgacatgacatcagcctccagcgccagaatgatgggcgtagctggcgcttctgcaccttggcggaggtttgcaaggaccgcttccagctggtctacttgggagcgttcattgccccagcggaggcagagcggaggcgctcggagcacgaccgtgcgcgcacctcctacatcactgacctggacaacctggagaacttgtaccccatggatgccccctacaatggcgacgagccctaccctgtcaactacggtagtgactcccacatgtcgctgtacaacaagctcctag

SEQ ID NO: 135835 - DNA, 2871 bp, Artificial Sequence
  derived and/or modified sequence
gcggcgagcacccgcctccgggaccgagccgggcggcagggaggggttcggtcacggctctccggttggtccgcgcgggtgctgcgagtcgggagccgcggccaataggctgcgcgttcccggccacgcccgcgcgagcgctcttctcgcgaggccggctaggcccgaatgtcgttagccgtggggaaagatggcggaaaatttaaaaggctgcagcgtgtgttgcaagtcttcttggaatcagctgcaggacctgtgccgcctggccaagctctcctgccctgccctcggtatctctaagaggaacctctatgactttgaagtcgagtacctgtgcgattacaagaagatccgcgaacaggaatattacctggtgaaatggcgtggatatccagactcagagagcacctgggagccacggcagaatctcaagtgtgtgcgtatcctcaagcagttccacaaggacttagaaagggagctgctccggcggcaccaccggtcaaagaccccccggcacctggacccaagcttggccaactacctggtgcagaaggccaagcagaggcgggcgctccgtcgctgggagcaggagctcaatgccaagcgcagccatctgggacgcatcactgtagagaatgaggtggacctggacggccctccgcgggccttcgtgtacatcaatgagtaccgtgttggtgagggcatcaccctcaaccaggtggctgtgggctgcgagtgccaggactgtctgtgggcacccactggaggctgctgcccgggggcgtcactgcacaagtttgcctacaatgaccagggccaggtgcggcttcgagccgggctgcccatctacgagtgcaactcccgctgccgctgcggctatgactgcccaaatcgtgtggtacagaagggtatccgatatgacctctgcatcttccgcacggatgatgggcgtggctggggcgtccgcaccctggagaagattcgcaagaacagcttcgtcatggagtacgtgggagagatcattacctcagaggaggcagagcggcggggccagatctacgaccgtcagggcgccacctacctctttgacctggactacgtggaggacgtgtacaccgtggatgccgcctactatggcaacatctcccactttgtcaaccacagttgtgaccccaacctgcaggtgtacaacgtcttcatagacaaccttgacgagcggctgccccgcatcgctttctttgccacaagaaccatccgggcaggcgaggagctcacctttgattacaacatgcaagtggaccccgtggacatggagagcacccgcatggactccaactttggcctggctgggctccctggctcccctaagaagcgggtccgtattgaatgcaagtgtgggactgagtcctgccgcaaatacctcttctagcccttagaagtctgaggccagactgactgagggggcctgaagctacatgcacctcccccactgctgccctcctgtcgagaatgactgccagggcctcgcctgcctccacctgcccccacctgctcctacctgctctacgttcagggctgtggccgtggtgaggaccgactccaggagtcccctttccctgtcccagccccatctgtgggttgcacttacaaacccccacccaccttcagaaatagtttttcaacatcaagactctctgtcgttgggattcatggcctattaaggaggtccaaggggtgagtcccaacccagccccagaatatatttgtttttgcacctgcttctgcctggagattgaggggtctgctgcaggcctcctccctgctgccccaaaggtatggggaagcaaccccagagcaggcagacatcagaggccagagtgcctagcccgacatgaagctggttccccaaccacagaaactttgtactagtgaaagaaagggggtccctgggctacgggctgaggctggtttctgctcgtgcttacagtgctgggtagtgttggccctaagagctgtagggtctcttcttcagggctgcatatctgagaagtggatgcccacatgccactggaagggaagtgggtgtccatgggccactgagcagtgagaggaaggcagtgcagagctggccagccctggaggtaggctgggaccaagctctgccttcacagtgcagtgaaggtacctagggctcttgggagctctgcggttgctaggggccctgacctggggtgtcatgaccgctgacaccactcagagctggaaccaagatctagatagtccgtagatagcacttaggacaagaatgtgcattgatggggtggtgatgaggtgccaggcactgggtagagcacctggtccacgtggattgtctcagggaagccttgaaaaccacggaggtggatgccaggaaagggcccatgtggcagaaggcaaagtacaggccaagaattgggggtgggggagatggcttccccactatgggatgacgaggcgagagggaagcccttgctgcctgccattcccagaccccagccctttgtgctcaccctggttccactggtctcaaaagtcacctgcctacaaatgtacaaaaggcgaaggttctgatggctgccttgctccttgctcccccaccccctgtgaggacttctctaggaagtccttcctgactacctgtgcccagagtgcccctacatgagactgtatgccctgctatcagatgccagatctatgtgtctgtctgtgtgtccatcccgccgaccccccagactaacctccaggcatggactgaatctggttctcctcttgtacacccctcaaccctatgcagcctggagtgggcatcaataaaatgaactgtcgactgaa

SEQ ID NO: 135836 - DNA, 648 bp, Artificial Sequence
  derived and/or modified sequence
atggcgtggatatccagactcagagagcacctggacggccctccgcgggccttcgtgtacatcaatgagtaccgtgttggtgagggcatcaccctcaaccaggtggctgtgggctgcgagtgccaggactgtctgtgggcacccactggaggctgctgcccgggggcgtcactgcacaagtttgcctacaatgaccagggccaggtgcggcttcgagccgggctgcccatctacgagtgcaactcccgctgccgctgcggctatgactgcccaaatcgtgtggtacagaagggtatccgatatgacctctgcatcttccgcacggatgatgggcgtggctggggcgtccgcaccctggagaagattcgcaagaacagcttcgtcatggacccggctctcctcactgtgtgtctgaaactccctgctttccctatgggaaaggcctgggagactgatctgagtgtcacagggacattgggcaggggctgtggccgtggtgaggaccgactccaggagtcccctttccctgtcccagccccatctgtgggttgcacttacaaacccccacccaccttcagaaatagtttttcaacatcaagactctctgtcgttgggattcatggcctattaaggaggtccaaggggtga

SEQ ID NO: 135837 - DNA, 2708 bp, Artificial Sequence
  derived and/or modified sequence
ctcgcgaggccggctaggcccgaatgtcgttagccgtggggaaagatggcggaaaatttaaaaggctgcagcgtgtgttgcaagtcttcttggaatcagctgcaggacctgtgccgcctggccaagctctcctgccctgccctcggtatctctaagaggaacctctatgactttgaagtcgagtacgtgcgattacaagaagatccgcgaacaggaatattacctggtgaaatggcgtggatatccagactcagagagcacctgggagccacggcagaatctcaagtgtgtgcgtatcctcaagcagttccacaaggacttagaaagggagctgctccggcggcaccaccggtcaaagaccccccggcacctggacccaagcttggccaactacctggtgcagaaggccaagcagaggcgggcgctccgtcgctgggagcaggagctcaatgccaagcgcatctgggacgcatcactgtagagaatgaggtggacctggacggccctccgcgggccttcgtgtacatcaatgagtaccgtgttggtgagggcatcaccctcaaccaggtggctgtgggctgcgagtgccaggactgtctgtgggcacccactggaggctgctgcccgcgtcactgcacaagtttgcctacaatgaccagggccaggtgcggcttcgagccgggctgcccatctacgagtgcaactcccgctgccgctgcggctatgactgcccaaatcgtgtggtacagaagggtatccgatatgacctctgcatcttccgcacggatgatgggcgtggctggggcgtccgcaccctggagaagattcgcaagaacagcttcgtcatggagtacgtgggagagatcattacctcagaggaggcagagcggcgggcagatctacgaccgtcagggcgccacctacctctttgacctggactacgtggaggacgtgtacaccgtggatgccgcctactatggcaacatctcccactttgtcaaccacagttgtgaccccaacctgcaggtgtacaacgtcttcatagacaaccttgacgagcggctgccctcgctttctttgccacaagaaccatccgggcaggcgaggagctcacctttgattacaacatgcaagtggaccccgtggacatggagagcacccgcatggactccaactttggcctggctgggctccctggctcccctaagaagcgggtccgtattgaatgcaagtgtgggactgagtcctgccgcaaatacctcttctagcccttagaagtctgaggccagactgactgagggggcctgaagctacatgcacctcccccactgctgccctcctgtcgagaatgactgccagggcctcgcctgcctccacctgcccccacctgctcctacctgctctacgttcagggctgtggccgtggtgaggaccgactccaggagtcccctttccctgtcccagccccatctgtgggttgcacttacaaacccccacccaccttcagaaatagtttttcaacatcaagactctctgtcgttgggattcatggcctattaaggaggtccaaggggtgagtcccaacccagccccagaatatatttgtttttgcacctgcttctgcctggagattgaggggtctgctgcaggcctcctccctgctgccccaaaggtatggggaagcaaccccagagcaggcagacatcagaggccagagtgcctagcccgacatgaagctggttccccaaccacagaaactttgtactagtgaaagaaagggggtccctgggctacgggctgaggctggtttctgctcgtgcttacagtgctgggtagtgttggccctaagagctgtagggtctcttcttcagggctgcatatctgagaagtggatgcccacatgccactggaagggaagtgggtgtccatgggccactgagcagtgagaggaaggcagtgcagagctggccagccctggaggtaggctgggaccaagctctgccttcacagtgcagtgaaggtacctagggctcttgggagctctgcggttgctaggggccctgacctggggtgtcatgaccgctgacaccactcagagctggaaccaagatctagatagtccgtagatagcacttaggacaagaatgtgcattgatggggtggtgatgaggtgccaggcactgggtagagcacctggtccacgtggattgtctcagggaagccttgaaaaccacggaggtggatgccaggaaagggcccatgtggcagaaggcaaagtacaggccaagaattgggggtgggggagatggcttccccactatgggatgacgaggcgagagggaagcccttgctgcctgccattcccagaccccagccctttgtgctcaccctggttccactggtctcaaaagtcacctgcctacaaatgtacaaaaggcgaaggttctgatggctgccttgctccttgctcccccaccccctgtgaggacttctctaggaagtccttcctgactacctgtgcccagagtgcccctacatgagactgtatgccctgctatcagatgccagatctatgtgtctgtctgtgtgtccatcccgccgaccccccagactaacctccaggcatggactgaatctggttctcctcttgtacacccctcaaccctatgcagcctggagtgggcatcaataaaatgaactgtcgactg

SEQ ID NO: 135838 - DNA, 1730 bp, Artificial Sequence
  derived and/or modified sequence
cccgaatgtcgttagccgtggggaaagatggcggaaaatttaaaaggctgcagcgtgtgttgcaagtcttcttggaatcagctgcaggacctgtgccgcctggccaagctctcctgccctgccctcggtatctctaagaggaacctctatgactttgaagtcgagtacctgtgcgattacaagaagatccgcgaacaggaatattacctggtgaaatggcgtggatatccagactcagagagcacctgggagccacggcagaatctcaagtgtgtgcgtatcctcaagcagttccacaaggacttagaaagggagctgctccggcggcaccaccggtcaaagaccccccggcacctggacccaagcttggccaactacctggtgcagaaggccaagcagagccgggctgcccatctacgagtgcaactcccgctgccgctgcggctatgactgcccaaatcgtgtggtacagaagggtatccgatatgacctctgcatcttccgcacggatgatgggcgtggctggggcgtccgcaccctggagaagattcgcaagaacagcttcgtcatggagtacgtgggagagatcattacctcagaggaggcagagcggcggggccagatctacgaccgtcagggcgccacctacctctttgacctggactacgtggaggacgtgtacaccgtggatgccgcctactatggcaacatctcccactttgtcaaccacagttgtgaccccaacctgcaggtgtacaacgtcttcatagacaaccttgacgagcggctgccccgcatcgctttctttgccacaagaaccatccgggcaggcgaggagctcacctttgattacaacatgcaagtggaccccgtggacatggagagcacccgcatggactccaactttggcctggctgggctccctggctcccctaagaagcgggtccgtattgaatgcaagtgtgggactgagtcctgccgcaaatacctcttctagcccttagaagtctgaggccagactgactgagggggcctgaagctacatgcacctcccccactgctgccctcctgtcgagaatgactgccagggcctcgcctgcctccacctgcccccacctgctcctacctgctctacgttcagggctgtggccgtggtgaggaccgactccaggagtcccctttccctgtcccagccccatctgtgggttgcacttacaaacccccacccaccttcagaaatagtttttcaacatcaagactctctgtcgttgggattcatggcctattaaggaggtccaaggggtgagtcccaacccagccccagaatatatttgtttttgcacctgcttctgcctggagattgaggggtctgctgcaggcctcctccctgctgccccaaaggtatggggaagcaaccccagagcaggcagacatcagaggccagagtgcctagcccgacatgaagctggttccccaaccacagaaactttgtactagtgaaagaaagggggtccctgggctacgggctgaggctggtttctgctcgtgcttacagtgctgggtagtgttggccctaagagctgtagggtctcttcttcagggctgcatatctgagaagtggatgcccacatgccactggaagggaagtgggtgtccatgggccactgagcagtgagaggaaggcagtgcagagctggccagccctggaggtaggctgggaccaagctctg

SEQ ID NO: 135839 - protein, 1788 aa, Artificial Sequence
  derived and/or modified sequence
MKRKERIARRLEGIENDTQPILLQSCTGLVTHRLLEEDTPRYMRASDPASPHIGRSNEEEETSDSSLEKQTRSKYCTETSGVHGDSPYGSGTMDTHSLESKAERIARYKAERRRQLAEKYGLTLDPEADSEYLSRYTKSRKEPDAVEKRGGKSDKQEESSRDASSLYPGTETMGLRTCAGESKDYALHVGDGSSDPEVLLNIENQRRGQELSATRQAHDLSPAAESSSTFSFSGRDSSFTEVPRSPKHAHSSSLQQAASRSPSFGDPQLSPEARPRCTSHSETPTVDDEEKVDERAKLSVAAKRLLFREMEKSFDEQNVPKRRSRNTAVEQRLRRLQDRSLTQPITTEEVVIAATLQASAHQKALAKDQTNEGKELAEQGEPDSSTLSLAEKLALFNKLSQPVSKAISTRNRIDTRQRRMNARYQTQPVTLGEVEQVQSGKLIPFSPAVNTSVSTVASTVAPMYAGDLRTKPPLDHNASATDYKFSSSIENSDSPVRSILKSQAWQPLVEGSENKGMLREYGETESKRALTGRDSGMEKYGSFEEAEASYPILNRAREGDSHKESKYAVPRRGSLERANPPITHLGDEPKEFSMAKMNAQGNLDLRDRLPFEEKVEVENVMKRKFSLRAAEFGEPTSEQTGTAAGKTIAQTTAPVSWKPQDSSEQPQEKLCKNPCAMFAAGEIKTPTGEGLLDSPSKTMSIKERLALLKKSGEEDWRNRLSRRQEGGKAPASSLHTQEAGRSLIKKRVTESRESQMTIEERKQLITVREEAWKTRGRGAANDSTQFTVAGRMVKKGLASPTAITPVASPICGKTRGTTPVSKPLEDIEARPDMQLESDLKLDRLETFLRRLNNKVGGMHETVLTVTGKSVKEVMKPDDDETFAKFYRSVDYNMPRSPVEMDEDFDVIFDPYAPKLTSSVAEHKRAVRPKRRVQASKNPLKMLAAREDLLQEYTEQRLNVAFMESKRMKVEKMSSNSNFSEVTLAGLASKENFSNVSLRSVNLTEQNSNNSAVPYKRLMLLQIKGRRHVQTRLVEPRASALNSGDCFLLLSPHCCFLWVGEFANVIEKAKASELATLIQTKRELGCRATYIQTIEEGINTHTHAAKDFWKLLGGQTSYQSAGDPKEDELYEAAIIETNCIYRLMDDKLVPDDDYWGKIPKCSLLQPKEVLVFDFGSEVYVWHGKEVTLAQRKIAFQLAKHLWNGTFDYENCDINPLDPGECNPLIPRKGQGRPDWAIFGRLTEHNETILFKEKFLDWTELKRSNEKNPGELAQHKEDPRTDVKAYDVTRMVSMPQTTAGTILDGVNVGRGYGLVEGHDRRQFEITSVSVDVWHILEFDYSRLPKQSIGQFHEGDAYVVKWKFMVSTAVGSRQKGEHSVRAAGKEKCVYFFWQGRHSTVSEKGTSALMTVELDEERGAQVQVLQGKEPPCFLQCFQGGMVVHSGRREEEEENVQSEWRLYCVRGEVPVEGNLLEVACHCSSLRSRTSMVVLNVNKALIYLWHGCKAQAHTKEVGRTAANKIKEQCPLEAGLHSSSKVTIHECDEGSEPLGFWDALGRRDRKAYDCMLQDPGSFNFAPRLFILSSSSGDFAATEFVYPARAPSVVSSMPFLQEDLYSAPQPALFLVDNHHEVYLWQGWWPIENKITGSARIRWASDRKSAMETVLQYCKGKNLKKPAPKSYLIHAGLEPLTFTNMFPSWEHREDIAEITEMDTEVSNQITLVEDVLAKLCKTIYPLADLLARPLPEGVDPLKLEIYLTDEDFEFALDMTRDEYNALPAWKQVNLKKAKGLF

SEQ ID NO: 135840 - DNA, 5367 bp, Artificial Sequence
  derived and/or modified sequence
atgaagagaaaggagagaatcgccagaagactggagggcatcgagaacgacacccagcccatcctgctgcagagctgcaccggcctggtgacccacagactgctggaggaggacacccccagatacatgagagccagcgaccccgccagcccccacatcggcagaagcaacgaggaggaggagaccagcgacagcagcctggagaagcagaccagaagcaagtactgcaccgagaccagcggcgtgcacggcgacagcccctacggcagcggcaccatggacacccacagcctggagagcaaggccgagagaatcgccagatacaaggccgagagaagaagacagctggccgagaagtacggcctgaccctggaccccgaggccgacagcgagtacctgagcagatacaccaagagcagaaaggagcccgacgccgtggagaagagaggcggcaagagcgacaagcaggaggagagcagcagagacgccagcagcctgtaccccggcaccgagaccatgggcctgagaacctgcgccggcgagagcaaggactacgccctgcacgtgggcgacggcagcagcgaccccgaggtgctgctgaacatcgagaaccagagaagaggccaggagctgagcgccaccagacaggcccacgacctgagccccgccgccgagagcagcagcaccttcagcttcagcggcagagacagcagcttcaccgaggtgcccagaagccccaagcacgcccacagcagcagcctgcagcaggccgccagcagaagccccagcttcggcgacccccagctgagccccgaggccagacccagatgcaccagccacagcgagacccccaccgtggacgacgaggagaaggtggacgagagagccaagctgagcgtggccgccaagagactgctgttcagagagatggagaagagcttcgacgagcagaacgtgcccaagagaagaagcagaaacaccgccgtggagcagagactgagaagactgcaggacagaagcctgacccagcccatcaccaccgaggaggtggtgatcgccgccaccctgcaggccagcgcccaccagaaggccctggccaaggaccagaccaacgagggcaaggagctggccgagcagggcgagcccgacagcagcaccctgagcctggccgagaagctggccctgttcaacaagctgagccagcccgtgagcaaggccatcagcaccagaaacagaatcgacaccagacagagaagaatgaacgccagataccagacccagcccgtgaccctgggcgaggtggagcaggtgcagagcggcaagctgatccccttcagccccgccgtgaacaccagcgtgagcaccgtggccagcaccgtggcccccatgtacgccggcgacctgagaaccaagccccccctggaccacaacgccagcgccaccgactacaagttcagcagcagcatcgagaacagcgacagccccgtgagaagcatcctgaagagccaggcctggcagcccctggtggagggcagcgagaacaagggcatgctgagagagtacggcgagaccgagagcaagagagccctgaccggcagagacagcggcatggagaagtacggcagcttcgaggaggccgaggccagctaccccatcctgaacagagccagagagggcgacagccacaaggagagcaagtacgccgtgcccagaagaggcagcctggagagagccaacccccccatcacccacctgggcgacgagcccaaggagttcagcatggccaagatgaacgcccagggcaacctggacctgagagacagactgcccttcgaggagaaggtggaggtggagaacgtgatgaagagaaagttcagcctgagagccgccgagttcggcgagcccaccagcgagcagaccggcaccgccgccggcaagaccatcgcccagaccaccgcccccgtgagctggaagccccaggacagcagcgagcagccccaggagaagctgtgcaagaacccctgcgccatgttcgccgccggcgagatcaagacccccaccggcgagggcctgctggacagccccagcaagaccatgagcatcaaggagagactggccctgctgaagaagagcggcgaggaggactggagaaacagactgagcagaagacaggagggcggcaaggcccccgccagcagcctgcacacccaggaggccggcagaagcctgatcaagaagagagtgaccgagagcagagagagccagatgaccatcgaggagagaaagcagctgatcaccgtgagagaggaggcctggaagaccagaggcagaggcgccgccaacgacagcacccagttcaccgtggccggcagaatggtgaagaagggcctggccagccccaccgccatcacccccgtggccagccccatctgcggcaagaccagaggcaccacccccgtgagcaagcccctggaggacatcgaggccagacccgacatgcagctggagagcgacctgaagctggacagactggagaccttcctgagaagactgaacaacaaggtgggcggcatgcacgagaccgtgctgaccgtgaccggcaagagcgtgaaggaggtgatgaagcccgacgacgacgagaccttcgccaagttctacagaagcgtggactacaacatgcccagaagccccgtggagatggacgaggacttcgacgtgatcttcgacccctacgcccccaagctgaccagcagcgtggccgagcacaagagagccgtgagacccaagagaagagtgcaggccagcaagaaccccctgaagatgctggccgccagagaggacctgctgcaggagtacaccgagcagagactgaacgtggccttcatggagagcaagagaatgaaggtggagaagatgagcagcaacagcaacttcagcgaggtgaccctggccggcctggccagcaaggagaacttcagcaacgtgagcctgagaagcgtgaacctgaccgagcagaacagcaacaacagcgccgtgccctacaagagactgatgctgctgcagatcaagggcagaagacacgtgcagaccagactggtggagcccagagccagcgccctgaacagcggcgactgcttcctgctgctgagcccccactgctgcttcctgtgggtgggcgagttcgccaacgtgatcgagaaggccaaggccagcgagctggccaccctgatccagaccaagagagagctgggctgcagagccacctacatccagaccatcgaggagggcatcaacacccacacccacgccgccaaggacttctggaagctgctgggcggccagaccagctaccagagcgccggcgaccccaaggaggacgagctgtacgaggccgccatcatcgagaccaactgcatctacagactgatggacgacaagctggtgcccgacgacgactactggggcaagatccccaagtgcagcctgctgcagcccaaggaggtgctggtgttcgacttcggcagcgaggtgtacgtgtggcacggcaaggaggtgaccctggcccagagaaagatcgccttccagctggccaagcacctgtggaacggcaccttcgactacgagaactgcgacatcaaccccctggaccccggcgagtgcaaccccctgatccccagaaagggccagggcagacccgactgggccatcttcggcagactgaccgagcacaacgagaccatcctgttcaaggagaagttcctggactggaccgagctgaagagaagcaacgagaagaaccccggcgagctggcccagcacaaggaggaccccagaaccgacgtgaaggcctacgacgtgaccagaatggtgagcatgccccagaccaccgccggcaccatcctggacggcgtgaacgtgggcagaggctacggcctggtggagggccacgacagaagacagttcgagatcaccagcgtgagcgtggacgtgtggcacatcctggagttcgactacagcagactgcccaagcagagcatcggccagttccacgagggcgacgcctacgtggtgaagtggaagttcatggtgagcaccgccgtgggcagcagacagaagggcgagcacagcgtgagagccgccggcaaggagaagtgcgtgtacttcttctggcagggcagacacagcaccgtgagcgagaagggcaccagcgccctgatgaccgtggagctggacgaggagagaggcgcccaggtgcaggtgctgcagggcaaggagcccccctgcttcctgcagtgcttccagggcggcatggtggtgcacagcggcagaagagaggaggaggaggagaacgtgcagagcgagtggagactgtactgcgtgagaggcgaggtgcccgtggagggcaacctgctggaggtggcctgccactgcagcagcctgagaagcagaaccagcatggtggtgctgaacgtgaacaaggccctgatctacctgtggcacggctgcaaggcccaggcccacaccaaggaggtgggcagaaccgccgccaacaagatcaaggagcagtgccccctggaggccggcctgcacagcagcagcaaggtgaccatccacgagtgcgacgagggcagcgagcccctgggcttctgggacgccctgggcagaagagacagaaaggcctacgactgcatgctgcaggaccccggcagcttcaacttcgcccccagactgttcatcctgagcagcagcagcggcgacttcgccgccaccgagttcgtgtaccccgccagagcccccagcgtggtgagcagcatgcccttcctgcaggaggacctgtacagcgccccccagcccgccctgttcctggtggacaaccaccacgaggtgtacctgtggcagggctggtggcccatcgagaacaagatcaccggcagcgccagaatcagatgggccagcgacagaaagagcgccatggagaccgtgctgcagtactgcaagggcaagaacctgaagaagcccgcccccaagagctacctgatccacgccggcctggagcccctgaccttcaccaacatgttccccagctgggagcacagagaggacatcgccgagatcaccgagatggacaccgaggtgagcaaccagatcaccctggtggaggacgtgctggccaagctgtgcaagaccatctaccccctggccgacctgctggccagacccctgcccgagggcgtggaccccctgaagctggagatctacctgaccgacgaggacttcgagttcgccctggacatgaccagagacgagtacaacgccctgcccgcctggaagcaggtgaacctgaagaaggccaagggcctgttctag

SEQ ID NO: 135841 - DNA, 5367 bp, Artificial Sequence
  derived and/or modified sequence
atgaaacgaaaagaaagaatcgctcggcgactggaaggtattgagaacgacacccaacccattctgctgcaatcatgcacagggctagtcactcataggctcttagaggaggacactccacggtatatgagggcctccgatcctgctagcccgcatataggaagatcaaacgaggaggaagagacctcagatagtagcctggagaaacaaacacgtagcaagtactgtaccgaaactagcggtgtccacggggacagcccctacgggtcagggaccatggacacccactctttggaatccaaagctgagaggatcgcacgatacaaagcagagaggaggcgacagctcgcagaaaagtacgggctgaccttggatccggaagctgattctgagtacttatcccggtataccaagagccggaaggaacccgacgccgtcgagaagcggggtggcaaatctgacaaacaggaggaaagtagcagggacgcttccagcctctacccgggaaccgagacgatggggctgcgtacatgtgcaggagaatcaaaagactacgcgcttcacgtgggggacggatcaagtgacccagaggtcctgctgaatatcgagaatcagcgtcgcggccaagagctctccgccacgagacaggcccacgacctgtcaccagccgcggaatcttcctctacattctctttcagcgggcgggactccagtttcactgaagtgccaaggagtcctaagcacgctcatagtagttctctgcaacaggccgccagtcgctctccgagcttcggagacccccagttgagcccggaagcaaggccaaggtgtaccagccacagtgagaccccaaccgtggatgatgaggagaaagtcgacgagagggcaaaactgtcagtggccgctaagcgactactgtttagggaaatggagaagagcttcgatgagcagaacgtccctaaaaggcgctctcgaaataccgctgtcgaacaaagactgcggcggttacaggatcggagtctgactcagcccatcacaactgaagaggtggttatcgcagctaccctgcaggcatccgctcaccagaaagcacttgctaaggaccagaccaacgagggtaaagaactggctgagcagggcgagccagattccagcaccctaagcctggcagaaaagctggccctgttcaacaaactctctcagcctgtgtcgaaagcgatctccactcgaaatcgcatagatacgagacagagacgcatgaatgctaggtaccaaactcagcccgtcaccttgggcgaggtcgaacaggtgcagtcaggtaaactaatccccttctcacccgccgtgaacacgtccgtttccacagtggcatcaactgtggctcccatgtacgcgggggacttgagaacgaaacctccattagatcacaacgcttcagccacagattacaaattctcctcctccattgagaactctgacagtccagtgaggagtatcctgaagtctcaagcatggcagcccctagtggaaggcagtgagaacaaggggatgctccgggaatacggagagactgagagcaaacgcgccttgaccggacgtgactccggcatggagaagtatgggagcttcgaagaggccgaagcttcataccctattttaaatcgcgcaagggaaggcgattcccacaaggagtcaaagtacgccgtgccacggaggggaagtctagaacgtgctaaccctcccattacccacctgggcgacgagcccaaagagttcagtatggcgaaaatgaatgcacaaggcaacctcgacctgagggaccggctgccatttgaggagaaggtcgaagtggagaacgtgatgaagagaaagttctctctgcgagcggctgaattcggagagcccacctcagaacagactggaacagccgctgggaagactattgcccagactaccgcacccgttagttggaagccccaggactcatctgagcagccgcaagaaaagctgtgtaaaaacccttgcgccatgttcgcagctggagagattaagaccccaactggcgagggcttactcgattctccatctaagaccatgtccattaaagagcggctggccctccttaaaaaaagtggtgaagaagactggagaaatcgcttatcacgcaggcaggagggcggaaaagcaccagcaagcagcctccacacgcaagaggctggacggtccctgatcaagaaacgtgtgacggaatctcgggaatcgcagatgaccattgaggagagaaaacaactgattactgtcagagaggaggcatggaagacacgcgggaggggggccgccaacgatagtacacaattcactgtggccggaaggatggttaaaaagggcctggcaagccctaccgctataacgcctgtggcctcccccatctgcggcaaaactagaggcactacgccagtgagtaagcctctggaagatatagaagcccggccagatatgcaactagagagtgacctcaagttagatcggctagagacatttctgaggcgattaaataataaagtaggtgggatgcacgagactgtgctcactgtcaccggcaagtccgtcaaagaggttatgaaacctgatgacgatgagacctttgcgaagttctacaggagcgtggactacaacatgcctcgatcaccggttgaaatggacgaagatttcgatgttattttcgacccgtacgctccgaaactcactagttccgtggccgaacacaagagagctgtgaggccaaaaagacgggttcaggcttccaaaaacccactgaagatgctcgccgcacgagaggatctgttgcaagagtatactgaacagcgcctgaacgtcgcattcatggaaagtaagcgcatgaaggtcgagaagatgagctcaaactctaacttcagtgaagttacgctggcgggactggcctcaaaagaaaacttttcgaacgtgtctctacggagtgtgaatcttacagagcagaactccaataatagtgctgtgccttacaagcgtctcatgttgttgcaaatcaagggccgccggcacgttcagaccagactggtcgaaccccgtgctagtgctctgaatagtggagattgcttcctgctcctgagtccacactgctgctttttatgggtcggcgagtttgcaaacgtgattgaaaaagctaaagccagcgaactagccacactcatacaaacgaaacgcgagctcggatgcagggccacctacatacaaaccattgaggagggcataaatacacatacacatgcagcgaaagatttctggaagttattgggtggacagacctcttaccagagtgccggcgatcctaaggaagacgaactttacgaagcagctatcatagagaccaactgcatctatcgtcttatggacgacaaactggtccctgacgacgactattgggggaagattcccaagtgcagcttgcttcaaccaaaggaagtgctcgtgttcgactttggatctgaggtctacgtgtggcatgggaaggaggtgacactcgcccagcgtaagatcgccttccagctggccaaacatctgtggaacggcaccttcgactacgagaattgtgatatcaaccccctggaccccggagagtgcaacccactgataccaagaaagggacagggacgtcccgattgggctatctttggacggcttaccgaacataatgagactatcctattcaaagagaaatttcttgactggacggaactaaaacgctctaacgaaaaaaatcctggcgaactagcacagcacaaggaggacccacggaccgacgtgaaggcatacgacgttactcgcatggtatccatgccccagacaacggctggtaccatcctggacggcgttaacgtgggccgtggctacggcttggtggagggccatgaccgtaggcaatttgaaatcacttctgtatctgtcgacgtttggcacattctggagtttgattactcacgcttgccaaagcagagcattggacaattccacgaaggggatgcctacgtggtgaaatggaaattcatggtctctaccgcagtgggatcaaggcaaaagggggaacactctgttagggcagcaggcaaggaaaagtgtgtctacttcttttggcaaggcagacattcgaccgtgagtgaaaaaggcacttctgccttaatgacggtggaactggatgaggagcggggggctcaggtccaggtgttacaggggaaagaacccccatgcttccttcagtgttttcagggtgggatggtggtacacagcggtagacgtgaggaagaagaggagaacgtccagagtgagtggcgactgtattgtgtgaggggagaggtgcccgtcgagggaaacctcctggaagtggcttgccactgctctagcctgagatcacgtacttccatggtcgttcttaacgtgaataaggcgctgatttacctgtggcacggatgcaaagcgcaggcacacacaaaggaggtaggccgcacagcagccaataagatcaaggagcagtgccctcttgaggccggactgcacagtagtagtaaagtgactatccacgagtgtgacgaaggcagcgagcccctcgggttctgggacgccctgggcagacgggacagaaaagcctatgactgtatgctacaggatcccgggagcttcaatttcgccccccggttattcatcctgagctcttccagtggagacttcgcagcaaccgaattcgtatacccagcaagagcaccctctgtcgtatcttctatgccgtttctgcaggaggatttgtacagcgcgcctcaaccagcgcttttcttggtggacaaccaccacgaagtctacttatggcaaggatggtggcctatagaaaacaagatcacgggatccgctcggattagatgggcatcagatcgaaagtctgctatggagacggtgctacaatactgcaaaggcaagaatttgaagaagccggcccctaaaagctacttgatacatgcaggcctggagccccttaccttcaccaatatgtttccatcatgggagcatagagaggacatcgctgaaatcactgaaatggacacagaagtttccaaccagattacactggtggaggacgttttagcaaagctctgcaagaccatataccctctggccgatttgctggctcgcccactgcccgaaggagtggatcctctgaagctggagatctacctgactgatgaagatttcgagtttgcgttggatatgacgagagacgagtacaacgcgttgccagcctggaagcaggtgaacctcaagaaagctaagggtcttttttag

SEQ ID NO: 135842 - DNA, 5367 bp, Artificial Sequence
  derived and/or modified sequence
atgaagaggaaggagagaattgcccggcggctggagggcattgaaaatgacacccagcccatcctgctgcagagctgcaccggcctggtgacccaccggctgctggaggaggacaccccccgctacatgagggccagtgaccctgccagcccccacatcggccgcagcaatgaggaggaggagaccagtgacagcagcctggagaagcagaccaggagcaagtactgcacagagaccagcggcgtgcatggagacagcccctacggcagcggcaccatggacacccacagcctggagagcaaggccgagagaattgcccgctacaaggccgagcggcggcggcagctggccgagaagtatggcctgaccctggaccctgaggccgacagcgagtacctgagccgctacaccaagagcaggaaggagccagatgctgtggagaagaggggcggcaagagtgacaagcaggaggagagcagcagagatgccagcagcctgtacccaggcacagagaccatgggcctgcggacctgtgccggggagagcaaggactatgccctgcacgtgggagatggcagcagtgaccctgaggtgctgctgaacatcgagaaccagaggcggggccaggagctgagcgccacccggcaggcccatgacctgagccctgctgctgagagcagcagcaccttctccttcagcggccgggacagcagcttcacagaggtgcccaggagccccaagcacgcccacagcagcagcctgcagcaggccgccagccgcagccccagctttggagacccccagctgagccctgaggcccggccccgctgcaccagccacagcgagacccccaccgtggatgatgaggagaaggtggatgagcgggccaagctgtctgtggccgccaagaggctgctcttccgggagatggagaagagctttgatgagcagaatgtgcccaagaggaggagcaggaacacagctgtggagcagaggctgcggcggctgcaggacaggagcctgacccagcccatcaccacagaggaggtggtgattgctgccaccctgcaggccagcgcccaccagaaggccctggccaaggaccagaccaatgaaggcaaggagctggccgagcagggcgagccagacagcagcaccctgagcctggccgagaagctggccctcttcaacaagctgagccagcctgtgtccaaggccatcagcaccaggaacagaattgacacccggcagaggaggatgaatgcccgctaccagacccagcctgtgaccctgggggaggtggagcaggtgcagagcggcaagctgatccccttctccccagctgtgaacacctctgtgtccacagtggccagcacagtggcccccatgtatgctggggacctgcggaccaagccacccctggaccacaatgccagcgccacagactacaagttcagcagcagcattgagaacagcgacagccctgtgcgcagcatcctgaagagccaggcctggcagcccctggtggagggctctgaaaataaaggcatgctgcgggagtatggagaaacagagagcaagagggccctgaccggccgggacagcggcatggagaagtatggcagctttgaggaggccgaggccagctaccccatcctgaacagagcccgggagggggacagccacaaggagagcaaatatgctgtgccccggcggggcagcctggagcgggccaacccccccatcacccacctgggagatgagcccaaggagttctccatggccaagatgaatgcccagggcaacctggacctgcgggaccggctgccctttgaggagaaggtggaggtggagaatgtgatgaagaggaagttcagcctgcgggctgctgagtttggagagcccaccagcgagcagacaggaacagctgctgggaagaccatcgcccagaccacagcccctgtgtcctggaagccccaggacagcagcgagcagccccaggagaagctgtgcaagaacccctgtgccatgtttgctgctggggagatcaagacccccactggagagggcctgctggacagccccagcaagaccatgagcatcaaggagcggctggccctgctgaagaagtctggagaggaggactggaggaaccggctgagccggcggcaggagggcggcaaggccccagccagcagcctgcacacccaggaggccggccgcagcctcatcaagaagagggtgacagagagccgggagagccagatgaccatcgaggagaggaagcagctgatcaccgtgcgggaggaggcctggaagacccggggcagaggagctgccaatgacagcacccagttcaccgtggccggccgcatggtgaagaagggcctggccagccccacagccatcacccctgtggccagccccatctgtgggaagacccggggcaccacccctgtgtccaagcccctggaggacatcgaggcccggccagacatgcagctggagagtgacctgaagctggaccggctggagaccttcctgcggcggctgaacaacaaggtgggcggcatgcatgaaacagtgctgactgtgacaggcaagtctgtgaaggaggtgatgaagccagatgatgatgagacctttgccaagttctacagatctgtggactacaacatgcccaggagccctgtggagatggatgaggactttgatgtgatctttgacccctatgcccccaagctgaccagctctgtggccgagcacaagagagctgtgcggcccaagagaagagtgcaggccagcaagaaccccctgaagatgctggccgcccgggaggacctgctgcaggagtacacagagcagaggctgaatgtggccttcatggagagcaagaggatgaaggtggagaagatgagcagcaacagcaacttcagcgaggtgaccctggccggcctggccagcaaggagaacttcagcaatgtgtccctgcggtctgtgaacctgacagagcagaacagcaacaacagcgctgtgccctacaagaggctgatgctgctgcagatcaagggcagaagacatgtgcagacccggctggtggagccccgggccagcgccctgaacagcggggactgcttcctgctgctgagcccccactgctgcttcctgtgggtgggggagtttgccaacgtgattgagaaggccaaggccagcgagctggccaccctcatccagaccaagcgggagctgggctgccgggccacctacatccagaccatcgaggagggcatcaacacccacacccatgctgccaaggacttctggaagctgctgggcggccagaccagctaccagagcgctggggaccccaaggaggatgagctgtatgaagctgccatcatcgagaccaactgcatctaccgcctgatggatgacaagctggtgcctgatgatgactactggggcaagatccccaagtgcagcctgctgcagcccaaggaggtgctggtgtttgattttggaagtgaggtgtatgtgtggcacggcaaggaggtgaccctggcccagaggaagatcgccttccagctggccaagcacctgtggaatggcacctttgattatgagaactgtgacatcaaccccctggaccctggagagtgcaaccccctcatccccaggaagggccagggccgcccagactgggccatcttcggccgcctgacagagcacaatgagaccatcctcttcaaggagaagttcctggactggacagagctgaagaggagcaatgagaagaaccctggagagctggcccagcacaaggaggaccccaggacagatgtgaaggcctatgatgtgaccaggatggtgtccatgccccagaccacagctggcaccatcctggatggagtgaatgtgggccggggctacggcctggtggagggccatgaccggcggcagtttgagatcacctctgtgtctgtggatgtgtggcacatcctggagtttgactacagccggctgcccaagcagagcatcggccagttccacgagggagatgcctacgtggtgaagtggaagttcatggtgtccacagctgtgggcagccggcagaagggggagcacagcgtgcgggccgccggcaaggagaagtgtgtgtacttcttctggcagggccgccacagcacagtgtctgagaagggcaccagcgccctgatgacagtggagctggatgaggagcggggggcccaggtgcaggtgctgcagggcaaggagcccccctgcttcctgcagtgcttccagggcggcatggtggtgcacagcggcagaagagaggaggaggaggagaatgtgcagagcgagtggaggctgtactgtgtgcggggggaggtgcctgtggagggcaacctgctggaggtggcctgccactgcagcagcctgcggagcaggacctccatggtggtgctgaatgtgaacaaggccctgatctacctgtggcacggctgcaaggcccaggcccacaccaaggaggtgggccgcacagctgccaacaagatcaaggagcagtgccccctggaggccggcctgcacagcagcagcaaggtgaccatccatgaatgtgatgagggcagcgagcccctgggcttctgggatgccctgggcagaagagacaggaaggcctatgactgcatgctgcaggaccccggcagcttcaactttgcccccaggctcttcatcctgagcagcagcagcggggactttgctgccacagaatttgtgtacccagcccgggcccccagcgtggtgtcctccatgcccttcctgcaggaggacctgtacagcgccccccagcctgccctcttcctggtggacaaccaccacgaggtgtacctgtggcagggctggtggcccatcgagaacaagatcactggaagtgcccgcatccgctgggccagtgacaggaagagcgccatggagaccgtgctgcagtactgcaagggcaagaacctgaagaagccagcccccaagagctacctgattcatgctggcctggagcccctgaccttcaccaacatgttccccagctgggagcaccgggaggacattgctgagatcacagagatggacacagaggtgagcaaccagatcaccctggtggaggatgtgctggccaagctgtgcaagaccatctaccccctggccgacctgctggcccggcccctgcctgagggcgtggaccccctgaagctggagatctacctgacagatgaagattttgaatttgccctggacatgaccagagatgagtacaatgccctgcctgcctggaagcaggtgaacctgaagaaggccaagggcctcttctag

SEQ ID NO: 135843 - DNA, 5367 bp, Artificial Sequence
  derived and/or modified sequence
atgaagcggaaggagcggatcgcccggcggctggagggcatcgagaatgacactcagccaatcttgctgcagagctgtaccgggcttgttactcacagactgctggaagaggacaccccaagatatatgcgggcaagtgatcctgccagccctcatatcggcaggtccaacgaggaggaggaaacttcagactcgtccttagaaaagcagacaagaagtaagtactgcacagaaacttcgggtgtgcatggcgatagcccctatggatcaggaacgatggatacccatagtctcgagtccaaagccgaacggattgcacgctacaaggcagaaagacggagacagctcgcggaaaaatatggcctcactttagatccagaggctgatagcgaatacctatcccgctataccaagtctcggaaagagccagacgcagtcgagaagcgtggggggaaatccgataagcaggaagagagctcccgcgacgcttcctcactttatcccggaaccgaaactatgggcctgagaacgtgtgctggggagagcaaggactacgctctgcacgtcggcgatggtagctctgatccagaggttctcttgaacatcgaaaaccagaggcgcggccaagagctctctgcgacgcggcaggctcatgatctgtcccccgcagctgaaagcagttctactttctcttttagcggcagagacagcagcttcaccgaggtacccaggtctccgaaacacgcccatagtagttccttacagcaagccgcaagtcggtctccatcattcggtgacccccagctgtcgccggaagcccgtcctaggtgcactagccatagtgaaacgccaacagttgacgacgaggagaaggtggacgagagggccaaattaagtgtggctgccaaaagattgcttttcagggagatggaaaagagtttcgacgagcagaacgtccctaagagacgcagtcggaataccgcggtggagcaaagattgagacgtctccaggaccggtctctcacccagcccattaccaccgaagaagttgtgatcgcagccaccctgcaggcaagcgctcaccaaaaggcactggcaaaggatcaaacaaatgagggcaaagagctcgccgaacagggagagcctgatagttcaacactttcactggcagaaaagctggctctgtttaacaaactctcacagccagtatctaaggctatctccacaaggaataggatagataccagacaaagacgcatgaatgcccgctatcaaacacagccagtgacgctcggcgaggtggagcaggtgcagagcgggaagctcatcccatttagtcctgctgtaaacacctctgtgagcaccgtggcgtcaactgtcgctccgatgtacgccggagatctccgcactaagcccccattagaccataatgcaagtgcaaccgattataaattttcatcttccattgagaactcagactcgcccgttcgcagcattcttaagagccaagcttggcagcccctggtggaaggctcagaaaataaaggcatgctcagggagtatggagagactgagagcaaaagagccctgactggccgggatagcggtatggaaaagtatgggtcattcgaagaggccgaggcctcttacccaatcttgaacagagctagagaaggggatagtcacaaagaaagcaagtatgcggttccacggaggggcagcctggagcgcgctaacccccccataacacatctgggagacgaacctaaggaatttagcatggccaagatgaatgctcaaggcaacctagacctgcgcgaccgactgccattcgaagaaaaagtggaggtcgagaacgtgatgaaaaggaaattttccttaagggccgcagagttcggtgaacccacaagcgagcaaaccggaacagcggccggcaaaaccattgcccagaccaccgccccagtttcctggaagccccaagattccagcgagcagccacaggaaaaactatgtaaaaacccgtgcgcaatgtttgccgccggcgagatcaagactccaacgggcgaggggttgttagacagtccctccaaaactatgagcatcaaagagcgacttgctctgctcaagaaatcaggagaggaggattggcgcaataggctgagcagacgacaggagggcgggaaagcgcccgcttcctcattacacactcaggaagccggacggagcctaataaagaagcgggtcaccgaatcccgcgagtctcagatgactatcgaggaaagaaagcagctgataactgtccgagaagaggcttggaagacgcgcggccggggagccgccaatgattcaactcagttcaccgtggcgggccgcatggttaagaaggggctggccagtcccacagcgatcacccccgttgcctctcccatctgcggtaaaacgagaggcacgaccccagtctctaagcccctcgaagatatcgaggctcgcccagacatgcagcttgagagtgacctgaagcttgataggctggagacctttctgcgaagactgaacaataaagtaggaggtatgcacgaaactgtgctcacagtgaccggaaagagcgtcaaagaggttatgaaacctgacgatgacgagacgttcgcaaaattttacaggagcgtagattataatatgccacggtccccagtagagatggacgaagacttcgatgtcatcttcgacccgtatgcacccaagttgacttccagcgtagctgagcacaaaagggcagtgcgtcctaagaggagggtacaagcttctaagaaccccctcaaaatgctggctgccagagaagatctgctgcaggaatacaccgagcagaggctgaacgtagcattcatggagtctaaacgcatgaaggtcgagaagatgtcttcaaacagcaactttagcgaggttacactggcaggcctcgcctccaaggaaaatttctccaatgtatccctgagatctgtcaatttgaccgaacaaaactccaacaacagtgccgttccttataaacgtctgatgttactacagattaaggggagacgacacgtccagaccaggctggtcgaacctcgggcatcagccctgaattccggcgattgctttctcctgctctccccacactgttgcttcctgtgggtcggggagtttgctaacgtcatcgaaaaggctaaggctagcgagctggcaaccctgattcaaacaaaaagggagctcggctgccgggcaacatacatccagactattgaggagggcattaacacacacacccatgccgcaaaagatttttggaaactgttaggcggtcaaacctcttaccagagcgctggggacccaaaggaggacgagctgtatgaggcagccattatcgaaactaattgcatctaccggctgatggacgataaactggtacctgatgacgattactggggtaagattcctaagtgctctctgctgcagccgaaagaagtgttggttttcgatttcgggagtgaggtgtacgtgtggcacggtaaggaggtgactctagctcaacgtaaaatcgcattccaattagctaaacacttatggaacggaaccttcgattacgagaattgcgacataaatccccttgaccctggtgagtgcaatccgctgattcccagaaaggggcaagggcgacctgattgggctatctttggtaggctgaccgagcacaacgagaccatcttgtttaaagagaagtttcttgactggacagagctgaagagatctaacgagaagaaccccggggagctggcacagcacaaggaggatccccgcacagatgtgaaggcctatgacgtcacacgcatggtttccatgccacaaaccacagccggtaccatactggacggagtgaatgttgggcgggggtacggcctcgtagagggccatgatagaaggcagtttgagattacgagcgtgtctgtggacgtgtggcacatcctggagtttgactatagccggctgccgaagcagtctatcggccagtttcacgagggggatgcctatgtggtgaagtggaagttcatggtgtcaacagccgtggggtcgaggcagaagggcgaacacagtgttagagccgccggtaaggagaagtgcgtctacttcttttggcaaggcagacatagcactgtatctgagaagggcacaagcgccctgatgacggtagaactggatgaggagcgtggagcgcaagtgcaggtgctgcagggaaaggaaccaccctgtttcctacagtgcttccagggaggtatggtcgtgcattcagggcggagggaggaagaggaggagaatgtccaatctgagtggaggttatattgtgtccggggggaagtgcccgtggagggaaatcttctggaagtggcctgccactgctcttcgctcaggagccgcacgagcatggtggtcttgaacgtcaataaggctcttatatatctgtggcacggatgtaaggcacaggcccacaccaaggaggtgggccgcaccgccgctaacaagatcaaagaacagtgccctctcgaagcaggtttgcacagtagctcgaaagttaccattcacgaatgcgacgaaggctcagaacctttgggtttttgggatgccttgggcaggagagatagaaaggcttacgattgcatgttgcaggacccggggagctttaacttcgccccccgcttgtttatcctgagctcttcctctggcgacttcgcagctaccgagtttgtatatccagctcgcgctccatctgtggtgagctccatgccttttcttcaggaggacctgtacagcgcccctcagcccgccctcttcctagtggataatcaccatgaggtctatctctggcaagggtggtggccgatcgagaacaaaatcaccggcagcgcacggatccggtgggcctccgaccgaaagtccgctatggagactgtcctccaatattgcaagggtaagaacctgaagaaacctgctccgaaatcctatcttattcacgcggggctggagcccctgacctttactaacatgtttcccagttgggaacaccgagaagacatcgccgagatcaccgaaatggacaccgaagtgtcgaaccagatcaccctcgtggaggatgtcctggcaaagctgtgtaaaactatttatcccctagcggacctcctggcccgaccactgcccgaaggagtcgatcctctcaagctggaaatatacttgaccgatgaagactttgaattcgcccttgatatgacgcgcgacgaatacaatgccctgccggcctggaagcaggttaatctgaaaaaagccaagggtctgttttag

SEQ ID NO: 135844 - DNA, 5367 bp, Artificial Sequence
  derived and/or modified sequence
atgaagcgaaaggagcggattgccaggcgtctcgaaggcatcgagaacgatacacaacccatccttctccagtcttgcaccggcctagtgacccacagactactagaggaggatacacctaggtacatgcgtgcaagtgatcccgctagtccacacatcgggcgttcaaacgaggaggaggagacgtctgattcaagtttggagaagcagacccgctccaagtattgtactgagacatctggtgtgcatggtgactcaccctatgggagcggaaccatggatactcactccctcgagagtaaggccgaacgaatagccaggtacaaggcagaaaggcggcgtcaacttgccgagaagtatggtctgaccctggatcccgaagcagacagtgagtatctatctcggtacactaaaagcagaaaggaacctgatgccgtggagaaacggggaggaaagtccgataaacaggaagagagcagccgcgatgcatccagtctgtatccaggcactgagacgatggggcttcgcacctgcgcaggagagtcaaaggactacgcgctgcatgtgggggacggttcttcagaccccgaggtattattgaacattgaaaaccagcgacggggacaggaactcagtgcaaccagacaggctcatgatctctcgccagcagcagagagcagttcaacattctcctttagcggcagagacagtagtttcactgaggttcccaggagtcccaagcatgcccacagctctagcctgcaacaggcggcatcccgatctccaagctttggagatccacagcttagtcccgaagcgcgtcccagatgtaccagccattccgagacacccaccgtggacgatgaggaaaaagtggatgagcgcgcaaaattgagtgtggccgcaaaaaggctcctgttccgggagatggagaagtctttcgacgagcaaaatgtacccaaaaggagatctaggaataccgcagtcgagcagaggttgcggagattgcaggatcgttctctgactcaaccgattaccacagaggaagttgtcatcgccgcaacactgcaggcgtccgcacaccagaaggccttggctaaagaccagaccaatgagggcaaggagcttgccgagcagggggaacctgatagttccaccctgagcctcgccgagaagctcgctctgttcaacaaactgtcccagcctgtctctaaggccatttcaactcgcaacagaatagatactcggcagcgcagaatgaatgcaaggtaccagacacagcccgtcacgttgggagaggtcgaacaggtccaaagtggcaagctgatcccattctcccctgctgtgaacacatcagtgtcgactgtggctagcactgtcgcccctatgtacgctggcgacctcagaaccaagccacctctcgatcacaacgctagcgcaacagattacaagttctctagtagcatcgagaatagtgatagcccagtcagatctatactcaagtcccaagcgtggcagcccctagtggaaggctccgagaacaaaggtatgttgagggaatacggggagactgaatccaaacgagccctcaccggccgtgactcaggcatggagaaatatggcagcttcgaggaggccgaagccagctaccccattctgaatcgggctagggagggggattctcacaaggagagtaagtatgccgtgccacgtcgcggtagcttggaacgagcgaacccccctatcacacatcttggagacgagcctaaggagttttccatggctaaaatgaatgcccagggaaatctcgatctgcgggatagactgcctttcgaggagaaggtggaagtcgagaacgtcatgaagcggaagttctctctccgggctgccgagtttggcgagcctacatctgaacaaactggcactgccgctggcaagaccattgcacaaaccaccgccccagtatcctggaagccccaggactcttcagagcagcctcaggaaaagttgtgtaagaatccctgcgccatgttcgcggctggggagatcaaaacacctactggtgagggcctgctcgactccccatcaaagacaatgtcaatcaaggaacgtcttgctctattgaagaagtctggagaggaggactggagaaatcgcctgtctagacgccaggagggagggaaggcacccgcatcctcactgcatactcaggaggcaggcaggtccctgatcaagaagagagttaccgaaagcagagaatcacaaatgacaatcgaagagcggaaacagctgattactgtccgtgaggaggcgtggaaaactaggggcagaggtgctgcaaacgactccactcaattcactgtcgctggcaggatggttaaaaaaggactcgcaagtccaaccgccatcacacccgttgcctcgcctatatgcggtaagaccaggggaaccacaccggtttcaaagcctcttgaagatattgaggcgcgtcccgacatgcaactggaaagtgacctgaaactggatcggctggaaactttccttcgacgacttaacaacaaggtgggaggtatgcatgagactgtcctgactgtcaccggtaagtcagtcaaagaagtgatgaagcccgatgacgatgagaccttcgcgaaattttatcgctccgtcgactacaatatgcctagatcccccgttgagatggatgaggattttgacgtaatattcgacccatacgcccctaagctgacctcaagcgtcgccgaacataagcgggcagtacggccaaaaaggcgagtgcaggccagtaaaaacccgctcaagatgttagctgcccgagaggatctgctgcaggaatatactgagcagaggctgaacgtggccttcatggaatccaagagaatgaaggtcgaaaagatgtcatcaaacagcaattttagcgaggtcacactggctggcctcgcaagcaaggaaaatttttcaaatgttagcctgcgtagtgtcaacctaaccgaacagaacagtaacaactccgccgtcccatacaaaaggctgatgctgctccagattaaaggacggaggcatgtccaaactcggctggtggaaccacgcgcttccgcactcaacagcggcgattgtttcttgttgctaagcccccactgttgttttctgtgggtcggagaatttgcgaacgtaatcgagaaggccaaggccagcgagcttgcaacgctcattcagactaagcgggagcttggttgcagagccacctatattcagactatcgaagaaggaattaatacacacacacacgctgcgaaggatttctggaagctcttagggggacaaactagttatcagagcgccggagatcctaaggaagacgaattgtatgaagcagctatcatcgagaccaattgcatctatagattaatggacgacaaactcgtccccgatgacgattattggggcaaaattccaaagtgtagccttcttcagccaaaggaggtgttggtctttgattttgggagtgaggtatatgtgtggcacggaaaagaagtgaccttggcccagcggaagatcgcattccagctcgccaaacacctctggaacggcacctttgattacgagaattgtgatatcaatcctctcgatcctggcgagtgcaaccccctgatcccccgaaaaggtcagggtaggccggactgggccattttcggcagactgacagaacacaatgagacaatccttttcaaagagaagttcttggactggacagaattaaagagaagtaacgaaaaaaacccaggagagcttgcacaacacaaagaagaccctcgcaccgacgtaaaggcctatgacgtgacacggatggtgtccatgccgcagacaacagcaggcactatcctcgacggagtcaacgtgggcagaggttacggactcgtggaggggcatgaccgtcggcagtttgagattaccagtgtgtctgtagacgtctggcacatcctggagttcgattattctaggctgcctaagcagagcatcgggcaattccatgaaggagatgcatacgtggtaaagtggaagtttatggtcagcaccgcggtgggttcaagacagaaaggggaacattctgtgagggccgctgggaaggagaaatgcgtctactttttctggcagggcagacatagtactgtttccgaaaagggaacctcagcactcatgaccgtggagctggacgaggagaggggtgcacaggtccaggtactccagggcaaagagcccccatgcttcctccagtgttttcaggggggaatggtggtgcatagtggcagacgagaggaagaggaggaaaacgtgcaatcagagtggcgactgtactgcgtccgcggagaggtacccgtggaggggaacctgttggaggtggcctgtcactgctcttccctgcgatcaagaacttctatggtggtgcttaatgtgaacaaagcattgatctatctgtggcatgggtgtaaagcccaagctcacactaaggaagtaggaagaactgcggctaataagatcaaggaacagtgccccctggaggcaggactgcactcaagctctaaggttactatacacgaatgcgacgaaggaagcgagccattgggattttgggatgctctgggacgtcgcgatcgaaaagcctatgattgcatgctgcaggacccaggttcctttaattttgctcccaggctgttcattctgtctagctcatctggggatttcgccgcaacggaatttgtctaccccgcacgcgctccttcagtagtgtcctcgatgccgtttctgcaagaagacctgtattctgcccctcagcctgctttgtttttagttgacaatcaccacgaggtctatttatggcaggggtggtggccaattgagaacaaaatcaccggatccgctaggatccgttgggcttcagacagaaagagtgctatggaaacggtgctgcaatattgcaaggggaagaatctgaagaaacccgcacccaaatcctatctaattcacgccggactcgagccactgaccttcaccaatatgttcccgtcatgggagcatcgcgaggacatagccgagatcaccgaaatggacaccgaagtatcaaatcaaattactttggttgaagatgtattggcgaaactgtgcaaaactatttatccgctggccgacctgctggctaggcccctgccggaaggtgttgacccactaaagctcgaaatttatctgacagacgaagatttcgaatttgccctggatatgactcgcgatgaatacaatgcacttcctgcttggaaacaagttaacttgaaaaaggctaagggcctcttctag

SEQ ID NO: 135845 - DNA, 6729 bp, Artificial Sequence
  derived and/or modified sequence
ctgtcggcgggaagcggcgatcctgccaccgggaggtgtggaagagccgggtagattctggctacattggagattggttgctttctaaaactgaaggagaagcccatgaagagatggtggattctcactgagttttgactagcggaagaaaagagagagttcaagtggatggccttgaggacttgaaaagctgagatatgatgattttgaagtcatttcacatcgaagccatgatttaaatatcggcgttaagatttcaacaagaaaaacttaagcttccttggattcccacgtcaaaggaaagtttcaagctttcagaaggagttctcactcgaagataaagaacagctcgctaaccacgaaagaggaatcgatgctcagcttttagttgcacttcctaaagttgcagaattaagacaaatctttgaaccaaagaagaaagaattcttagaaatgaaaagaaaagaaagaattgccaggcgcctggaagggattgaaaatgacactcagcccatcctcttgcagagctgcacaggattggtgactcaccgcctgctggaggaagacacccctcgatacatgagagccagcgaccctgccagcccccacatcggccgatcaaatgaagaggaggaaacttctgattcttctctagaaaagcaaactcgatccaaatactgcacagaaacctccggtgtccacggtgactcaccctatggttcgggtaccatggacacccacagtctggagtccaaagccgaaagaattgcaaggtacaaagcagaaagaaggcgacagctggcagagaagtatgggctgactctggatcccgaggccgactccgagtatttatcccgctataccaagtccaggaaggagcctgatgctgtcgagaagcggggaggaaaaagtgacaaacaggaagagtcaagcagagatgctagttctctgtaccccgggaccgagacgatggggctcaggacctgtgccggtgaatccaaggactatgccctccatgtgggtgacggctcttccgacccggaggtgctgctgaacatagaaaaccaaagacgaggtcaagagctgagtgccacccggcaggcccatgacctgtccccagcagccgagagttcctcgaccttctctttctctgggcgagactcctccttcactgaagtgccacggtcccccaagcacgcccacagctcctccctgcagcaggcagcctcccggagcccctcctttggtgacccacagctatcccctgaggcccgacccaggtgcacttcacattcagaaacgccaactgtcgatgatgaagaaaaggtggatgaacgagccaagctgagcgtcgccgccaagaggttgcttttcagggagatggaaaaatcttttgatgaacaaaatgttccaaagcgacgctcaagaaacacagctgtggagcagaggctacgccgtctgcaggacaggtccctcacccagcccatcaccactgaagaggtggtcatcgcagccacattgcaggcctctgctcaccaaaaggccttagccaaggaccagacaaatgagggcaaagagcttgctgagcaaggagaacctgattcctccactctaagcttggccgaaaagttggccttgtttaacaaattgtcccagccagtctcaaaagcgatttctacccggaacagaatagacacgagacagaggagaatgaacgctcgctatcaaactcagccagtcacactgggagaggtggagcaggtgcagagtggaaagctcattcctttctcacctgccgtgaacacatcagtgtctaccgtagcatccacggttgctccaatgtatgccggagatcttcgcacaaagccacctcttgaccacaatgcaagtgccactgactataagttttcttcttcaatagaaaattcggactctccagttagaagcattctgaaatcgcaagcttggcagcctttggtagagggtagcgagaacaagggaatgttgagagaatatggagagacagaaagcaagagagctttgacaggtcgagacagtgggatggagaagtatgggtcctttgaggaagcagaagcatcctaccccatcctgaaccgagccagggaaggagacagccataaggaatctaaatatgctgttcccagaagaggaagcctggaacgggcgaaccctcccatcacccacctcggggatgaaccgaaggaattttccatggctaaaatgaatgcacaaggaaacttggacttgagggacaggctgccctttgaagagaaggtggaggtggagaatgttatgaaaaggaagttttcactaagagcggcagagttcggggagcccacttccgagcagacggggacagctgctgggaaaactattgctcaaaccacagcccccgtgtcctggaagccccaggattcttcggaacagccacaggagaagctctgcaagaatccatgtgcgatgtttgctgctggagagatcaaaacgccgacaggggagggccttcttgactcacccagcaaaaccatgtctattaaagaaagattggcactgttgaagaaaagcggggaggaagattggagaaacagactcagcaggaggcaggagggcggcaaggcgccggccagcagcctgcacacccaggaagcagggcggtccctcatcaagaagcgggtcacagaaagtcgagagagccaaatgacgattgaggagaggaagcagctcatcactgtgagagaggaggcctggaagacgagaggcagaggagcggccaacgactcgacccagttcactgtggctggcaggatggtgaagaaaggtttggcgtcacctactgccataaccccagtagcctcacccatttgcggtaaaacaagaggcaccacacccgtttccaaacccctggaagatatcgaagccagaccagatatgcagttagaatcggacctgaagttggacaggctggaaacctttctaagaaggctgaataacaaagttggcgggatgcacgaaacggtgctcactgtcaccggcaaatctgtgaaggaggtgatgaagccagatgatgatgaaacctttgccaaattttaccgcagcgtggattataatatgccaagaagtcctgtggagatggatgaggacttcgatgtcattttcgatccttatgcacccaaattgacgtcttccgtggccgagcacaagcgggcagttaggcccaagcgccgggttcaggcctccaaaaaccccctgaaaatgctggcggcaagagaagatctccttcaggaatacactgagcagagattaaacgttgccttcatggagtcaaagcggatgaaagtagaaaagatgtcttccaactccaacttctcagaagtcaccctggcgggtttagccagtaaagaaaacttcagcaacgtcagcctgcggagcgtcaacctgacggaacagaactctaacaacagcgccgtgccctacaagaggctgatgctgttgcagattaaaggaagaagacatgtgcagaccaggctggtggaacctcgagcttcggcgctcaacagtggggactgcttcctcctgctctctccccactgctgcttcctgtgggtaggagagtttgcaaacgtcatagaaaaggcgaaggcctcagaacttgcaactttaattcagacaaagagggaacttggttgtagagctacttatatccaaaccattgaagaaggaattaatacacacactcatgcagccaaagacttctggaagcttctgggtggccaaaccagttaccaatctgctggagacccaaaagaagatgaactctatgaagcagccataatagaaactaactgcatttaccgtctcatggatgacaaacttgttcctgatgacgactactgggggaaaattccgaagtgctcccttctgcaacccaaagaggtactggtgtttgattttggtagtgaagtttacgtatggcatgggaaagaagtcacattagcacaacgaaaaatagcatttcagctggcaaagcacttatggaatggaacctttgactatgagaactgtgacatcaatcccctggatcctggagaatgcaatccgcttatccccagaaaaggacaggggcggcccgactgggcgatatttgggagacttactgaacacaatgagacgattttgttcaaagagaagtttctggattggacggaactgaagagatcgaatgagaagaaccccggggaacttgcccagcacaaggaagaccccaggactgatgtcaaggcatacgatgtgacacggatggtgtccatgccccagacgacagcaggcaccatcctggacggagtgaacgtcggccgtggctatggcctggtggaaggacacgacaggaggcagtttgagatcaccagcgtttccgtggatgtctggcacatcctggaattcgactatagcaggctccccaaacaaagcatcgggcagttccatgagggggatgcctatgtggtcaagtggaagttcatggtgagcacggcagtgggaagtcgccagaagggagagcactcggtgagggcagccggcaaagagaagtgcgtctacttcttctggcaaggccggcactccaccgtgagtgagaagggcacgtcggcgctgatgacggtggagctggacgaggaaaggggggcccaggtccaggttctccagggaaaggagcccccctgtttcctgcagtgtttccagggggggatggtggtgcactcggggaggcgggaagaggaagaagaaaatgtgcaaagtgagtggcggctgtactgcgtgcgtggagaggtgcccgtggaagggaatttgctggaagtggcctgtcactgtagcagcctgaggtccagaacttccatggtggtgcttaacgtcaacaaggccctcatctacctgtggcacggatgcaaagcccaggcccacacgaaggaggtcggaaggaccgctgcgaacaagatcaaggaacaatgtcccctggaagcaggactgcatagtagcagcaaagtcacaatacacgagtgtgatgaaggctccgagccactcggattctgggatgccttaggaaggagagacaggaaagcctacgattgcatgcttcaagatcctggaagttttaacttcgcgccccgcctgttcatcctcagcagctcctctggggattttgcagccacagagtttgtgtaccctgcccgagccccctctgtggtcagttccatgcccttcctgcaggaagatctgtacagcgcgccccagccagcacttttccttgttgacaatcaccacgaggtgtacctctggcaaggctggtggcccatcgagaacaagatcactggttccgcccgcatccgctgggcctccgaccggaagagtgcgatggagactgtgctccagtactgcaaaggaaaaaatctcaagaaaccagcccccaagtcttaccttatccacgctggtctggagcccctgacattcaccaatatgtttcccagctgggagcacagagaggacatcgctgagatcacagagatggacacggaagtttccaatcagatcaccctcgtggaagacgtcttagccaagctctgtaaaaccatttacccgctggccgacctcctggccaggccactcccggagggggtcgatcctctgaagcttgagatctatctcaccgacgaagacttcgagtttgcactagacatgacgagggatgaatacaacgccctgcccgcctggaagcaggtgaacctgaagaaagcaaaaggcctgttctgagtggggagacgccagaggagcctcacggtcacgtccaacaacaccactgcaccagggaaatggatatatatttttggactggtgtttttcacaaagtatttttcaatcagagttttcagaacctgacattgttaaagatactgcttgtcccggagttgtgtattttgtaaatgttcaagggaactgtttggaaacttctttccaccattcaggaggttatcagaattaataaaagtatctgttatgtgcacttaagccgcagctgctatagatagcactgccttcttgttccagctaggcaatgccttttttttttttttttgaagcagttctctttataaagtgttattttgatagtttgtggattctaaaatatatatatatttatataaacaccatataagtcaaatatgtatttaacaaagcaatatgtattcattcactttcaagatttgttttggtgtcaaaataacatgaaaaggtagatggagttgcttctgttgaattagctctgccaccaatatgtatcttcatacacgtttggaaatgtttcctgcagcattaggtatgacttgttctgagtactgcttccggtgctaaaatgaacaaagaatttgtacttaatggcatggactctggagaatctatgcgaatcaacctttctaccttaatatctccccaaaaatgtatagtgccttgtttttatgtacagtttatatacagaaaagtttgctctgcatttttgatgatggtttggaacattatctacaattttactctcaaatagtcaaaataaaaacatctcaatttctaataccggttgtaaacagtacacatgtcattttgtgatataggactcccaaataaaagtatcagaataaacacaacaattaactggttcacattgaa

SEQ ID NO: 135846 - protein, 114 aa, Artificial Sequence
  derived and/or modified sequence
MRLLILALLGICSLTAYIVEGVGSEVSHRRTCVSLTTQRLPVSRIKTYTITEGSLRAVIFITKRGLKVCADPQATWVRDVVRSMDRKSNTRNNMIQTKPTGTQQSTNTAVTLTG

SEQ ID NO: 135847 - DNA, 345 bp, Artificial Sequence
  derived and/or modified sequence
atgagactgctgatacttgccttactgggtatctgttccctgactgcctatatcgttgagggggtaggtagcgaggtaagtcatcgacgaacgtgcgttagcctcactacacagaggttgccagtctcacggatcaagacatacaccatcacagagggaagcctcagggctgtaatctttattaccaagcgggggcttaaggtgtgcgctgatccccaggccacgtgggtgagagacgtggttagaagtatggatcgtaaatctaacacaaggaataatatgatccagactaaacctaccggcacgcaacaatcgacaaatacagcagtgacgctcaccggatag

SEQ ID NO: 135848 - DNA, 345 bp, Artificial Sequence
  derived and/or modified sequence
atgaggctgctgatcctggccctgctgggcatctgcagcctgacagcctacatcgtggagggcgtgggcagcgaggtgagccacaggaggacctgtgtgtccctgaccacccagaggctgcctgtgagccgcatcaagacctacaccatcacagagggcagcctgcgggctgtgatcttcatcaccaagaggggcctgaaggtgtgtgccgacccccaggccacctgggtgagagatgtggtgcgctccatggacaggaagagcaacaccaggaacaacatgatccagaccaagcccaccggcacccagcagagcaccaacacagctgtgaccctgactggatag

SEQ ID NO: 135849 - DNA, 345 bp, Artificial Sequence
  derived and/or modified sequence
atgcggctgctgatcctggccctgctgggcatctgcagcctgaccgcctacattgtggagggtgtcggatccgaagtgtcccaccgacgtacgtgcgtgagcctgactacgcagagactgcctgtgagccgaatcaagacgtacaccatcacagagggatctctgcgagcagtgatattcatcactaaacgtggattgaaagtgtgtgcagatccgcaggccacgtgggtgcgggacgtggtgagatcaatggaccgcaaatccaatactaggaataatatgattcagacgaaaccaacgggcacccagcagagcacgaacacagccgtgacactcacaggttag

SEQ ID NO: 135850 - DNA, 345 bp, Artificial Sequence
  derived and/or modified sequence
atgcgcctcttaatcctggccctgcttggcatctgctcattgacagcctatattgtcgaaggggtgggctcagaggtgtctcacaggcgtacgtgcgtaagtcttacaactcagcggcttcctgtatccaggatcaaaacctacacaattacagagggaagtctgcgggctgtaatatttattacaaagcgcggtctgaaggtgtgcgccgaccctcaagcgacttgggttcgtgacgttgtccgatctatggatcgtaagtcgaacactcggaataatatgatccagactaagccaacaggtacgcagcaaagcactaatacagcagtaaccctgacaggatag

SEQ ID NO: 135851 - DNA, 565 bp, Artificial Sequence
  derived and/or modified sequence
actctccctgcacagctcagcgggacctcagccatgagacttctcatcctggccctccttggcatctgctctctcactgcatacattgtggaaggtgtagggagtgaagtctcacataggaggacctgtgtgagcctcactacccagcgactgccagttagcagaatcaagacctacaccatcacggaaggctccttgagagcagtaatttttattaccaaacgtggcctaaaagtctgtgctgatccacaagccacgtgggtgagagacgtggtcaggagcatggacaggaaatccaacaccagaaataacatgatccagaccaagccaacaggaacccagcaatcgaccaatacagctgtgaccctgactggctagtagtctctggcaccctgtccgtctccagccagccagctcatttcactttacaccctcatggactgagattatactcaccttttatgaaagcactgcatgaataaaattattcctttgtatttttacttttaaatgtcttctgtattcacttatatgttctaattaataaattatttattattaagaa

SEQ ID NO: 135852 - DNA, 345 bp, Artificial Sequence
  derived and/or modified sequence
atgagactgctgatcctggccctgctgggcatctgcagcctgaccgcctacatcgtggagggcgtgggcagcgaggtgagccacagaagaacctgcgtgagcctgaccacccagagactgcccgtgagcagaatcaagacctacaccatcaccgagggcagcctgagagccgtgatcttcatcaccaagagaggcctgaaggtgtgcgccgacccccaggccacctgggtgagagacgtggtgagaagcatggacagaaagagcaacaccagaaacaacatgatccagaccaagcccaccggcacccagcagagcaccaacaccgccgtgaccctgaccggctag

SEQ ID NO: 135853 - DNA, 324 bp, Artificial Sequence
  derived and/or modified sequence
atgacaggccgcatggccaccctggagaagagccacagcagcgcctgctggaggaagaggagcagcaggacctgtgtggagccagacaggacccaggatgccatccacgagccccggggcctgagccgcagccacacagtgctgcggcaccgccactttgtgttcctgcccctgagcagcggggcccaccccagcgtgccccccaggaggaagaactgtgccatgaagaatggcaagctgctgcggagctgcagctctgtgcggcgggctgctgacaagctggactggggccgcttcttcctgcaggacctgcagagcgtgtag

SEQ ID NO: 135854 - protein, 313 aa, Artificial Sequence
  derived and/or modified sequence
MLLLADMDVVNQLVAGGQFRVVKEPLGFVKVLQWVFAIFAFATCGSYSGELQLSVDCANKTESDLSIEVEFEYPFRLHQVYFDAPTCRGGTTKVFLVGDYSSSAEFFVTVAVFAFLYSMGALATYIFLQNKYRENNKGPMLDFLATAVFAFMWLVSSSAWAKGLSDVKMATDPENIIKEMPVCRQTGNTCKELRDPVTSGLNTSVVFGFLNLVLWVGNLWFVFKETGWAAPFLRAPPGAPEKQPAPGDAYGDAGYGQGPGGYGPQDSYGPQGGYQPDYGQPAGSGGSGYGPQGDYGQQGYGPQGAPTSFSNQM

SEQ ID NO: 135855 - protein, 195 aa, Artificial Sequence
  derived and/or modified sequence
MGALATYIFLQNKYRENNKGPMLDFLATAVFAFMWLVSSSAWAKGLSDVKMATDPENIIKEMPVCRQTGNTCKELRDPVTSGLNTSVVFGFLNLVLWVGNLWFVFKETGWAAPFLRAPPGAPEKQPAPGDAYGDAGYGQGPGGYGPQDSYGPQGGYQPDYGQPAGSGGSGYGPQGDYGQQGYGPQGAPTSFSNQM

SEQ ID NO: 135856 - DNA, 942 bp, Artificial Sequence
  derived and/or modified sequence
atgctgctgctggccgacatggacgtggtgaaccagctggtggccggcggccagttcagagtggtgaaggagcccctgggcttcgtgaaggtgctgcagtgggtgttcgccatcttcgccttcgccacctgcggcagctacagcggcgagctgcagctgagcgtggactgcgccaacaagaccgagagcgacctgagcatcgaggtggagttcgagtaccccttcagactgcaccaggtgtacttcgacgcccccacctgcagaggcggcaccaccaaggtgttcctggtgggcgactacagcagcagcgccgagttcttcgtgaccgtggccgtgttcgccttcctgtacagcatgggcgccctggccacctacatcttcctgcagaacaagtacagagagaacaacaagggccccatgctggacttcctggccaccgccgtgttcgccttcatgtggctggtgagcagcagcgcctgggccaagggcctgagcgacgtgaagatggccaccgaccccgagaacatcatcaaggagatgcccgtgtgcagacagaccggcaacacctgcaaggagctgagagaccccgtgaccagcggcctgaacaccagcgtggtgttcggcttcctgaacctggtgctgtgggtgggcaacctgtggttcgtgttcaaggagaccggctgggccgcccccttcctgagagccccccccggcgcccccgagaagcagcccgcccccggcgacgcctacggcgacgccggctacggccagggccccggcggctacggcccccaggacagctacggcccccagggcggctaccagcccgactacggccagcccgccggcagcggcggcagcggctacggcccccagggcgactacggccagcagggctacggcccccagggcgcccccaccagcttcagcaaccagatgtag

SEQ ID NO: 135857 - DNA, 942 bp, Artificial Sequence
  derived and/or modified sequence
atgttactgcttgccgatatggacgttgtcaaccagctggtcgcggggggtcagtttagggtggtgaaggaacccctggggtttgtgaaagtgcttcagtgggtgttcgcgatctttgccttcgctacatgcggatcctacagcggggaattacagttaagtgtagactgtgccaacaagactgagagcgacttgagtattgaggtggagtttgagtacccattccgtctgcatcaggtttactttgacgcccccacgtgtcggggggggacaacaaaagttttcttagttggcgactacagcagtagcgccgaattcttcgttacagtcgctgttttcgctttcctttatagcatgggggcactcgcaacatacatcttccttcagaacaagtatagggaaaataacaagggacctatgctggatttcctggcaacagcggtgttcgccttcatgtggctggtctcatctagcgcctgggccaagggactgtccgacgttaagatggccactgatcctgagaacatcattaaagagatgcccgtatgccggcagacagggaacacttgcaaggagctgagggaccccgttacctccgggttgaatacctctgtggtgttcggattcctgaacttggtactttgggtgggcaacctttggtttgtgtttaaggagacgggctgggcagccccttttctgagggcccctcccggcgcgcccgaaaagcagcccgctccgggagatgcctacggagacgcagggtatggtcagggccccgggggctacggcccacaggactcttatgggccccagggggggtaccaacctgactacggacagccggcagggtctggaggctctggatacggcccccagggcgactatggacagcagggatatggcccgcagggcgccccaacaagtttctctaaccagatgtag

SEQ ID NO: 135858 - DNA, 942 bp, Artificial Sequence
  derived and/or modified sequence
atgctgctgctggccgacatggatgtggtgaaccagctggtggccggcggccagttccgggtggtgaaggagcccctgggctttgtgaaggtgctgcagtgggtgtttgccatctttgcctttgccacctgtggcagctacagcggggagctgcagctgtctgtggactgtgccaacaagacagaaagtgacctgagcattgaggtggagtttgagtaccccttccggctgcaccaggtgtactttgatgcccccacctgccggggcggcaccaccaaggtgttcctggtgggggactacagcagcagcgctgagttctttgtgacagtggccgtgtttgccttcctgtacagcatgggcgccctggccacctacatcttcctgcagaacaagtaccgggagaacaacaagggccccatgctggacttcctggccacagctgtgtttgccttcatgtggctggtgagcagcagcgcctgggccaagggcctgagtgatgtgaagatggccacagatcctgagaacatcatcaaggagatgcctgtgtgccggcagacaggcaacacctgcaaggagctgcgggaccctgtgaccagcggcctgaacacctctgtggtgtttggcttcctgaacctggtgctgtgggtgggcaacctgtggtttgtgttcaaggagaccggctgggccgcccccttcctgcgggcccctcctggggcccctgagaagcagcctgcccctggagatgcctatggagatgctggctacggccagggccctgggggctacggcccccaggacagctatggcccccagggcggctaccagcctgactatggccagcctgctggcagcggcggcagcggctacggcccccagggcgactatggccagcagggctacggcccccagggcgcccccaccagcttcagcaaccagatgtag

SEQ ID NO: 135859 - DNA, 942 bp, Artificial Sequence
  derived and/or modified sequence
atgctgctgctggccgacatggacgtggtgaaccagctggtggccgggggacagtttcgagtagtgaaggaacctttgggatttgtgaaggttcttcagtgggtatttgccatttttgccttcgcgacctgtgggtcatactccggtgagctccaactgtccgtggattgtgccaacaaaacagaatctgacctgagcatcgaggtcgagtttgagtatccattccgactgcatcaggtgtactttgatgctcccacctgcagggggggcacgacaaaagtctttcttgtgggcgactactccagttccgcagagttctttgtgaccgttgccgtttttgccttcctgtacagcatgggcgcactcgccacgtatatcttcctacagaataaatatcgcgagaataacaagggccctatgttggacttcctggctaccgccgtgtttgcctttatgtggctggtgagttctagcgcctgggctaagggcctttccgacgtcaaaatggctactgatcctgaaaacatcatcaaagagatgcctgtgtgtagacaaacaggcaatacatgcaaagaactccgcgatccagtaactagcggcctgaacacctctgtggttttcggatttcttaaccttgttctatgggtgggcaatctgtggttcgtgttcaaggaaacaggatgggctgcacctttccttagggcgccacctggcgctccggagaaacagcctgctccaggggatgcatacggagatgctgggtacggacaagggccaggcggctacggtccccaggactcttatggaccacaaggcggctaccagcctgattacgggcagcctgccggctccggcggctcaggttatggaccccagggcgactatggtcaacaggggtatggaccccagggcgcacctactagcttcagtaaccaaatgtag

SEQ ID NO: 135860 - DNA, 942 bp, Artificial Sequence
  derived and/or modified sequence
atgctgctgttggccgacatggatgttgtgaaccagctggttgcagggggacagttccgggttgtgaaagagcctctggggttcgtgaaagtccttcagtgggtcttcgcgattttcgcttttgctacttgtggctcttactccggggagttacagctgagcgtggactgcgctaacaagacggagtcagatctatctattgaggtggagttcgagtatcccttccggttacaccaagtgtacttcgacgctccaacatgccggggagggacaaccaaggtttttcttgtcggggattattcaagctcagccgaattctttgtgacagttgctgtgtttgcttttctgtacagtatgggcgctctcgcaacctacatctttctgcagaacaagtacagagagaacaacaaaggtccgatgctggactttctggccaccgcagttttcgcgttcatgtggttggtcagctcatcagcctgggccaaggggctttcagacgtgaagatggccacagaccccgagaatatcatcaaagaaatgcccgtgtgccggcaaaccggtaatacatgtaaggaactccgtgatccagttacatccggcttgaacacaagcgttgtgttcggctttctcaatcttgtgttgtgggtaggaaacctgtggtttgtgttcaaggagacgggatgggcggctccctttttgagggcacccccaggcgctcccgagaagcagccagcccctggcgatgcttacggtgacgccggttatggccagggcccagggggatacggaccacaggactcgtacgggcctcagggcggatatcagcctgattacggccagcccgcaggcagcggcggatctggctatggccctcagggagattatgggcagcaggggtacgggcctcagggagctcctacaagtttctcaaatcagatgtag

SEQ ID NO: 135861 - DNA, 2486 bp, Artificial Sequence
  derived and/or modified sequence
aacgagcgcgcgccgcccccgccgcgccccgcgccgcccttgctagccgagcctcccgccccctgcattgctgatgctgctgctggcggacatggacgtggtgaatcagctggtggctgggggtcagttccgggtggtcaaggagcccctcggctttgtgaaggtgctgcaatgggtcttcgccatcttcgcctttgccacatgcggcagctacagtggggagctccagctgagcgtggattgtgccaacaagaccgagagtgacctcagcatcgaggtcgagttcgagtaccccttcaggctgcaccaagtgtactttgatgcacccacctgccgagggggcaccaccaaggtcttcttagttggggactactcctcgtcagccgaattctttgtcaccgtggccgtgtttgccttcctctactccatgggggctctggccacctacatcttcctgcagaacaagtaccgagagaataacaaagggcccatgctggactttctggccacggctgtgttcgccttcatgtggctagttagctcatcggcatgggccaaggggctgtcagatgtgaagatggccacagacccagagaacattatcaaggagatgcctgtctgccgccagacagggaacacatgcaaggagctgagagaccctgtgacctcgggactcaacacctcggtggtgttcggcttcctgaacctggtgctctgggtcggcaacctgtggttcgtgtttaaggagacaggctgggccgccccgttcctgcgcgcgcctcccggcgcccccgagaaacaaccggcacccggggacgcctacggcgatgcaggctacgggcagggccccggcgggtacgggccccaggattcctacgggcctcagggcggctaccagcctgactatggtcaaccagccggcagcggtggcagtggctacgggcctcagggcgactatgggcagcaaggctacggcccgcagggtgcacccacctccttctccaatcagatgtagtctggtcagtgaagcccaggaggacctggggggggcaagagctcaggagaaggcctgccccccttcccacccctataccctaggtctccacccctcaagccaggagaccctgtctttgctgtttatatatatatatattatatataaatatctatttatctgtctgagccctgccctcactccactcccctcatccactaggtgcccagtcttgagtgggccccctctcttaccccgtccctttccctgcatcccttggcccctctctgtttaccctccctgtcccctgaggttaaggggatctaaaaggaggacagggagggaacagacctcggctgtgtggggagggtgggcgtgacttcagactctctcctctctctccctccactcctcccaactctggccttggttcctccagcaatgcctgcctgaacaaaggccgttagggaaatccaactccagggttaaagaaaggcagagattgggggggcttggggtagagaggacagtttaggacccaaggtggtcttggagaggaggtgtggagtggaggggtcagcaggggggttgggttccagacagagtggatctggagtctgaaggagaggagtgcgctagagcattctggggtggggcttggaagggcgctgagggcagggttctagaaggggcgaggctttaagcgaggcagaatggtgggctccagagtaggtgggtcttggattggtaccagagcctatggaaagggtgtggcttggaacatttgggagactgagcttgattctaaaggggacagatcttgagcaaggcaagaagtgggattcaggaatgggccaagccagggttccagacagggtggggcttagaatggggcttccatggtggtttcagaaagggcagcccctccccatggtgcagtgaagaaaatgttttacaatggctgggtttgggcagtggagaggggacttggataggagcttccagatgggttttgttaggggtgggggagaatggctctggctacgacttgggacggaagtggcctgagaagagtcgagtgatatggcttgtagggtgaggcgtgggatccagagagaagcaccccaccacacacacccttccccactcccgtgatgaaacagctaggttaataggaggacagaaccaacgggtctgtgggactggcccacccctcttcccccttcccctgcgccctccctccctccacacctccacccgtcctggggtggttggaggcctggtctggagcccctatcctgcaccctctgctatgtctgtgatgtcagtagtgcctgtgatcgtgtgttgccattttgtctggctgtggcccctccttctcccctccagacccctaccctttcccaaacccttcggtattgttcaaagaacccccctccccaaggaagaacaaatatgattctcctctcccaaataaactccttaaccacct

SEQ ID NO: 135862 - DNA, 942 bp, Artificial Sequence
  derived and/or modified sequence
atgcttctgctcgcagatatggatgtggtgaatcagctggttgccggcggacagtttcgggtggtgaaggagcctctcggatttgtgaaggtgctacagtgggtcttcgctatctttgccttcgccacctgcggttcctactcaggagaattacagttaagcgtggattgcgccaacaagactgaatctgacctgtctatagaggttgagttcgagtatcccttccgactgcaccaggtgtactttgatgcacccacctgccggggcgggactaccaaagttttccttgtcggtgattatagctcttcagctgaattctttgtcactgtcgctgttttcgcctttttgtactctatgggagccctggccacatatattttcctacagaacaaataccgcgagaataacaagggccccatgctggactttctcgcaacagctgtgttcgccttcatgtggctggtctccagctctgcatgggctaagggattgagcgatgtaaaaatggcgaccgatcctgaaaatattattaaagaaatgcctgtgtgcaggcagacaggaaatacgtgcaaagagttgcgtgatcctgtgacatctgggctgaacaccagcgtagtgttcggctttctcaacctggtactctgggtcgggaacttgtggttcgtcttcaaggaaaccggctgggcggctccctttctgagagcccccccaggtgcgcccgaaaagcagcctgcgccgggagacgcttacggcgacgctggttatggccagggacctggaggatacggcccccaggatagctatggccctcagggaggctaccaaccggactatggccagcctgcggggtcaggcggcagtggatatggaccacaaggggattacggccaacagggatacggaccgcaaggggcacccacctcgttttccaaccagatgtag

SEQ ID NO: 135863 - DNA, 942 bp, Artificial Sequence
  derived and/or modified sequence
atgctcctactggccgacatggatgtcgtaaaccagctcgtggcagggggtcagtttagggttgtcaaagaacctttaggttttgtgaaagttctccagtgggtcttcgcgatattcgcctttgcaacctgcggcagttattccggcgagctgcagctgagtgttgattgcgcaaataaaaccgaatctgaccttagcatcgaggtcgaatttgagtacccatttagactgcatcaggtgtactttgatgcacctacttgccgtgggggaaccacgaaggttttcctggtgggcgactactctagctcggcggaatttttcgtaaccgtggccgtgttcgccttcctttattctatgggggcactggccacatatatattcctccagaacaaatatagggaaaacaataagggacccatgctcgacttcttggcaactgccgtgtttgccttcatgtggttagtctcgagcagtgcttgggcgaaaggactgtccgatgtgaagatggcaaccgaccccgagaatattatcaaggaaatgcctgtgtgccggcagactgggaacacatgtaaggaacttagggaccctgtcacgagcggcctaaatacatcagttgtgttcgggtttctgaacctggtgctgtgggtgggaaacctctggttcgtgttcaaggagactggttgggccgcaccctttctccgtgctccaccaggagcccctgagaaacagcccgcgcctggcgatgcctatggcgacgccggttacggccagggaccaggaggttacggaccacaggactcttatggtcctcagggaggctatcagcctgattatggtcagccagctggcagtggggggagcgggtacggccctcagggggattatggccagcaggggtacggtccgcagggcgcgcctacctctttcagcaaccagatgtag

SEQ ID NO: 135864 - DNA, 942 bp, Artificial Sequence
  derived and/or modified sequence
atgctgctgctggccgacatggacgtggtgaaccagctggtggccgggggacagttccgtgtggtgaaggaacccctggggtttgtgaaagttttacagtgggtgtttgccatctttgcctttgccacatgtggcagctactctggcgagctccagctgtctgttgattgcgcaaacaagaccgagtctgacctcagcatcgaggtagagttcgaatatccattcagactgcaccaggtctatttcgacgcaccgacatgccgggggggaaccactaaagtttttctggtgggcgactactcaagtagcgctgagttcttcgttacggtggcggtcttcgccttcctctattccatgggcgccctggctacctatatcttcttgcagaacaaatatagggagaacaacaagggcccaatgctcgactttctagcaaccgctgtgttcgctttcatgtggctggtatcaagctctgcgtgggcaaaaggcctctctgatgtgaagatggccacagatcctgagaatatcatcaaggaaatgcctgtctgccggcagacgggaaacacttgtaaagagctccgggatcctgtgacaagcggactgaataccagcgtcgtctttggatttcttaacttagtgttatgggtggggaacctgtggttcgtgttcaaggagactggatgggccgccccatttttaagggcccctccgggagctccggagaaacaaccagccccaggggatgcttacggagacgcagggtacggacaaggcccaggagggtacgggccccaggatagctacggtcctcagggagggtatcagcctgattacggccagccggccgggtccggtggatccggatatggcccacagggagattacggacaacaggggtatgggccacaaggggccccaacttcttttagtaatcagatgtag

SEQ ID NO: 135865 - DNA, 942 bp, Artificial Sequence
  derived and/or modified sequence
atgctgctgctggccgacatggacgtggtgaaccagctggtggccggcggccaattccgagtcgtgaaagaacccttgggctttgtgaaggtactgcaatgggtgtttgctatttttgctttcgcaacttgcgggtcttattccggtgagttgcagctctctgtagactgcgcgaacaaaactgaaagcgacctcagtatagaggtggagtttgagtacccgttccggttgcatcaggtctacttcgacgcgcctacttgccgcggcgggacgacgaaagtattcctggtcggcgactattctagtagcgcggaatttttcgtgactgtagccgttttcgcattcctgtacagcatgggtgccttagcaacttacatttttctacagaataagtaccgcgaaaacaataaaggtcctatgctggactttctggcaacggccgtgtttgccttcatgtggctggtttccagcagcgcttgggctaaaggcttgagcgatgtgaaaatggcgaccgaccctgagaatattatcaaggaaatgccagtttgtcggcaaaccggtaatacttgcaaggagctgcgtgatccagtgaccagtgggttgaacacatccgtcgttttcggctttttaaatctggtactgtgggtcggaaatctgtggtttgttttcaaagaaaccggctgggcagctcccttcctgcgcgccccccctggcgcccccgaaaaacaacccgcaccgggcgacgcatacggggacgcaggctacggtcaagggcccgggggctatgggccccaggatagttacggccctcaaggggggtatcagcccgactatggccagccagcaggatccggcgggtccggctacgggccccagggagactatggacagcagggatacggtccccagggcgccccgacctccttttccaaccaaatgtag

SEQ ID NO: 135866 - DNA, 942 bp, Artificial Sequence
  derived and/or modified sequence
atgcttctcctagcagatatggatgtcgtgaatcaactcgtggccggtggccagttcagggtcgtaaaagaaccgctaggcttcgtgaaggtgttgcagtgggtgtttgccatcttcgcctttgccacctgtggatcctacagtggagagctccagttgagcgtggactgcgctaacaagaccgagtctgatctgtccatcgaggtggagttcgaatacccatttcgactgcaccaagtgtactttgacgctcccacctgccggggtgggaccacaaaagtgttcttagttggggactacagctcgtcagccgaatttttcgtgaccgttgctgtgtttgcgttcctgtattccatgggcgctcttgcaacctacatatttctgcagaacaaataccgggaaaacaataaaggaccgatgttggattttctagccactgccgtctttgcttttatgtggctggtgtcttcctcagcttgggctaaagggctttctgacgtgaagatggccacggatcctgaaaacatcataaaagaaatgcccgtgtgccgacaaacaggcaacacgtgtaaagaactaagagaccctgtgacaagtggtctcaacacgagtgttgtcttcggttttttgaatctggtcctatgggtcggcaacctatggttcgtctttaaagagacaggttgggcagctcccttcctaagagctccccctggggcacctgagaaacagccagccccaggtgacgcttacggggacgccggttatggtcaagggccaggtggctacgggcctcaggactcctacgggcctcagggaggctaccagcctgattacgggcaaccagctggatctggaggttcaggatatggcccacagggtgactacggccagcagggatacggcccacagggggcacctacgagcttctccaaccagatgtag

SEQ ID NO: 135867 - DNA, 942 bp, Artificial Sequence
  derived and/or modified sequence
atgcttttgctagccgatatggatgttgtgaaccagctggtcgccggaggacagtttcgagtggtgaaggagccactcgggtttgttaaggtgctgcaatgggtattcgccatctttgcttttgcaacatgtggctcatactctggggaattacaactcagcgttgattgtgctaacaaaacagagagcgacctatctattgaggtcgaattcgagtacccgttcagactgcaccaagtgtacttcgacgcccctacatgcagagggggtaccaccaaggtgttcctcgtaggggactacagctcgagcgcggagttctttgtgaccgtcgcagtcttcgctttcctttatagtatgggagcgctggctacttacatcttcctgcaaaacaagtatcgggagaacaacaaaggccctatgttagacttcctggctaccgcggtcttcgcattcatgtggctcgttagtagctcagcttgggccaaaggcttgtccgacgtcaaaatggcaactgatcctgagaacattattaaagagatgcccgtctgtagacagaccggcaacacttgtaaggaactgcgcgaccctgtgacctctggcctgaataccagtgtcgtgtttggattcctgaaccttgtgttgtgggtgggaaatctctggttcgtgttcaaagaaactggatgggctgcaccttttctgcgagcacctcctggggctcccgaaaaacagccggctcccggtgacgcctacggagatgccggatacgggcagggaccagggggatacggacctcaggactcctacggacctcagggcggttaccaacccgactacggccagccagcgggtagtgggggatctggatatggaccacagggagattacgggcagcagggttacggtccacagggtgctcccacctcgttctcgaatcaaatgtag

SEQ ID NO: 135868 - DNA, 1850 bp, Artificial Sequence
  derived and/or modified sequence
ccctgcattgctgatgctgctgctggcggacatggacgtggtgaatcagctggtggctgggggtcagttccgggtggtcaaggagcccctcggctttgtgaaggtgctgcaatgggtcttcgccatcttcgcctttgccacatgcggcagctacagtggggagctccagctgagcgtggattgtgccaacaagaccgagagtgacctcagcatcgaggtcgagttcgagtaccccttcaggctgcaccaagtgtactttgatgcacccacctgccgagggggcaccaccaaggtcttcttagttggggactactcctcgtcagccgaattctttgtcaccgtggccgtgtttgccttcctctactccatgggggctctggccacctacatcttcctgcagaacaagtaccgagagaataacaaagggcccatgctggactttctggccacggctgtgttcgccttcatgtggctagttagctcatcggcatgggccaaggggctgtcagatgtgaagatggccacagacccagagaacattatcaaggagatgcctgtctgccgccagacagggaacacatgcaaggagctgagagaccctgtgacctcgggactcaacacctcggtggtgttcggcttcctgaacctggtgctctgggtcggcaacctgtggttcgtgtttaaggagacaggctgggccgccccgttcctgcgcgcgcctcccggcgcccccgagaaacaaccggcacccggggacgcctacggcgatgcaggctacgggcagggccccggcgggtacgggccccaggattcctacgggcctcagggcggctaccagcctgactatggtcaaccagccggcagcggtggcagtggctacgggcctcagggcgactatgggcagcaaggctacggcccgcagggtgcacccacctccttctccaatcagatgtagtctggtgagtgaccggcgagcggtgcggccaaggagggtacaaggaaggagacgagcgggtcagtgaaccaataagagtcaggggtagagagtacgtaaggcgtttactggggcaagtaaggactgaagtttgaaggagccaatcaagaggcagaactacctgctaagagctgaaaaactagctaatgaatggagaaaagaagaatggtgcttcaagatggacagaatgaagagccaatgggagggaggtagaagggcaactcggcggaaaggcagggggagagaagcagagcaaccaataaagggagggaatatcgggggacttgcgcagtggcgaatcagcggagcgcaagagccacggaagcgacgaggaggtgggtcttagaagtgactgataagccaataggtgataaggccaatagatggtgagggtaaatgggcgtggatcttgaaggtcagacgagctcaccaatccgggaggaggggatagatctgccgcctctccccaacgctggaggggagggaagtagtgtggaatttcaaaggaggaagagggatagggtggggttctggaaaggtttgccggccttcttgctgggccttaaaagagaagtgagggtcggggcttggtggctcatgcctgtaatctcagcactttgggagaccgaggcgggcgggccgcttgagcccaagagttcgagaccagcctgggcaacatgatgaaatcccacctctacaaaaaatacaaaaattagccgggcgtggtggcatgcatctgtggacccatctactcaggaggctgaagtgggaggatcacttaagcccaggaggttgaggctgccgtgagctatgatcctgccactgcactccagcctgggcaacagagcgagacctt

SEQ ID NO: 135869 - DNA, 870 bp, Artificial Sequence
  derived and/or modified sequence
attgctgatgctgctgctggcggacatggacgtggtgaatcagctggtggctgggggtcagttccgggtggtcaaggagcccctcggctttgtgaaggtgctgcaatgggctgcaccaagtgtactttgatgcacccacctgccgagggggcaccaccaaggtcttcttagttggggactactcctcgtcagccgaattctttgtcaccgtggccgtgtttgccttcctctactccatgggggctctggccacctacatcttcctgcagaacaagtaccgagagaataacaaagggcccatgctggactttctggccacggctgtgttcgccttcatgtggctagttagctcatcggcatgggccaaggggctgtcagatgtgaagatggccacagacccagagaacattatcaaggagatgcctgtctgccgccagacagggaacacatgcaaggagctgagagaccctgtgacctcgggactcaacacctcggtggtgttcggcttcctgaacctggtgctctgggtcggcaacctgtggttcgtgtttaaggagacaggctgggccgccccgttcctgcgcgcgcctcccggcgcccccgagaaacaaccggcacccggggacgcctacggcgatgcaggctacgggcagggccccggcgggtacgggccccaggattcctacgggcctcagggcggctaccagcctgactatggtcaaccagccggcagcggtggcagtggctacgggcctcagggcgactatgggcagcaaggctacggcccgcagggtgcacccacctccttctccaatcagatgtagtctggtcagtgaagcccaggaggacctggggggggcaagagctcag

SEQ ID NO: 135870 - protein, 435 aa, Artificial Sequence
  derived and/or modified sequence
MSSPGTESAGKSLQYRVDHLLSAVENELQAGSEKGDPTERELRVGLEESELWLRFKELTNEMIVTKNGRRMFPVLKVNVSGLDPNAMYSFLLDFVAADNHRWKYVNGEWVPGGKPEPQAPSCVYIHPDSPNFGAHWMKAPVSFSKVKLTNKLNGGGQIMLNSLHKYEPRIHIVRVGGPQRMITSHCFPETQFIAVTAYQNEEITALKIKYNPFAKAFLDAKERSDHKEMMEEPGDSQQPGYSQWGWLLPGTSTLCPPANPHPQFGGALSLPSTHSCDRYPTLRSHRSSPYPSPYAHRNNSPTYSDNSPACLSMLQSHDNWSSLGMPAHPSMLPVSHNASPPTSSSQYPSLWSVSNGAVTPGSQAAAVSNGLGAQFFRGSPAHYTPLTHPVSAPSSSGSPLYEGAAAATDIVDSQYDAAAQGRLIASWTPVSPPSM

SEQ ID NO: 135871 - DNA, 2518 bp, Artificial Sequence
  derived and/or modified sequence
tttgcttttgcttatttccgtccatttccctctctgcgcgcggaccttccttttccagatggtgagagccgcggggacacccgacgccggggcaggctgatccacgatcctgggtgtgcgtaacgccgcctggggctccgtgggcgagggacgtgtggggacaggtgcaccggaaactgccagactggagagttgaggcatcggaggcgcgagaacagcactactactgcggcgagacgagcgcggcgcatcccaaagcccggccaaatgcgctcgtccctgggaggggagggaggcgcgcctggagcggggacagtcttggtccgcgccctcctcccgggtctgtgccgggacccgggacccgggagccgtcgcaggtctcggtccaaggggccccttttctcggaagggcggcggccaagagcagggaaggtggatctcaggtagcgagtctgggcttcggggacggcggggaggggagccggacgggaggatgagctcccctggcaccgagagcgcgggaaagagcctgcagtaccgagtggaccacctgctgagcgccgtggagaatgagctgcaggcgggcagcgagaagggcgaccccacagagcgcgaactgcgcgtgggcctggaggagagcgagctgtggctgcgcttcaaggagctcaccaatgagatgatcgtgaccaagaacggcaggaggatgtttccggtgctgaaggtgaacgtgtctggcctggaccccaacgccatgtactccttcctgctggacttcgtggcggcggacaaccaccgctggaagtacgtgaacggggaatgggtgccggggggcaagccggagccgcaggcgcccagctgcgtctacatccaccccgactcgcccaacttcggggcccactggatgaaggctcccgtctccttcagcaaagtcaagctcaccaacaagctcaacggagggggccagatcatgctgaactccttgcataagtatgagcctcgaatccacatagtgagagttgggggtccacagcgcatgatcaccagccactgcttccctgagacccagttcatagcggtgactgcttatcagaacgaggagatcacagctcttaaaattaagtacaatccatttgcaaaagctttccttgatgcaaaggaaagaagtgatcacaaagagatgatggaggaacccggagacagccagcaacctgggtactcccaatgggggtggcttcttcctggaaccagcaccctgtgtccacctgcaaatcctcatcctcagtttggaggtgccctctccctcccctccacgcacagctgtgacaggtacccaaccctgaggagccaccggtcctcaccctaccccagcccctatgctcatcggaacaattctccaacctattctgacaactcacctgcatgtttatccatgctgcaatcccatgacaattggtccagccttggaatgcctgcccatcccagcatgctccccgtgagccacaatgccagcccacctaccagctccagtcagtaccccagcctgtggtctgtgagcaacggcgccgtcaccccgggctcccaggcagcagccgtgtccaacgggctgggggcccagttcttccggggctcccccgcgcactacacacccctcacccatccggtctcggcgccctcttcctcgggatccccactgtacgaaggggcggccgcggccacagacatcgtggacagccagtacgacgccgcagcccaaggccgcctcatagcctcatggacacctgtgtcgccaccttccatgtgaagcagcaaggcccaggtcccgaaagatgcagtgactttttgtcgtggcagccagtggtgactggattgacctactaggtacccagtggcagtctcaggttaagaaggaaatgcagcctcagtaacttccttttcaaagcagtggaggagcacacggcacctttccccagagccccagcatcccttgctcacacctgcagtagcggtgctgtcccaggtggcttacagatgaacccaactgtggagatgatgcagttggcccaacctcactgacggtgaaaaaatgtttgccagggtccagaaactttttttggtttatttctcatacagtgtattggcaactttggcacaccagaatttgtaaactccaccagtcctactttagtgagataaaaagcacactcttaatcttcttccttgttgctttcaagtagttagagttgagctgttaaggacagaataaaatcatagttgaggacagcaggttttagttgaattgaaaatttgactgctctgccccctagaatgtgtgtattttaagcatatgtagctaatctcttgtgttgttaaactataactgtttcatatttttcttttgacaaagtagccaaagacaatcagcagaaagcattttctgcaaaataaacgcaatatgcaaaatgtgattcgtccagttattagtgaagcccctccttttgtgagtatttactgtttattg

SEQ ID NO: 135872 - DNA, 1308 bp, Artificial Sequence
  derived and/or modified sequence
atgagcagccccggcaccgagagcgccggcaagagcctgcagtacagagtggaccacctgctgagcgccgtggagaacgagctgcaggccggcagcgagaagggcgaccccaccgagagagagctgagagtgggcctggaggagagcgagctgtggctgagattcaaggagctgaccaacgagatgatcgtgaccaagaacggcagaagaatgttccccgtgctgaaggtgaacgtgagcggcctggaccccaacgccatgtacagcttcctgctggacttcgtggccgccgacaaccacagatggaagtacgtgaacggcgagtgggtgcccggcggcaagcccgagccccaggcccccagctgcgtgtacatccaccccgacagccccaacttcggcgcccactggatgaaggcccccgtgagcttcagcaaggtgaagctgaccaacaagctgaacggcggcggccagatcatgctgaacagcctgcacaagtacgagcccagaatccacatcgtgagagtgggcggcccccagagaatgatcaccagccactgcttccccgagacccagttcatcgccgtgaccgcctaccagaacgaggagatcaccgccctgaagatcaagtacaaccccttcgccaaggccttcctggacgccaaggagagaagcgaccacaaggagatgatggaggagcccggcgacagccagcagcccggctacagccagtggggctggctgctgcccggcaccagcaccctgtgcccccccgccaacccccacccccagttcggcggcgccctgagcctgcccagcacccacagctgcgacagataccccaccctgagaagccacagaagcagcccctaccccagcccctacgcccacagaaacaacagccccacctacagcgacaacagccccgcctgcctgagcatgctgcagagccacgacaactggagcagcctgggcatgcccgcccaccccagcatgctgcccgtgagccacaacgccagcccccccaccagcagcagccagtaccccagcctgtggagcgtgagcaacggcgccgtgacccccggcagccaggccgccgccgtgagcaacggcctgggcgcccagttcttcagaggcagccccgcccactacacccccctgacccaccccgtgagcgcccccagcagcagcggcagccccctgtacgagggcgccgccgccgccaccgacatcgtggacagccagtacgacgccgccgcccagggcagactgatcgccagctggacccccgtgagcccccccagcatgtag

SEQ ID NO: 135873 - DNA, 1308 bp, Artificial Sequence
  derived and/or modified sequence
atgtcgagccctggcactgagagtgccggaaagagcctgcaatacagggtagaccatctgctttctgcggtcgaaaacgaactacaggctggtagcgagaaaggcgatcccactgaacgcgagttacgcgtgggtttagaagagtcagagttgtggctgcgctttaaagagctgactaacgaaatgattgttactaagaatgggcggcggatgttccccgtgctgaaggtgaatgtttctgggctcgaccccaacgctatgtatagctttctcttggacttcgttgcagcagacaaccaccgctggaaatacgtaaacggggaatgggtccccgggggcaaacctgaacctcaggccccatcatgcgtctacattcatcctgacagccccaactttggagctcactggatgaaggcgcctgtgagcttcagtaaagtgaagctgaccaacaaactgaatggtgggggccaaattatgcttaattccttgcataaatacgagcctagaatccacattgtccgtgttggagggccccaacgaatgattacttcccactgttttccagagactcagtttatcgccgtgacagcatatcaaaacgaagagatcaccgccttgaagataaaatataacccttttgccaaggcatttctcgatgcgaaggagagatcggaccacaaggagatgatggaggaacctggagactcacagcaaccgggctactcccagtggggctggctcttgccaggtaccagcacgctgtgtcctccggccaaccctcacccccagttcggaggagccctttccctcccctcaacacattcatgcgataggtatccaacacttcgatcgcaccggtctagtccttatccgtcgccatacgcccaccgaaacaatagcccaacctatagcgacaacagccccgcctgtctctctatgctccagtcacacgataactggagcagtctgggtatgccagcacacccctccatgcttcccgtttcccacaacgcatccccacccactagctcttctcagtaccctagtctgtggtctgtctccaacggggccgtcacccctggatcacaagccgcagccgtcagtaacggattgggagcccagttctttagaggctcccccgcccactacacaccactcacccaccccgtgtcagccccttcgagctccgggtctccactgtatgaaggtgctgcagccgcaacagatatcgttgacagtcaatatgacgctgccgcccaaggtcggttgattgcgtcatggacccccgtgagtcctccctctatgtag

SEQ ID NO: 135874 - DNA, 1308 bp, Artificial Sequence
  derived and/or modified sequence
atgagcagccctggaacagagagcgctgggaagagcctgcagtacagagtggaccacctgctgtctgctgtggagaatgagctgcaggccggcagcgagaagggggaccccacagagcgggagctgcgggtgggcctggaggagagcgagctgtggctgcgcttcaaggagctgaccaatgagatgattgtgaccaagaatggaagaaggatgtttcctgtgctgaaggtgaatgtgtctggcctggaccccaatgccatgtacagcttcctgctggactttgtggccgctgacaaccaccgctggaagtatgtgaatggagagtgggtgcctgggggcaagccagagccccaggcccccagctgtgtgtacatccacccagacagccccaactttggagcccactggatgaaggcccctgtgtccttcagcaaggtgaagctgaccaacaagctgaatggaggcggccagatcatgctgaacagcctgcacaagtatgagccccgcatccacatcgtgcgggtgggcggcccccagaggatgatcaccagccactgcttccctgagacccagttcatcgctgtgacagcctaccagaatgaggagatcacagccctgaagatcaagtacaacccctttgccaaggccttcctggatgccaaggagaggagtgaccacaaggagatgatggaggagcccggggacagccagcagcccggctacagccagtggggctggctgctgcccggcaccagcaccctgtgccccccagccaacccccacccccagtttggaggagccctgagcctgcccagcacccacagctgtgaccgctaccccaccctgcggagccacaggagcagcccctaccccagcccctatgcccacaggaacaacagccccacctacagcgacaacagccctgcctgcctgtccatgctgcagagccatgacaactggagcagcctgggcatgcctgcccaccccagcatgctgcctgtgagccacaatgccagcccccccaccagcagcagccagtaccccagcctgtggagcgtgtccaatggagctgtgaccccaggcagccaggccgctgctgtgtccaatggcctgggcgcccagttcttccggggcagccctgcccactacacccccctgacccaccctgtgtctgcccccagcagcagcggcagccccctgtatgaaggagctgctgctgccacagacatcgtggacagccagtatgatgctgctgcccagggccgcctcatcgcctcctggacccctgtgagcccccccagcatgtag

SEQ ID NO: 135875 - DNA, 1308 bp, Artificial Sequence
  derived and/or modified sequence
atgagcagccccggcaccgagagcgccggcaagagcctgcagtacagagtcgatcatctgctctcagctgtggagaatgaactacaggcaggctccgagaaaggtgatccaaccgaaagggagctgagagtcgggctggaagaatccgaactttggctgagatttaaggagttaaccaatgaaatgatcgtgactaagaatggacggcgcatgtttcccgtgctgaaggtgaatgtatctggactagacccaaacgctatgtattctttcctgcttgatttcgtggctgctgataaccaccggtggaagtacgttaatggggaatgggtgcccggagggaagcccgagccacaagcaccctcctgcgtctacatacatcccgattcgcccaacttcggtgcccattggatgaaagctccagtctccttttccaaggtgaagcttacgaacaagctaaacggggggggtcagattatgctgaactcgctgcacaaatatgaacccagaattcatatcgtacgtgtgggaggtccgcagcgtatgatcacaagtcactgtttccctgagactcagtttattgccgtcacggcttatcaaaacgaggagattacggctttgaaaatcaagtataacccctttgccaaggcttttctggacgccaaggagaggagcgatcacaaggaaatgatggaggagccaggagactctcaacaacccgggtactcccagtggggatggttgctgcctggaaccagcacattgtgcccccctgccaaccctcacccccagttcggcggcgccttgtctctgccgagtactcactcctgcgacagataccctactctgaggagccacagaagcagtccttatccttctccatatgctcataggaataactctcctacatacagcgacaactcccccgcctgtctcagcatgctacagtctcacgacaattggagttcattaggcatgccagcccatcctagtatgctgccagtcagccacaatgcctctcctcccactagcagtagccagtacccttctctgtggtcagtgagcaacggagccgtcacccctggcagtcaggcagccgcagtctccaatggattaggggcacagttcttcagggggtcgccagcccactacactcctctcacccatcctgtgagcgcgccttcatcttccgggtctcccctgtatgaaggcgctgctgctgctaccgatatcgtggacagccagtacgacgctgctgcacagggtcgtctcattgcatcttggacccccgtctccccaccctctatgtag

SEQ ID NO: 135876 - DNA, 1308 bp, Artificial Sequence
  derived and/or modified sequence
atgtcgagccccggaacagagagcgcaggaaagtccttacaataccgggtggaccacctcttatctgccgtggagaacgaactccaggccggttccgaaaagggtgacccaaccgagagggagctacgtgtgggactcgaggaaagtgaattgtggcttcgcttcaaagagcttactaatgagatgatcgtgactaagaatgggaggagaatgtttcctgttctgaaggtcaatgttagcggcttggaccctaatgccatgtacagcttcctgctggattttgttgctgccgataatcatcgatggaaatatgtgaatggagaatgggtgcccggtgggaagccggagcctcaagctccaagctgcgtttacattcaccctgactccccaaacttcggggctcattggatgaaggcccctgtcagctttagcaaagtcaaactgactaacaagctgaacggtgggggtcaaataatgctgaacagtctgcataaatatgaaccgcgtatacatatcgtgagagtcggcggacctcagcgaatgatcacgtcacattgcttcccagagacccagtttatcgcagtgacagcctatcagaatgaggagattaccgcactgaaaatcaagtacaatccttttgccaaggccttcttggatgcgaaagaaagatctgatcataaggagatgatggaagagcctggtgatagccaacagcccggatacagtcagtggggctggctgctccccggtacatccactctgtgccccccagccaatccacatccacagtttgggggagctctctctctgccatccacacacagctgcgatcgctaccctactctcaggtcacacagatcctctccttatccttccccttatgctcatcgcaataattcgcctacatacagcgacaattctcctgcgtgtctaagtatgctgcagagccacgataactggtcaagtctgggtatgcccgctcatccgagcatgttaccggtgagtcataatgcaagcccccctacgagcagtagccagtaccccagcttgtggtcagtgagtaatggcgctgtgacacctggttcacaagccgctgctgtctctaacggcctaggtgctcagttctttcgaggatcaccggcacactacacccccttgacccatcccgtatctgcgccaagttcctcagggagccctctgtacgagggcgcagctgccgctaccgacattgtcgattctcagtatgacgctgccgctcaggggaggcttatcgctagctggaccccggtgtctccaccatcgatgtag

SEQ ID NO: 135877 - DNA, 2436 bp, Artificial Sequence
  derived and/or modified sequence
tttccctctctgcgcgcggaccttccttttccagatggtgagagccgcggggacacccgacgccggggcaggctgatccacgatcctgggtgtgcgtaacgccgcctggggctccgtgggcgagggacgtgtggggacaggtgcaccggaaactgccagactggagagttgaggcatcggaggcgcgagaacagcactactactgcggcgagacgagcgcggcgcatcccaaagcccggccaaatgcgctcgtccctgggaggggagggaggcgcgcctggagcggggacagtcttggtccgcgccctcctcccgggtctgtgccgggacccgggacccgggagccgtcgcaggtctcggtccaaggggccccttttctcggaagggcggcggccaagagcagggaaggtggatctcaggtagcgagtctgggcttcggggacggcggggaggggagccggacgggaggatgagctcccctggcaccgagagcgcgggaaagagcctgcagtaccgagtggaccacctgctgagcgccgtggagaatgagctgcaggcgggcagcgagaagggcgaccccacagagcgcgaactgcgcgtgggcctggaggagagcgagctgtggctgcgcttcaaggagctcaccaatgagatgatcgtgaccaagaacggcaggaggatgtttccggtgctgaaggtgaacgtgtctggcctggaccccaacgccatgtactccttcctgctggacttcgtggcggcggacaaccaccgctggaagtacgtgaacggggaatgggtgccggggggcaagccggagccgcaggcgcccagctgcgtctacatccaccccgactcgcccaacttcggggcccactggatgaaggctcccgtctccttcagcaaagtcaagctcaccaacaagctcaacggagggggccagatcatgctgaactccttgcataagtatgagcctcgaatccacatagtgagagttgggggtccacagcgcatgatcaccagccactgcttccctgagacccagttcatagcggtgactgcttatcagaacgaggagatcacagctcttaaaattaagtacaatccatttgcaaaagctttccttgatgcaaaggaaagaagtgatcacaaagagatgatggaggaacccggagacagccagcaacctgggtactcccaatgggggtggcttcttcctggaaccagcaccctgtgtccacctgcaaatcctcatcctcagtttggaggtgccctctccctcccctccacgcacagctgtgacaggtacccaaccctgaggagccaccggtcctcaccctaccccagcccctatgctcatcggaacaattctccaacctattctgacaactcacctgcatgtttatccatgctgcaatcccatgacaattggtccagccttggaatgcctgcccatcccagcatgctccccgtgagccacaatgccagcccacctaccagctccagtcagtaccccagcctgtggtctgtgagcaacggcgccgtcaccccgggctcccaggcagcagccgtgtccaacgggctgggggcccagttcttccggggctcccccgcgcactacacacccctcacccatccggtctcggcgccctcttcctcgggatccccactgtacgaaggggcggccgcggccacagacatcgtggacagccagtacgacgccgcagcccaaggccgcctcatagcctcatggacacctgtgtcgccaccttccatgtgaagcagcaaggcccaggtcccgaaagatgcagtgactttttgtcgtggcagccagtggtgactggattgacctactaggtacccagtggcagtctcaggttaagaaggaaatgcagcctcagtaacttccttttcaaagcagtggaggagcacacggcacctttccccagagccccagcatcccttgctcacacctgcagtagcggtgctgtcccaggtggcttacagatgaacccaactgtggagatgatgcagttggcccaacctcactgacggtgaaaaaatgtttgccagggtccagaaactttttttggtttatttctcatacagtgtattggcaactttggcacaccagaatttgtaaactccaccagtcctactttagtgagataaaaagcacactcttaatcttcttccttgttgctttcaagtagttagagttgagctgttaaggacagaataaaatcatagttgaggacagcaggttttagttgaattgaaaatttgactgctctgccccctagaatgtgtgtattttaagcatatgtagctaatctcttgtgttgttaaactataactgtttcatatttttcttttgacaaagtagccaaagacaatcagcagaaagcattttctgcaaaataaacgcaatatgcaaaa

SEQ ID NO: 135878 - protein, 129 aa, Artificial Sequence
  derived and/or modified sequence
MKILVALAVFFLVSTQLFAEEIGANDDLNYWSDWYDSDQIKEELPEPFEHLLQRIARRPKPQQFFGLMGKRDADSSIEKQVALLKALYGHGQISHKRHKTDSFVGLMGKRALNSVAYERSAMQNYERRR

SEQ ID NO: 135879 - DNA, 390 bp, Artificial Sequence
  derived and/or modified sequence
atgaagatcctggtggccctggccgtgttcttcctggtgagcacccagctgttcgccgaggagatcggcgccaacgacgacctgaactactggagcgactggtacgacagcgaccagatcaaggaggagctgcccgagcccttcgagcacctgctgcagagaatcgccagaagacccaagccccagcagttcttcggcctgatgggcaagagagacgccgacagcagcatcgagaagcaggtggccctgctgaaggccctgtacggccacggccagatcagccacaagagacacaagaccgacagcttcgtgggcctgatgggcaagagagccctgaacagcgtggcctacgagagaagcgccatgcagaactacgagagaagaagatag

SEQ ID NO: 135880 - DNA, 390 bp, Artificial Sequence
  derived and/or modified sequence
atgaagatcctcgtggcactggctgttttttttcttgtttccacccagctgttcgccgaagagattggggctaacgatgatctgaattactggtccgactggtacgattccgaccagatcaaagaggagctcccagagccctttgagcatctgttacagagaatcgcacggagaccaaagccacagcaattctttgggttgatgggaaagcgtgatgccgatagcagcatcgagaagcaggtcgccctcctgaaggccttgtacggccatggacagatctctcacaagaggcacaagaccgattcctttgtcggccttatggggaaaagggcccttaactccgttgcctacgagcgtagtgcgatgcagaattacgaacgcaggcggtag

SEQ ID NO: 135881 - DNA, 390 bp, Artificial Sequence
  derived and/or modified sequence
atgaagatcctggtggccctggccgtgttcttcctggtgtccacccagctgtttgctgaggagatcggggccaatgatgacctgaactactggagcgactggtatgacagcgaccagatcaaggaggagctgcctgagccctttgagcacctgctgcagagaattgcccggcggcccaagccccagcagttcttcggcctgatgggcaagagagatgctgacagcagcattgagaagcaggtggccctgctgaaggccctgtatggccacggccagatcagccacaagaggcacaagacagacagctttgtgggcctgatgggcaagagggccctgaacagcgtggcctatgaaagaagtgccatgcagaactatgaaagaagaagatag

SEQ ID NO: 135882 - DNA, 390 bp, Artificial Sequence
  derived and/or modified sequence
atgaagatcctggtggccctggccgtgttcttcctggtgagcacccaactcttcgcagaggagattggagcaaatgatgacctaaactattggtctgactggtatgatagcgatcagatcaaggaagagcttcctgagcccttcgaacacctgctgcaacgaatcgccaggcggcccaaaccgcagcagttcttcggactgatgggaaagagagatgcagacagctcaatcgagaaacaggtggcactgctgaaagccctttatggccacggtcagatatcacacaaaagacataagacggattcctttgtgggactaatggggaaaagggcgttaaactctgtagcctatgaacgtagtgccatgcaaaactatgagagacggaggtag

SEQ ID NO: 135883 - DNA, 390 bp, Artificial Sequence
  derived and/or modified sequence
atgaaaatactagtcgccttggcagtcttcttcctggtgagcacacaactgtttgccgaggaaatcggcgcaaatgatgacttgaactactggtccgattggtatgacagcgaccagattaaggaggagctgccggagccttttgagcacctgctgcaaaggattgcaagacggccaaaaccccagcagttttttggcctcatgggcaagcgggatgctgattcaagtatcgaaaagcaagtagccttgctgaaggccctgtacggtcacggccaaattagtcacaaacggcacaagaccgactcttttgtgggcctgatgggcaaacgggcactgaacagcgtcgcatatgagcgcagcgcaatgcaaaactacgagagacggcgatag

SEQ ID NO: 135884 - DNA, 1239 bp, Artificial Sequence
  derived and/or modified sequence
gggtccagatgttatgggcatcgacgagttaccgtctcggaaactctcaatcacgcaagcgaaaggagaggaggcggctaattaaatattgagcagaaagtcgcgtggggagaatgtcacgtgggtctggaggctcaaggaggctgggataaataccgcaaggcactgagcaggcgaaagagcgcgctcggacctccttcccggcggcagctaccgagagtgcggagcgaccagcgtgcgctcggaggaaccagagaaactcagcaccccgcgggactgtccgtcgcaaaatccaacatgaaaatcctcgtggccttggcagtcttttttcttgtctccactcagctgtttgcagaagaaataggagccaatgatgatctgaattactggtccgactggtacgacagcgaccagatcaaggaggaactgccggagccctttgagcatcttctgcagagaatcgcccggagacccaagcctcagcagttctttggattaatgggcaaacgggatgctgattcctcaattgaaaaacaagtggccctgttaaaggctctttatggacatggccagatctctcacaaaagacataaaacagattcctttgttggactaatgggcaaaagagctttaaattctgtggcttatgaaaggagtgcaatgcagaattatgaaagaagacgttaataaactacctaacattatttattcagcttcatttgtgtcaatgggcaatgacaggtaaattaagacatgcactatgaggaataattatttatttaataacaattgtttggggttgaaaattcaaaaagtgtttatttttcatattgtgccaatatgtattgtaaacatgtgttttaattccaatatgatgactcccttaaaatagaaataagtggttatttctcaacaaagcacagtgttaaatgaaattgtaaaacctgtcaatgatacagtccctaaagaaaaaaaatcattgctttgaagcagttgtgtcagctactgcggaaaaggaaggaaactcctgacagtcttgtgcttttcctatttgttttcatggtgaaaatgtactgagattttggtattacactgtatttgtatctctgaagcatgtttcatgttttgtgactatatagagatgtttttaaaagtttcaatgtgattctaatgtcttcatttcattgtatgatgtgttgtgatagctaacattttaaataaaagaaaaaatatcttgaa

SEQ ID NO: 135885 - protein, 99 aa, Artificial Sequence
  derived and/or modified sequence
MALSKLIIASLLASLLLLHFVDADQSAHAQTQGSLLQQIDCNGACAARCRLSSRPRLCQRACGTCCRRCNCVPPGTAGNQEVCPCYASLTTHGGKRKCP

SEQ ID NO: 135886 - protein, 824 aa, Artificial Sequence
  derived and/or modified sequence
MRQSLLFLTSVVPFVLAPRPPDDPGFGPHQRLEKLDSLLSDYDILSLSNIQQHSVRKRDLQTSTHVETLLTFSALKRHFKLYLTSSTERFSQNFKVVVVDGKNESEYTVKWQDFFTGHVVGEPDSRVLAHIRDDDVIIRINTDGAEYNIEPLWRFVNDTKDKRMLVYKSEDIKNVSRLQSPKVCGYLKVDNEELLPKGLVDREPPEELVHRVKRRADPDPMKNTCKLLVVADHRFYRYMGRGEESTTTNYLIELIDRVDDIYRNTSWDNAGFKGYGIQIEQIRILKSPQEVKPGEKHYNMAKSYPNEEKDAWDVKMLLEQFSFDIAEEASKVCLAHLFTYQDFDMGTLGLAYVGSPRANSHGGVCPKAYYSPVGKKNIYLNSGLTSTKNYGKTILTKEADLVTTHELGHNFGAEHDPDGLAECAPNEDQGGKYVMYPIAVSGDHENNKMFSNCSKQSIYKTIESKAQECFQERSNKVCGNSRVDEGEECDPGIMYLNNDTCCNSDCTLKEGVQCSDRNSPCCKNCQFETAQKKCQEAINATCKGVSYCTGNSSECPPPGNAEDDTVCLDLGKCKDGKCIPFCEREQQLESCACNETDNSCKVCCRDLSGRCVPYVDAEQKNLFLRKGKPCTVGFCDMNGKCEKRVQDVIERFWDFIDQLSINTFGKFLADNIVGSVLVFSLIFWIPFSILVHCVDKKLDKQYESLSLFHPSNVEMLSSMDSASVRIIKPFPAPQTPGRLQPAPVIPSAPAAPKLDHQRMDTIQEDPSTDSHMDEDGFEKDPFPNSSTAAKSFEDLTDHPVTRSEKAASFKLQRQNRVDSKETEC

SEQ ID NO: 135887 - protein, 258 aa, Artificial Sequence
  derived and/or modified sequence
MRQSLLFLTSVVPFVLAPRPPDDPGFGPHQRLEKLDSLLSDYDILSLSNIQQHSVRKRDLQTSTHVETLLTFSALKRHFKLYLTSSTERFSQNFKVVVVDGKNESEYTVKWQDFFTGHVVGEPDSRVLAHIRDDDVIIRINTDGAEYNIEPLWRFVNDTKDKRMLVYKSEDIKNVSRLQSPKVCGYLKVDNEELLPKGLVDREPPEELVHRVKRRADPDPMKNTCKLLVVADHRFYRYMGRGEESTTTNYLIHTDRAN

SEQ ID NO: 135888 - DNA, 2475 bp, Artificial Sequence
  derived and/or modified sequence
atgcgccagtcactgctgtttctgaccagcgttgtgccattcgtgctggctccccgaccgcccgacgaccctggcttcggacctcatcagcggctcgagaaattggattcactgcttagcgattatgatatactgtctctctctaacatccaacagcactctgtccgcaagcgggatctgcagacgtcaacacacgtggagaccctcttgacgtttagcgcactgaagcgtcattttaagttgtatctgacttctagcaccgagcgcttttcccagaacttcaaggttgtggtcgttgatggcaaaaacgaatcagaatataccgtcaaatggcaagatttctttacagggcacgttgtaggagaaccggattctcgggtgctggcccacattcgggacgatgatgtgatcattagaatcaacaccgatggtgctgagtacaacatcgagcccctatggcgttttgtcaatgacaccaaagacaagcgcatgctggtatataaatccgaggacattaaaaatgttagccggcttcagtcccccaaagtgtgcggatacctgaaagtcgacaacgaggaactactgcctaaagggctggttgatagagagcccccagaagaattagtacatcgtgtgaagcggagggcagatcccgatcctatgaagaacacttgcaagctgctcgtagtggccgaccaccgcttctatcggtatatgggcaggggggaggagagcactacaacaaactatctgatagaactgatcgatcgagtggacgatatttaccgcaatacaagttgggacaacgccgggttcaagggatatgggatccagattgaacaaatccggatccttaagtcaccacaggaagtgaagcccggtgaaaagcattacaatatggccaagtcctatccaaatgaagagaaagatgcttgggatgtgaagatgttgcttgagcaattctcattcgatattgcagaagaggcaagcaaagtttgtttggctcatttattcacataccaggactttgacatgggtactcttgggctggcttacgtcgggtccccaagagcgaattcccacggcggtgtgtgtccgaaggcctattacagccctgttggcaagaaaaacatctacttaaattctggattaacgtcaacaaaaaactacgggaaaactatattaactaaggaagcggacttagtcacaactcatgagctggggcacaatttcggcgcagagcatgacccagatggccttgccgagtgcgcaccgaacgaggaccagggaggcaaatacgtgatgtacccaatagctgtgtcaggtgatcatgaaaataataagatgttttcaaactgtagcaagcagagcatctacaaaaccatcgagtccaaggcccaggaatgctttcaggaacggtccaacaaagtctgcgggaacagtcgcgtagacgaaggcgaagagtgtgaccctggaatcatgtacctgaacaacgatacttgctgtaattcagattgcaccttaaaggagggggtacagtgcagcgacagaaattccccatgttgtaaaaactgccaattcgaaaccgcacaaaagaagtgccaggaggccatcaacgccacttgtaagggagtatcctactgcacaggcaatagctctgagtgtcccccccccggcaatgccgaagatgataccgtctgcctcgatctcggaaaatgcaaagacggaaagtgtataccattctgcgagcgggaacagcagctggagagttgcgcatgtaatgaaacagataattcttgcaaagtgtgctgccgagacctctccggcagatgcgtgccctacgtcgacgctgagcagaaaaacctgttcctgagaaaaggcaaaccatgtactgtgggattctgtgatatgaatggaaaatgcgaaaagcgcgtgcaggatgtcatcgaacgattctgggactttatcgatcagctctcaatcaatacctttggaaagttcctcgcggataacatcgttgggtcggtactggtcttcagcctgatcttctggattccgttcagcatcttagttcactgcgtcgacaaaaaattggataaacagtacgagtcactgtccttgtttcatcctagcaacgttgaaatgctcagctcaatggattccgccagtgtgcggattatcaagccctttcccgccccgcagacccctggtcgcttacaaccagccccagtgatacctagcgcccccgccgcgcctaaattggaccaccagagaatggacacgatacaggaagatccgtctactgacagccatatggatgaagacggctttgagaaggatccttttccaaattcctccaccgccgctaagagctttgaggatctgaccgaccacccagtcactcgtagcgagaaagcggccagctttaagctacagaggcagaatcgcgtagactcaaaggagaccgagtgttag

SEQ ID NO: 135889 - DNA, 777 bp, Artificial Sequence
  derived and/or modified sequence
atgcggcagtcacttctgttcttgacatccgttgtgccctttgtgttggcccctcggccaccagacgatcctggctttggaccacaccagaggctcgagaagctggattctctcctgagcgattatgatattttgagtctatctaacattcaacagcatagtgtacggaaacgggatctccaaaccagcacacatgttgagaccctgttaacattcagcgccttgaagcgccatttcaagttatatttgacttcctccacggagaggttcagtcagaacttcaaagtagtggtcgtcgacggcaaaaacgagtccgaatacacagtgaagtggcaggacttctttactgggcatgtggtcggcgagcccgattcacgagtcctggcacacatccgagatgacgacgtgataatccgcatcaacactgacggggccgagtataacattgaaccattatggcgctttgtcaacgatacaaaagacaagcggatgctcgtctataaatcagaagacatcaagaatgtgagccgactccagagtcccaaggtgtgtggctacttaaaggtggataacgaggagctgctacccaaagggctggtggatagggaaccccccgaggaacttgtgcatcgtgtgaaacggagggccgacccagatcctatgaaaaatacctgcaaattattggtggtggccgatcacagattttaccgatacatgggacgcggcgaggaatctacaacgaccaactatctcatccataccgacagggctaactag

SEQ ID NO: 135890 - DNA, 2475 bp, Artificial Sequence
  derived and/or modified sequence
atgaggcagagcctgctcttcctgacctctgtggtgccctttgtgctggccccccggcccccagatgaccccggcttcggcccccaccagaggctggagaagctggacagcctgctgagtgactatgacatcctgagcctgagcaacatccagcagcacagcgtgaggaagagggacctgcagaccagcacccacgtggagaccctgctgaccttcagcgccctgaagaggcacttcaagctgtacctgaccagcagcacagagcgcttcagccagaacttcaaggtggtggtggtggatggcaagaatgaaagtgagtacacagtgaagtggcaggacttcttcaccggccacgtggtgggggagccagacagccgggtgctggcccacatcagagatgatgatgtgatcatccgcatcaacacagatggagctgagtacaacatcgagcccctgtggaggtttgtgaatgacaccaaggacaagaggatgctggtgtacaagtctgaggacatcaagaatgtgtcccggctgcagagccccaaggtgtgtggctacctgaaggtggacaatgaggagctgctgcccaagggcctggtggaccgggagcccccagaggagctggtgcaccgggtgaagagaagagctgaccctgaccccatgaagaacacctgcaagctgctggtggtggccgaccaccgcttctaccgctacatgggccgcggggaggagagcaccaccaccaactacctgattgagctgattgacagagtggatgacatctacagaaacacctcctgggacaatgccggcttcaagggctacggcatccagatcgagcagatccgcatcctgaagagcccccaggaggtgaagccaggagagaagcactacaacatggccaagagctacccaaatgaggagaaggatgcctgggatgtgaagatgctgctggagcagttctcctttgatattgctgaggaggccagcaaggtgtgcctggcccacctgttcacctaccaggactttgacatgggcaccctgggcctggcctacgtgggcagcccccgggccaacagccatggaggagtgtgccccaaggcctactacagccctgtgggcaagaagaacatctacctgaacagcggcctgaccagcaccaagaactacggcaagaccatcctgaccaaggaggccgacctggtgaccacccatgagctgggccacaactttggagctgagcatgaccctgatggcctggccgagtgtgccccaaatgaagaccagggcggcaagtatgtgatgtaccccatcgctgtgtctggggaccacgagaacaacaagatgttcagcaactgcagcaagcagagcatctacaagaccatcgagagcaaggcccaggagtgcttccaggagaggagcaacaaggtgtgtggcaacagccgggtggatgaaggagaggagtgtgaccccggcatcatgtacctgaacaatgacacctgctgcaacagcgactgcaccctgaaggagggcgtgcagtgcagcgacaggaacagcccctgctgcaagaactgccagtttgaaacagcccagaagaagtgccaggaggccatcaatgccacctgcaagggcgtgtcctactgcaccggcaacagcagcgagtgccccccacctggaaatgcagaagatgacacagtgtgcctggacctgggcaagtgcaaggatggcaagtgcatccccttctgtgagcgggagcagcagctggagagctgtgcctgcaatgaaacagacaacagctgcaaggtgtgctgccgggacctgagcggccgctgtgtgccctacgtggatgctgagcagaagaacctcttcctgaggaagggcaagccctgcaccgtgggcttctgtgacatgaatggaaaatgtgagaagagggtgcaggatgtgattgagcgcttctgggacttcatcgaccagctgagcatcaacaccttcggcaagttcctggccgacaacatcgtgggctctgtgctggtgttcagcctcatcttctggatccccttcagcatcctggtgcactgtgtggacaagaagctggacaagcagtatgagagcctgagcctcttccaccccagcaatgtggagatgctgagctccatggattctgcctctgtgcgcatcatcaagcccttccctgccccccagaccccaggccgcctgcagcctgcccctgtgatccccagcgccccagctgcccccaagctggaccaccagaggatggacaccatccaggaggaccccagcacagacagccacatggatgaagatggctttgagaaggaccccttccccaacagcagcacagctgccaagagctttgaggacctgacagaccaccctgtgaccaggtctgagaaggccgccagcttcaagctgcagaggcagaacagagtggacagcaaggagacagaatgttag

SEQ ID NO: 135891 - DNA, 777 bp, Artificial Sequence
  derived and/or modified sequence
atgaggcagagcctgctcttcctgacctctgtggtgccctttgtgctggccccccggcccccagatgaccccggcttcggcccccaccagaggctggagaagctggacagcctgctgagtgactatgacatcctgagcctgagcaacatccagcagcacagcgtgaggaagagggacctgcagaccagcacccacgtggagaccctgctgaccttcagcgccctgaagaggcacttcaagctgtacctgaccagcagcacagagcgcttcagccagaacttcaaggtggtggtggtggatggcaagaatgaaagtgagtacacagtgaagtggcaggacttcttcaccggccacgtggtgggggagccagacagccgggtgctggcccacatcagagatgatgatgtgatcatccgcatcaacacagatggagctgagtacaacatcgagcccctgtggaggtttgtgaatgacaccaaggacaagaggatgctggtgtacaagtctgaggacatcaagaatgtgtcccggctgcagagccccaaggtgtgtggctacctgaaggtggacaatgaggagctgctgcccaagggcctggtggaccgggagcccccagaggagctggtgcaccgggtgaagagaagagctgaccctgaccccatgaagaacacctgcaagctgctggtggtggccgaccaccgcttctaccgctacatgggccgcggggaggagagcaccaccaccaactacctgatccacacagaccgggccaactag

SEQ ID NO: 135892 - DNA, 4349 bp, Artificial Sequence
  derived and/or modified sequence
acctgcacttctgggggcgtcgagcctggcggtagaatcttcccagtaggcggcgcgggagggaaaagaggattgaggggctaggccgggcggatcccgtcctcccccgatgtgagcagttttccgaaaccccgtcaggcgaaggctgcccagagaggtggagtcggtagcggggccgggaacatgaggcagtctctcctattcctgaccagcgtggttcctttcgtgctggcgccgcgacctccggatgacccgggcttcggcccccaccagagactcgagaagcttgattctttgctctcagactacgatattctctctttatctaatatccagcagcattcggtaagaaaaagagatctacagacttcaacacatgtagaaacactactaactttttcagctttgaaaaggcattttaaattatacctgacatcaagtactgaacgtttttcacaaaatttcaaggtcgtggtggtggatggtaaaaacgaaagcgagtacactgtaaaatggcaggacttcttcactggacacgtggttggtgagcctgactctagggttctagcccacataagagatgatgatgttataatcagaatcaacacagatggggccgaatataacatagagccactttggagatttgttaatgataccaaagacaaaagaatgttagtttataaatctgaagatatcaagaatgtttcacgtttgcagtctccaaaagtgtgtggttatttaaaagtggataatgaagagttgctcccaaaagggttagtagacagagaaccacctgaagagcttgttcatcgagtgaaaagaagagctgacccagatcccatgaagaacacgtgtaaattattggtggtagcagatcatcgcttctacagatacatgggcagaggggaagagagtacaactacaaattacttaatagagctaattgacagagttgatgacatctatcggaacacttcatgggataatgcaggttttaaaggctatggaatacagatagagcagattcgcattctcaagtctccacaagaggtaaaacctggtgaaaagcactacaacatggcaaaaagttacccaaatgaagaaaaggatgcttgggatgtgaagatgttgctagagcaatttagctttgatatagctgaggaagcatctaaagtttgcttggcacaccttttcacataccaagattttgatatgggaactcttggattagcttatgttggctctcccagagcaaacagccatggaggtgtttgtccaaaggcttattatagcccagttgggaagaaaaatatctatttgaatagtggtttgacgagcacaaagaattatggtaaaaccatccttacaaaggaagctgacctggttacaactcatgaattgggacataattttggagcagaacatgatccggatggtctagcagaatgtgccccgaatgaggaccagggagggaaatatgtcatgtatcccatagctgtgagtggcgatcacgagaacaataagatgttttcaaactgcagtaaacaatcaatctataagaccattgaaagtaaggcccaggagtgttttcaagaacgcagcaataaagtttgtgggaactcgagggtggatgaaggagaagagtgtgatcctggcatcatgtatctgaacaacgacacctgctgcaacagcgactgcacgttgaaggaaggtgtccagtgcagtgacaggaacagtccttgctgtaaaaactgtcagtttgagactgcccagaagaagtgccaggaggcgattaatgctacttgcaaaggcgtgtcctactgcacaggtaatagcagtgagtgcccgcctccaggaaatgctgaagatgacactgtttgcttggatcttggcaagtgtaaggatgggaaatgcatccctttctgcgagagggaacagcagctggagtcctgtgcatgtaatgaaactgacaactcctgcaaggtgtgctgcagggacctttctggccgctgtgtgccctatgtcgatgctgaacaaaagaacttatttttgaggaaaggaaagccctgtacagtaggattttgtgacatgaatggcaaatgtgagaaacgagtacaggatgtaattgaacgattttgggatttcattgaccagctgagcatcaatacttttggaaagtttttagcagacaacatcgttgggtctgtcctggttttctccttgatattttggattcctttcagcattcttgtccattgtgtggataagaaattggataaacagtatgaatctctgtctctgtttcaccccagtaacgtcgaaatgctgagcagcatggattctgcatcggttcgcattatcaaaccctttcctgcgccccagactccaggccgcctgcagcctgcccctgtgatcccttcggcgccagcagctccaaaactggaccaccagagaatggacaccatccaggaagaccccagcacagactcacatatggacgaggatgggtttgagaaggaccccttcccaaatagcagcacagctgccaagtcatttgaggatctcacggaccatccggtcaccagaagtgaaaaggctgcctcctttaaactgcagcgtcagaatcgtgttgacagcaaagaaacagagtgctaatttagttctcagctcttctgacttaagtgtgcaaaatatttttatagatttgacctacaaatcaatcacagcttgtattttgtgaagactgggaagtgacttagcagatgctggtcatgtgtttgaacttcctgcaggtaaacagttcttgtgtggtttggcccttctccttttgaaaaggtaaggtgaaggtgaatctagcttattttgaggctttcaggttttagtttttaaaatatcttttgacctgtggtgcaaaagcagaaaatacagctggattgggttatgaatatttacgtttttgtaaattaatcttttatattgataacagcactgactagggaaatgatcagtttttttttatacactgtaatgaaccgctgaatatgaggcatttggcatttatttgtgatgacaactggaatagttttttttttttttttttttttttgccttcaactaaaaacaaaggagataaatctagtatacattgtctctaaattgtgggtctatttctagttattacccagagtttttatgtagcagggaaaatatatatctaaatttagaaatcatttgggttaatatggctcttcataattctaagactaatgctctctagaaacctaaccacctaccttacagtgagggctatacatggtagccagttgaatttatggaatctaccaactgtttagggccctgatttgctgggcagtttttctgtattttataagtatcttcatgtatccctgttactgatagggatacatgctcttagaaaattcactattggctgggagtggtggctcatgcctgtaatcccagcacttggagaggctgaggttgcgccactacactccagcctgggtgacagagtgagactctgcctcaaaaaaaaaaaaaaaaaaaaaaaattcactatctacaaacctagaatatttaaaatacaaagattgcctgttttcaaacactattgaataagagggtgagatatttcttaacaacaacaacaacaaaaaaaacaggttgttttgaatgtgatgagccagccaggagatagaatactacctgcccttagggttgggggctgtccccacaagacttgatacttcagaaaccctttttattgacccacaagcagatatttgaattacttcttactttattgctccaggattctggatgggctgcatttactgtgtgaaggataaaaatcattagcctggattctgatttctataaattgccattaaaagctttttttcccctaagaactgaaatgtgctcaccagccaaaacattttaacttgtaaattttgagggcagttaaccaaacctgtgactaatcatatctcctcctaccccccatttccaaggacatttgttactcagatacttgttatactaatacttgaacttgtaccttatggtatttgctatcttttaactagtcatgatattcttatactttagttacacttttggaatttgatacaaggttgagtggggtgtgtgggtgtatgtatgagtgaaacagttctcaaaagaatgtaagaaaaaccatttttataaaattgtgactttttaaaaacatagtctttgtcatttatagaattaacaagctgctcagggtatattttatagctgtagcactgatatctgcattaataaatactgtcgaaacacaa

SEQ ID NO: 135893 - DNA, 2475 bp, Artificial Sequence
  derived and/or modified sequence
atgcggcagagcctgctgttcctgaccagcgtggtgcccttcgtgctggccccccggcctccagacgatcccggtttcggccctcaccagagactggaaaagttggatagtttactttcagactatgatatcctgtcactgagtaatatccagcaacattcggttcgcaaacgtgacctgcagacatcaacacacgtcgagacgctgctgacattctccgcactgaaaaggcattttaaattgtatctcactagctccactgagcggttcagccaaaactttaaggtggtggtcgtcgatgggaaaaatgaatcagaatacaccgtgaagtggcaggactttttcaccggacacgtagtgggcgagcccgattcaagggttctggctcatatcagagacgacgatgttattatacgcatcaataccgatggagctgagtataatatcgaaccactctggagattcgtaaacgacacgaaggacaagagaatgctggtgtataagtctgaagatattaagaacgtatccagattgcagagccctaaagtctgcggataccttaaggttgacaatgaagaactgctccctaagggtctcgtggacagggagccgcctgaagagctcgtacaccgggtgaagcgcagggccgatccagacccgatgaagaacacttgcaagctcctggtggtggctgaccataggttttataggtatatgggaaggggggaggaatcaaccacaaccaattacctcatcgagctgatcgatcgggtcgacgacatttatagaaacacaagctgggacaacgctgggttcaagggctacggaattcagattgaacagatccggattctaaagtcacctcaggaggtaaagcccggggaaaaacattacaacatggcaaagtcctacccaaacgaagaaaaagacgcctgggatgtgaaaatgctcctggagcagttttcttttgatatcgccgaggaggcgtcgaaagtgtgcctggcgcacctgtttacctaccaggatttcgatatgggaactctgggactggcttatgtcggtagtccacgcgccaatagccatgggggcgtgtgcccgaaagcatattactcacccgtgggcaaaaaaaatatctacttgaattccggactgacctccaccaaaaactacggaaagaccatcctcacaaaggaggcagacctggtgacaacccatgagctcggacataatttcggcgcagaacatgatcccgatggactggcagaatgcgctccaaatgaagaccaggggggaaaatatgttatgtaccccatcgcagtgtcaggagatcacgagaataacaagatgtttagtaattgcagtaaacagagcatctataaaacgatcgagagtaaggctcaagagtgcttccaagaacgctccaacaaggtctgcggcaactcccgtgttgatgagggcgaagaatgtgaccccggaattatgtatctgaacaatgatacctgctgcaatagtgattgcaccttaaaagagggcgtgcagtgttcagaccggaacagcccctgttgtaagaattgtcagttcgagaccgcgcagaaaaagtgtcaggaagctattaacgcaacttgtaagggagtttcgtattgcacaggcaatagttccgagtgcccaccgcccgggaatgcagaggatgatacagtctgtctcgatctcgggaagtgcaaggatggaaagtgtatcccattttgcgagcgcgagcagcagctggagtcgtgtgcctgtaacgagacagataatagctgcaaagtctgttgccgcgatctatccggacgatgcgtcccctatgtagatgctgagcagaaaaacctattcctgagaaaaggaaagccttgcacggtgggcttttgtgacatgaatggcaagtgtgagaaacgggtacaggacgtgatagagcgattttgggacttcattgaccagctgtctatcaatacctttggaaaatttcttgcggacaacatcgttggcagcgtccttgtgttctccctgatcttttggatcccattctccatcctcgtgcattgcgtcgacaagaagttagataaacagtatgagtcgctttcactctttcatccgagtaacgtcgagatgctcagcagcatggatagcgcctctgttcggatcataaagccattccctgctcctcaaacccctggaaggctgcagccggcccctgtcatcccctcggcgccagccgcccccaaactcgaccaccagcggatggacacgattcaagaggaccccagtacagacagtcacatggatgaggatggatttgagaaggacccctttcccaattcaagcactgccgctaagtcctttgaagatcttaccgaccaccccgtaacgcggtccgaaaaagctgcttcatttaagctccaaagacagaatcgagtcgactcaaaggaaactgaatgctag

SEQ ID NO: 135894 - DNA, 777 bp, Artificial Sequence
  derived and/or modified sequence
atgcggcagagcctgctgttcctgaccagcgtggtgcccttcgtgctggccccccgccctccagacgatccaggattcggcccccaccagcgcctagaaaaactggactcgctcttgtctgactacgacatcctctctctgagtaacatccaacaacacagcgtgagaaagagagatttgcagacaagcacccacgtagaaacattgctcacattctctgccctgaagcgacactttaagctgtacctcactagtagtacagagagattttcacagaatttcaaagttgtggtagtagatggcaagaacgaatccgagtataccgtgaaatggcaagacttctttaccggccacgtggtcggcgagccggattccagagttctggctcatatcagagatgacgacgtaattatccgtatcaatacagatggggccgagtataatatagagcctttgtggcggtttgtgaacgatacaaaagacaagagaatgctggtatataagtctgaagacattaagaacgtgtctcggctgcagtctccgaaagtctgtgggtatctgaaggtcgataatgaagagctcctgcctaaaggccttgtggatagggaacctccagaagaacttgtgcaccgcgttaagagacgcgcggatcccgacccgatgaagaatacgtgcaagcttctagtggtggcagatcatcgtttctaccgatacatgggtaggggggaagagagcaccacgaccaactacctcatccacacagatagagccaactag

SEQ ID NO: 135895 - DNA, 1881 bp, Artificial Sequence
  derived and/or modified sequence
cgccacctgcacttctgggggcgtcgagcctggcggtagaatcttcccagtaggcggcgcgggagggaaaagaggattgaggggctaggccgggcggatcccgtcctcccccgatgtgagcagttttccgaaaccccgtcaggcgaaggctgcccagagaggtggagtcggtagcggggccgggaacatgaggcagtctctcctattcctgaccagcgtggttcctttcgtgctggcgccgcgacctccggatgacccgggcttcggcccccaccagagactcgagaagcttgattctttgctctcagactacgatattctctctttatctaatatccagcagcattcggtaagaaaaagagatctacagacttcaacacatgtagaaacactactaactttttcagctttgaaaaggcattttaaattatacctgacatcaagtactgaacgtttttcacaaaatttcaaggtcgtggtggtggatggtaaaaacgaaagcgagtacactgtaaaatggcaggacttcttcactggacacgtggttggtgagcctgactctagggttctagcccacataagagatgatgatgttataatcagaatcaacacagatggggccgaatataacatagagccactttggagatttgttaatgataccaaagacaaaagaatgttagtttataaatctgaagatatcaagaatgtttcacgtttgcagtctccaaaagtgtgtggttatttaaaagtggataatgaagagttgctcccaaaagggttagtagacagagaaccacctgaagagcttgttcatcgagtgaaaagaagagctgacccagatcccatgaagaacacgtgtaaattattggtggtagcagatcatcgcttctacagatacatgggcagaggggaagagagtacaactacaaattacttaatacacacagatagagctaattgacagagttgatgacatctatcggaacacttcatgggataatgcaggttttaaaggctatggaatacagatagagcagttattatttgaataggtaacatgtacacagtacaaaagccagtgaaaagtaagtctctgcagcctgtttattgtcaaaccagttcctttccccaaagacattcatgtcactagtttcatatgtatctttctagagatgtcgtatgcaggtatagtgtatgtatatgtctgtatttgacacaacggtgctatgcagtacacttttacaccttgctttttcatttcacagtatgttggagagtacttcatgttcatgcatgtaaagctgcttcacttgttttattataaatagctgcatcatgtttgagtttcagggaacctgtaaattttctttttgctttaggcatttggaaccagtcgaagaaacaggaataatataggagattaaaacattaacttctttacatctgatgaaggatggattggagggtgtggtttagatgtgtatcatggtgggcttctaagtagttctatcccagatttgaccttgaccagccaccatcaaaactgcagagtccaccccagtaaacttaccacacagtggcagaggagaccagaatgggccttctctgcaggcaggcaggcaggcaggcaggcagagagactcacagaaactctgagctgagcatggtttccttctttatctcacacttactaatgggagcctttgttacttttttttttcttctttgcaggtttaatatgaatttgtctgaaatgcctgtataaggagaagactctattcttagccttttattcctttgatgcacaaagagatgtatattttattattctttcctgagttgtcgactgtagtcgtaataaatattttaggctcctgt

SEQ ID NO: 135896 - DNA, 2475 bp, Artificial Sequence
  derived and/or modified sequence
atgcgtcagagcttactctttctcacttcagtcgtccctttcgtgctggccccacgccctcccgacgacccaggctttggacctcaccagaggttggaaaaactggacagtttgctgtccgactacgacattctctccctatctaatatccagcaacactccgtgcggaagagagatctgcagactagcacacacgtcgagacactcttaaccttcagtgcactaaagcgtcacttcaagctttacctcacatcatctacggaaaggttctctcagaattttaaagtggtggttgtagatggcaaaaacgagtccgagtatacggttaagtggcaggacttttttaccggacacgtcgttggcgaacctgactcacgcgtactggcccatatccgggatgatgacgtgataatcaggatcaatacggatggagccgagtataacatcgagccactctggaggttcgtgaacgatactaaagataagcgcatgctggtgtataagtctgaggatatcaaaaacgtgtcgcgtctgcagtcacctaaagtctgcggctatctcaaagttgacaacgaggaactgctcccaaaagggctcgtcgatcgggagcccccagaggagcttgtccaccgtgtgaagaggagggcagacccagaccctatgaaaaacacctgtaagctattggtcgtggcagatcataggttctatcgctacatgggtcgcggagaggagtcaaccaccactaattacctgatcgagctgatcgatcgcgtcgacgatatttacaggaacacaagctgggacaacgccggattcaagggttatggaattcagatcgagcagatccgaattctcaaatccccacaggaagtgaaacccggagaaaagcactataacatggccaagtcgtacccgaacgaggagaaagacgcctgggatgtcaagatgttgctcgagcagtttagctttgatatcgccgaggaggcaagcaaggtatgcctggcccatctcttcacataccaagacttcgatatgggcacccttggactcgcctacgtaggctcgccaagagcgaattcccatgggggagtctgtcctaaagcctattactcaccggtagggaagaaaaacatttacctcaactcgggactgacctccacaaagaattacggtaagaccatactgacaaaagaggcagacttggtgaccacacacgagttaggtcacaacttcggtgcggaacacgatccggacggtctggctgaatgtgcgcctaatgaggatcagggtggcaaatatgtcatgtatcccattgctgtcagcggcgaccatgaaaataacaagatgttctccaattgtagtaagcaatccatctataaaactattgaaagtaaggcccaggagtgcttccaagagaggtcgaataaagtatgcgggaattccagggtggacgaaggtgaggaatgtgacccagggatcatgtatttgaacaacgatacctgctgtaattccgattgtactcttaaagagggggtgcagtgctccgatcggaacagcccatgctgcaagaattgccagttcgagaccgcccagaagaagtgccaggaggccatcaacgccacctgcaaaggagtgtcatactgcacagggaattcatccgaatgccccccacccggaaatgctgaagacgataccgtatgcctcgacctcgggaagtgcaaggacgggaagtgtattcccttctgcgaacgggagcaacagcttgagagctgcgcctgcaacgagacagacaacagctgcaaggtgtgttgtcgcgacctcagcggacggtgtgtcccatatgtcgacgcagagcagaaaaaccttttcttacgtaaaggaaaaccttgcactgtcggattttgtgacatgaacggcaaatgtgagaaacgggtacaagatgtcattgagagattctgggactttatagatcagctttctatcaacacttttggtaagttcctggcagacaacatcgttggttccgttctggtattctcccttatcttctggatcccgttctccattctcgtgcactgtgtggataagaaactggacaagcagtatgagtcactgtcgttattccatccctcaaatgtggaaatgctcagttcgatggattcagcttctgtgcgaattattaaaccctttccagcacctcaaacccccggacgcctgcaacccgctcccgtgatccctagcgcacccgcagctccaaaactggaccaccagagaatggatacaattcaggaagatccgagtacagacagccacatggacgaagatggattcgaaaaagatccgtttcctaattcttccacagcagccaagtcattcgaagatttgactgatcatccagtgactcggtccgagaaggccgcttcttttaagttacagaggcagaatcgggttgactccaaagagacggagtgctag

SEQ ID NO: 135897 - DNA, 777 bp, Artificial Sequence
  derived and/or modified sequence
atgagacagtctctgttatttttgacatccgtagtccctttcgtcctggctccaaggcccccagatgaccccggattcgggcctcaccagcgtcttgaaaagctagattccctactctcagattacgatattctaagccttagtaacatccagcagcattctgtaagaaagagggacctccaaacatcaactcatgtggaaaccctactcacattttcagccctgaagaggcactttaagctgtacctgacctcatccacggagagattttctcaaaatttcaaagtcgtcgttgttgacggcaagaacgaatcagaatacactgttaaatggcaggattttttcacgggtcacgtcgtgggcgagccagacagcagggttttggcccacataagggatgacgatgtgattattcgaatcaacaccgatggcgctgagtataatattgagcccctttggcggtttgtgaatgacaccaaggataaaaggatgctggtttacaaatctgaagatatcaagaacgttagccgtcttcagagtcctaaagtctgcggctatttaaaagttgataacgaggagttgctgccaaaagggctggtggatcgggagcccccagaggagctcgtgcatcgggtgaagcggagggcggaccccgaccctatgaagaacacctgcaaactgctggtcgtggccgaccatcgcttttatcggtacatgggtcgcggagaggagtctactaccaccaactatttgatccatacagatagggccaactag

SEQ ID NO: 135898 - DNA, 2475 bp, Artificial Sequence
  derived and/or modified sequence
atgagacagagcctgctgttcctgaccagcgtggtgcccttcgtgctggcccccagaccccccgacgaccccggcttcggcccccaccagagactggagaagctggacagcctgctgagcgactacgacatcctgagcctgagcaacatccagcagcacagcgtgagaaagagagacctgcagaccagcacccacgtggagaccctgctgaccttcagcgccctgaagagacacttcaagctgtacctgaccagcagcaccgagagattcagccagaacttcaaggtggtggtggtggacggcaagaacgagagcgagtacaccgtgaagtggcaggacttcttcaccggccacgtggtgggcgagcccgacagcagagtgctggcccacatcagagacgacgacgtgatcatcagaatcaacaccgacggcgccgagtacaacatcgagcccctgtggagattcgtgaacgacaccaaggacaagagaatgctggtgtacaagagcgaggacatcaagaacgtgagcagactgcagagccccaaggtgtgcggctacctgaaggtggacaacgaggagctgctgcccaagggcctggtggacagagagccccccgaggagctggtgcacagagtgaagagaagagccgaccccgaccccatgaagaacacctgcaagctgctggtggtggccgaccacagattctacagatacatgggcagaggcgaggagagcaccaccaccaactacctgatcgagctgatcgacagagtggacgacatctacagaaacaccagctgggacaacgccggcttcaagggctacggcatccagatcgagcagatcagaatcctgaagagcccccaggaggtgaagcccggcgagaagcactacaacatggccaagagctaccccaacgaggagaaggacgcctgggacgtgaagatgctgctggagcagttcagcttcgacatcgccgaggaggccagcaaggtgtgcctggcccacctgttcacctaccaggacttcgacatgggcaccctgggcctggcctacgtgggcagccccagagccaacagccacggcggcgtgtgccccaaggcctactacagccccgtgggcaagaagaacatctacctgaacagcggcctgaccagcaccaagaactacggcaagaccatcctgaccaaggaggccgacctggtgaccacccacgagctgggccacaacttcggcgccgagcacgaccccgacggcctggccgagtgcgcccccaacgaggaccagggcggcaagtacgtgatgtaccccatcgccgtgagcggcgaccacgagaacaacaagatgttcagcaactgcagcaagcagagcatctacaagaccatcgagagcaaggcccaggagtgcttccaggagagaagcaacaaggtgtgcggcaacagcagagtggacgagggcgaggagtgcgaccccggcatcatgtacctgaacaacgacacctgctgcaacagcgactgcaccctgaaggagggcgtgcagtgcagcgacagaaacagcccctgctgcaagaactgccagttcgagaccgcccagaagaagtgccaggaggccatcaacgccacctgcaagggcgtgagctactgcaccggcaacagcagcgagtgccccccccccggcaacgccgaggacgacaccgtgtgcctggacctgggcaagtgcaaggacggcaagtgcatccccttctgcgagagagagcagcagctggagagctgcgcctgcaacgagaccgacaacagctgcaaggtgtgctgcagagacctgagcggcagatgcgtgccctacgtggacgccgagcagaagaacctgttcctgagaaagggcaagccctgcaccgtgggcttctgcgacatgaacggcaagtgcgagaagagagtgcaggacgtgatcgagagattctgggacttcatcgaccagctgagcatcaacaccttcggcaagttcctggccgacaacatcgtgggcagcgtgctggtgttcagcctgatcttctggatccccttcagcatcctggtgcactgcgtggacaagaagctggacaagcagtacgagagcctgagcctgttccaccccagcaacgtggagatgctgagcagcatggacagcgccagcgtgagaatcatcaagcccttccccgccccccagacccccggcagactgcagcccgcccccgtgatccccagcgcccccgccgcccccaagctggaccaccagagaatggacaccatccaggaggaccccagcaccgacagccacatggacgaggacggcttcgagaaggaccccttccccaacagcagcaccgccgccaagagcttcgaggacctgaccgaccaccccgtgaccagaagcgagaaggccgccagcttcaagctgcagagacagaacagagtggacagcaaggagaccgagtgctag

SEQ ID NO: 135899 - DNA, 777 bp, Artificial Sequence
  derived and/or modified sequence
atgagacagagcctgctgttcctgaccagcgtggtgcccttcgtgctggcccccagaccccccgacgaccccggcttcggcccccaccagagactggagaagctggacagcctgctgagcgactacgacatcctgagcctgagcaacatccagcagcacagcgtgagaaagagagacctgcagaccagcacccacgtggagaccctgctgaccttcagcgccctgaagagacacttcaagctgtacctgaccagcagcaccgagagattcagccagaacttcaaggtggtggtggtggacggcaagaacgagagcgagtacaccgtgaagtggcaggacttcttcaccggccacgtggtgggcgagcccgacagcagagtgctggcccacatcagagacgacgacgtgatcatcagaatcaacaccgacggcgccgagtacaacatcgagcccctgtggagattcgtgaacgacaccaaggacaagagaatgctggtgtacaagagcgaggacatcaagaacgtgagcagactgcagagccccaaggtgtgcggctacctgaaggtggacaacgaggagctgctgcccaagggcctggtggacagagagccccccgaggagctggtgcacagagtgaagagaagagccgaccccgaccccatgaagaacacctgcaagctgctggtggtggccgaccacagattctacagatacatgggcagaggcgaggagagcaccaccaccaactacctgatccacaccgacagagccaactag

SEQ ID NO: 135900 - protein, 1199 aa, Artificial Sequence
  derived and/or modified sequence
MPLTGVEPARMNRKKGDKGFESPRPYKLTHQVVCINNINFQRKSVVGFVELTIFPTVANLNRIKLNSKQCRIYRVRINDLEAAFIYNDPTLEVCHSESKQRNLNYFSNAYAAAVSAVDPDAGNGELCIKVPSELWKHVDELKVLKIHINFSLDQPKGGLHFVVPSVEGSMAERGAHVFSCGYQNSTRFWFPCVDSYSELCTWKLEFTVDAAMVAVSNGDLVETVYTHDMRKKTFHYMLTIPTAASNISLAIGPFEILVDPYMHEVTHFCLPQLLPLLKHTTSYLHEVFEFYEEILTCRYPYSCFKTVFIDEAYVEVAAYASMSIFSTNLLHSAMIIDETPLTRRCLAQSLAQQFFGCFISRMSWSDEWVLKGISGYIYGLWMKKTFGVNEYRHWIKEELDKIVAYELKTGGVLLHPIFGGGKEKDNPASHLHFSIKHPHTLSWEYYSMFQCKAHLVMRLIENRISMEFMLQVFNKLLSLASTASSQKFQSHMWSQMLVSTSGFLKSISNVSGKDIQPLIKQWVDQSGVVKFYGSFAFNRKRNVLELEIKQDYTSPGTQKYVGPLKVTVQELDGSFNHTLQIEENSLKHDIPCHSKSRRNKKKKIPLMNGEEVDMDLSAMDADSPLLWIRIDPDMSVLRKVEFEQADFMWQYQLRYERDVVAQQESILALEKFPTPASRLALTDILEQEQCFYRVRMSACFCLAKIANSMVSTWTGPPAMKSLFTRMFCCKSCPNIVKTNNFMSFQSYFLQKTMPVAMALLRDVHNLCPKEVLTFILDLIKYNDNRKNKFSDNYYRAEMIDALANSVTPAVSVNNEVRTLDNLNPDVRLILEEITRFLNMEKLLPSYRHTITVSCLRAIRVLQKNGHVPSDPALFKSYAEYGHFVDIRIAALEAVVDYTKVDRSYEELQWLLNMIQNDPVPYVRHKILNMLTKNPPFTKNMESPLCNEALVDQLWKLMNSGTSHDWRLRCGAVDLYFTLFGLSRPSCLPLPELGLVLNLKEKKAVLNPTIIPESVAGNQEAANNPSSHPQLVGFQNPFSSSQDEEEIDMDTVHDSQAFISHHLNMLERPSTPGLSKYRPASSRSALIPQHSAGCDSTPTTKPQWSLELARKGTGKEQAPLEMSMHPAASAPLSVFTKESTASKHSDHHHHHHHEHKKKKKKHKHKHKHKHKHDSKEKDKEPFTFSSPASGRSIRSPSLSD

SEQ ID NO: 135901 - DNA, 5049 bp, Artificial Sequence
  derived and/or modified sequence
acagacaagatgtcggcggatggtagcttcgagcccttgcggagaggagcatctctgtgacagaagcttgtcgacggcggcttctaggagctagtcgaaggagcgaggttgaggcgggcagcgacccgtcaggtcgctcacctgggcaccggccagctgcgagacgtgacttggggaccgcaggggagtggagagtgtgaggtgccaaagactagtaatgccccgtatccccctaggaagccgggaagccaagctccgcgggaccgcttcatgccgctgactggtgtagagcccgccagaatgaacaggaagaaaggagacaagggctttgaaagcccaaggccatataaattaacccatcaggtcgtctgcatcaacaacataaatttccagagaaaatctgttgtgggatttgtggaactgactatatttcccacagttgcaaacttgaatagaatcaagttgaacagcaaacagtgtagaatataccgagtaaggatcaatgatttagaggctgcttttatttataatgacccaaccttggaagtttgtcacagtgaatcaaaacagagaaacctcaattatttttccaatgcttatgcagctgcagttagtgctgtggaccctgatgcaggaaatggagaactttgcattaaggttccatcagagctatggaaacacgttgatgagttaaaggtcctgaagatacacatcaatttttctttggatcagcccaaaggaggtcttcattttgtggtacccagtgtagagggaagtatggcagagagaggtgctcatgttttctcttgtgggtatcaaaattctacaagattttggttcccttgtgttgattcatactctgaattgtgtacatggaaattagaatttacagtagatgctgcaatggttgctgtttctaatggcgatttggtggagacagtgtatactcatgatatgaggaagaaaactttccattatatgcttaccattcctacagcagcgtcaaatatctccttggccattggaccatttgaaatactggtagatccatacatgcatgaggttactcatttttgtttgccccaacttcttccattgctgaaacataccacatcataccttcatgaagtctttgaattttatgaagaaattcttacatgtcgttacccatactcctgttttaagactgtcttcattgatgaggcttatgttgaagtggctgcttatgcttccatgagcatttttagcacaaatcttttacacagtgccatgattatagatgagacacctttgactagaaggtgtttagcccaatccttggcccagcagttttttggttgtttcatatctagaatgtcttggtctgatgaatgggtgctgaagggaatttcaggctatatctatggactttggatgaaaaaaacttttggtgttaatgagtaccgccattggattaaagaggagctagacaaaatagtggcatatgaactaaaaactggtggggttttactacatcccatatttggtggaggaaaagagaaggataatccggcttcccatctacacttttcaataaagcatccacatacactgtcctgggaatactacactatgtttcagtgtaaagcccaccttgtgatgagattgattgaaaataggatcagtatggaatttatgctacaagttttcaataaactgctaagtctggctagtactgcttcatctcagaagttccagtcacatatgtggagtcagatgttggtttccacatctgggtttttgaaatccatttcaaatgtctctggcaaagatattcagccgttaataaagcagtgggtagatcagagtggagtggtaaaattttatggaagttttgcatttaatagaaaacgaaatgtcttggaactggaaataaaacaggactatacatctcctggaactcagaaatacgtgggaccacttaaagtgacagtgcaggagttagatggatccttcaatcatacactgcaaattgaagaaaacagccttaaacatgatataccctgccattccaaaagtagaaggaataaaaagaaaaaaatcccactgatgaatggagaagaagttgatatggatctttctgcaatggatgctgattcccctttgctgtggataaggatagacccagatatgtcagtattgaggaaggtagaatttgagcaagctgattttatgtggcagtatcagctccgctatgagagagatgttgttgcacagcaggaatccattttggctttggaaaaattccctactccagcatctcggcttgcactcactgatatattagaacaagagcagtgtttctacagagtaagaatgtcagcttgcttctgtcttgcaaagattgcaaattcaatggtgagcacatggacaggaccaccagccatgaagtcactcttcactaggatgttttgttgtaaaagttgtccaaacattgtgaaaacaaacaactttatgagctttcaaagctattttctacagaagactatgccagttgcaatggctttattaagagatgttcataatctttgtcctaaagaagtcttaacatttattttagacttaatcaagtacaatgacaacaggaaaaataagttttcagataactattatcgtgcagaaatgattgatgccctggccaactctgttacacctgcagtcagtgtgaataatgaagttagaactttggataacttaaatcctgatgtgcgactcattcttgaagaaatcaccagatttttgaatatggaaaaacttcttccgagttacaggcataccatcactgtcagttgtttgagagccatacgggtacttcagaagaacggacatgtgccaagtgatccagctctttttaaatcttatgctgaatatggccactttgtggacattaggatagcagctttggaagcagttgttgattatactaaagtggacagaagttatgaagaactgcaatggctacttaatatgattcagaatgaccctgtaccctatgtaaggcataagattctcaacatgttgactaagaacccaccatttactaagaacatggagtctcccttatgcaatgaagccctggtagatcaactttggaaacttatgaattctggtacttcacatgactggaggttacggtgtggtgctgtggacttgtacttcacactttttggcctcagtagaccttcctgtttacccttgccagagcttgggttggttcttaatctaaaggagaaaaaagctgtcttgaatcctaccataattccagagtcagtagcaggcaaccaagaagctgcaaataatccaagcagtcacccacagctagttggatttcagaaccctttttccagttctcaagatgaggaggagattgatatggatactgttcatgatagccaggccttcatttcccatcatttaaacatgcttgaaaggccgtcaactccagggctctcgaaatatcggccagctagctcccgatctgctttaataccccagcactcagcaggctgtgacagcacacccaccacaaaaccccagtggagtttggaacttgcacggaagggaacaggtaaagaacaagcacctttggagatgagtatgcatccagcggcaagcgctccactctcagtctttactaaggaatctacagcctccaaacacagtgaccaccatcaccaccatcaccatgagcacaagaaaaagaagaagaagcataaacataagcacaaacacaagcataagcatgacagtaaagaaaaggacaaggagcctttcactttctccagccctgccagtggcaggtctattcgttctccttccctttcagactgagaaggggacaaaaagacctttcctttcatgtccagaagaatgtatgtaactaaagctttgtcctctgtgaagaattataaaagggaggggggaaaggattcgcctctcctacagaaattctgaattcatttaagttctaagcatttgatttatgttatttatacagttgggatctaattaggaaaatgtgttttgtagttctggataaactatttcatccgctgtttcctccccaaaacacacacacagagcaaactccctttcataaaagccctcatatccactggcagtccccgttcgcatcatggtctccatgtgtaccgccaaagtcaattatgtttgaaagcctttggtggatgttatggggcaaagttatgatttacacagaagcaactgccaaatctgtggtgcaaccactatctccagtgaaatattgtataacaccatttggaactactgaaaagacagtggcttttctacagtactcttccttattgcaccatttttgtattaacgtagaaactaagcatcagaatttatgaacaaagaatatgttatttttccttttgctctaaaatactgagatttggggaagcaattcttttttaaaaaaattttgaataactatcttttgataacacattcggcggttacgatgttggaatttagcagaactatcaaatccaaaattattttcaaatcaagatgtttaaattataagtttttttgttttgttttccagtaagtataaatgaaaatattcatatgtaaaatatgttttgcttaatgtggacaatttacacacccaacacatactgtttccaaaattatttctatatgacacaaagtatgatacctttaaaaaggtgagcttatatattgtttattaacctggaaatagacaatttggctctcataccataagcatttaaaaacatatgaaatattttgatttctttatatggtggtgtgtttttatttctgaattttccatgtgctttaatatttgtttaagaatattttttatatctgttcaatttttatcattccccttatcattagaaagtttgacaaaaatacttgaatcttggacctctaaatatacttttagttgtgtttaacttgtttaataaataactttttaagttgaaaaaaaaaaaaaaaaaaaaaaaaaaaaaa

SEQ ID NO: 135902 - DNA, 3600 bp, Artificial Sequence
  derived and/or modified sequence
atgcccctaaccggagttgagcctgccaggatgaaccgtaagaaaggggataagggtttcgagtccccgcgaccctataagctgacccaccaggttgtgtgtataaataacataaatttccaaaggaaaagcgtggtagggtttgtggagctcacaatatttcccacagtcgcgaacctgaatagaattaagttgaattcaaagcaatgccggatctaccgggtgcggatcaacgatctcgaagctgcatttatctataatgaccccactctcgaggtctgccattccgagtctaagcagaggaatctcaactacttttcaaacgcgtacgccgcagccgtctcggctgtggaccccgatgccggcaatggtgaattgtgcataaaggtgccctccgaactgtggaaacatgttgacgaacttaaagtactcaagattcacataaactttagtcttgaccagcctaaaggaggactacatttcgtggtgccttctgtagaaggttctatggccgaaaggggggctcacgtgttttcctgtggatatcagaattcgactcgtttttggtttccttgcgttgacagctactccgagctatgcacttggaaacttgaatttacggtggatgctgccatggtggctgtctcaaacggcgatttggtcgagactgtatatacacatgatatgcgcaaaaagacttttcactatatgctcactattccaacggctgcctctaatatttctctcgccattggcccttttgagatcctggtcgacccttacatgcacgaggtgacgcatttttgccttcctcagctgttaccccttctgaaacataccaccagttaccttcatgaagtgttcgaattttatgaggagattctgacgtgtcggtacccatactcatgtttcaaaacggtttttatcgacgaagcttatgtggaagtagctgcctacgcaagcatgtcaatattcagcaccaatctgttacacagcgccatgatcatagatgagacaccccttacacgacgatgtctcgcgcagtctctggcacagcagttttttggatgtttcatcagcaggatgtcatggagtgatgaatgggtgctgaagggaatcagcggctacatatacggactctggatgaaaaaaaccttcggcgtcaatgaatacaggcattggatcaaagaagaactggataaaattgttgcctatgaactaaagactggtggcgtcctgctccatcctatttttggggggggaaaggagaaagacaacccagcatctcatctgcacttttcaatcaagcatccacataccctgtcatgggaatattattctatgttccagtgcaaagcccacctcgtcatgagactcattgaaaataggatttcaatggaattcatgctgcaggtctttaacaaactactatctttagcatccacagcctcatctcagaaatttcaaagtcatatgtggtctcagatgctggtgagcacttcaggttttctgaagagcatcagcaatgtcagcgggaaggacatccagccgctgatcaaacagtgggttgaccagagcggggtggttaaattttacggctcctttgcatttaacaggaaacgaaatgttctggagctagaaatcaagcaagattacacgtcccctggcacacagaaatatgtgggaccactcaaggtcaccgtgcaggagttggacggtagtttcaatcatacattgcaaattgaggaaaacagcctgaagcacgatattccttgtcattcaaaaagtaggcgcaataaaaaaaagaagattccgctgatgaacggcgaggaagtagacatggacctctcggctatggatgctgattcacccctgctctggatcaggattgaccccgatatgagtgttctccggaaggtcgagttcgaacaggccgacttcatgtggcagtatcagctgaggtacgagagggacgtagtggcccagcaggagagcattctggctcttgagaagtttccgaccccagccagcaggctcgcactgacagatattctggaacaggagcaatgcttctatcgggttcggatgtccgcctgcttttgcttagctaagatcgccaacagtatggtctctacgtggaccggaccccccgccatgaaaagcctattcactcgaatgttctgttgcaaatcttgccccaacatcgtgaaaacgaacaatttcatgtcctttcagtcctattttcttcagaagaccatgccggtggctatggccctactgcgagacgtgcacaacctgtgtccaaaagaagtgttgacctttattctcgacttaattaagtacaatgacaaccgaaagaataaattttctgacaactattacagagccgagatgattgacgctctggctaatagcgtcaccccagctgtgtcggtgaacaacgaggtgaggaccctggacaatcttaacccagacgtccgactgattttggaggaaatcacccgcttcctgaacatggaaaaactcctgcctagctacaggcacacaattacagtgtcctgtttgcgcgccatccgtgtgttgcagaagaacggccacgtgccaagtgatcccgcacttttcaagtcttacgccgaatatggccactttgtggacatccgcatagctgcccttgaagcagtggtggattacacgaaggtggacagatcttatgaagagctgcaatggctattgaacatgatacagaacgaccccgtcccttacgtgcggcataagattttgaacatgctgactaaaaaccccccttttacgaaaaacatggagtctcccctgtgcaatgaggcattggtggaccagctgtggaagctcatgaattcgggcacttcacacgattggcgccttcggtgcggagccgtcgatctctattttaccctgttcggattgagcaggcccagctgtttaccactaccagaactcggccttgtactcaatcttaaagagaaaaaggcagtgctgaacccgacgatcattccagaatccgttgccggtaatcaggaggctgctaacaaccctagctcccacccccagcttgtcggctttcagaatccatttagctcgagccaggatgaagaagaaatcgatatggatacagttcacgatagccaggcgtttatttcacaccatcttaacatgctcgaaaggccctccacgccgggcctttccaaatacaggccggcatcttcccgctctgccctcatcccgcagcacagtgctgggtgtgactccactcccactaccaagcctcaatggtctctagagctggcaagaaaggggacagggaaagaacaggcacctctggaaatgagcatgcaccccgccgcctcagcccctctcagcgtattcacaaaagagtcaaccgcgagcaagcactcagatcatcaccaccatcaccatcacgagcacaagaagaaaaaaaaaaagcacaagcataagcataagcacaaacacaagcacgatagcaaagagaaagacaaggagccttttacattttcctcaccagctagcggccggagtattagatcaccctccctgtccgattag

SEQ ID NO: 135903 - DNA, 3600 bp, Artificial Sequence
  derived and/or modified sequence
atgcccctgactggagtggagcccgccaggatgaacaggaagaagggggacaagggctttgagagcccccggccctacaagctgacccaccaggtggtgtgcatcaacaacatcaacttccagaggaagtctgtggtgggctttgtggagctgaccatcttccccaccgtggccaacctgaaccgcatcaagctgaacagcaagcagtgccgcatctacagagtgcgcatcaatgacctggaggccgccttcatctacaatgaccccaccctggaggtgtgccacagcgagagcaagcagaggaacctgaactacttcagcaatgcctatgctgctgctgtgtctgctgtggaccctgatgctggaaatggagagctgtgcatcaaggtgcccagcgagctgtggaagcacgtggatgagctgaaggtgctgaagatccacatcaacttcagcctggaccagcccaagggcggcctgcactttgtggtgcccagcgtggagggctccatggccgagcggggggcccacgtgttcagctgtggctaccagaacagcacccgcttctggttcccctgtgtggacagctacagcgagctgtgcacctggaagctggagttcaccgtggatgctgccatggtggccgtgtccaatggagacctggtggagaccgtgtacacccatgacatgaggaagaagaccttccactacatgctgaccatccccacagctgccagcaacatcagcctggccatcggcccctttgagatcctggtggacccctacatgcatgaggtgacccacttctgcctgccccagctgctgcccctgctgaagcacaccaccagctacctgcacgaggtgtttgagttctatgaggagatcctgacctgccgctacccctacagctgcttcaagacagtgttcattgatgaggcctacgtggaggtggccgcctatgcctccatgagcatcttcagcaccaacctgctgcacagcgccatgatcattgatgagacccccctgacccggcgctgcctggcccagagcctggcccagcagttcttcggctgcttcatcagcaggatgtcctggagcgatgagtgggtgctgaagggcatcagcggctacatctacggcctgtggatgaagaagaccttcggcgtgaatgagtaccgccactggatcaaggaggagctggacaagatcgtggcctatgagctgaagacaggaggagtgctgctgcaccccatctttggaggcggcaaggagaaggacaacccagccagccacctgcacttcagcatcaagcacccccacaccctgtcctgggagtactacagcatgttccagtgcaaggcccacctggtgatgaggctgattgaaaatcgcatctccatggagttcatgctgcaggtgttcaacaagctgctgagcctggccagcacagccagcagccagaagttccagagccacatgtggagccagatgctggtgtccaccagcggcttcctgaagagcatcagcaatgtgtctgggaaggacatccagcccctcatcaagcagtgggtggaccagagcggcgtggtgaagttctacggcagctttgccttcaacaggaagagaaatgtgctggagctggagatcaagcaggactacaccagccctggcacccagaagtatgtgggccccctgaaggtgacagtgcaggagctggatggcagcttcaaccacaccctgcagatcgaggagaacagcctgaagcatgacatcccctgccacagcaagagcagaagaaacaagaagaagaagatccccctgatgaatggagaggaggtggacatggacctgagcgccatggatgctgacagccccctgctgtggatcagaattgatcctgacatgtctgtgctgaggaaggtggagtttgagcaggccgacttcatgtggcagtaccagctgcgctatgaaagagatgtggtggcccagcaggagagcatcctggccctggagaagttccccaccccagccagccggctggccctgacagacatcctggagcaggagcagtgcttctacagagtgaggatgtctgcctgcttctgcctggccaagatcgccaacagcatggtgtccacctggacaggccccccagccatgaagagcctcttcaccaggatgttctgctgcaagagctgccccaacatcgtgaagaccaacaacttcatgtccttccagagctacttcctgcagaagaccatgcctgtggccatggccctgctgagagatgtgcacaacctgtgccccaaggaggtgctgaccttcatcctggacctgatcaagtacaatgacaacaggaagaacaagttcagtgacaactactacagagctgagatgattgatgccctggccaacagcgtgaccccagctgtgtctgtgaacaatgaggtgaggaccctggacaacctgaacccagatgtgcggctcatcctggaggagatcacccgcttcctgaacatggagaagctgctgcccagctaccgccacaccatcaccgtgtcctgcctgcgggccatccgggtgctgcagaagaatggccacgtgcccagcgaccctgccctcttcaagagctatgcagaatatggccactttgtggacatcagaattgctgccctggaggccgtggtggactacaccaaggtggacaggagctatgaggagctgcagtggctgctgaacatgatccagaatgaccctgtgccctacgtgcgccacaagatcctgaacatgctgaccaagaacccccccttcaccaagaacatggagagccccctgtgcaatgaggccctggtggaccagctgtggaagctgatgaacagcggcaccagccatgactggaggctgcgctgtggggctgtggacctgtacttcaccctgtttggcctgagccggcccagctgcctgcccctgcctgagctgggcctggtgctgaacctgaaggagaagaaggctgtgctgaaccccaccatcatccctgagagcgtggccggcaaccaggaggccgccaacaaccccagcagccacccccagctggtgggcttccagaaccccttcagcagcagccaggatgaggaggagattgacatggacacagtgcatgacagccaggccttcatcagccaccacctgaacatgctggagcggcccagcaccccaggcctgagcaagtacagacctgccagcagccgcagcgccctgatcccccagcacagcgctggctgtgacagcacccccaccaccaagccccagtggagcctggagctggccaggaagggcaccgggaaggagcaggcccccctggagatgtccatgcaccctgctgccagcgcccccctgagcgtcttcaccaaggagagcacagccagcaagcacagcgaccaccaccaccaccaccaccacgagcacaagaagaagaagaagaagcacaagcacaagcacaagcacaagcacaagcatgacagcaaggagaaggacaaggagcccttcaccttcagcagccctgccagcggccgcagcatccgcagccccagcctgagtgactag

SEQ ID NO: 135904 - DNA, 3600 bp, Artificial Sequence
  derived and/or modified sequence
atgcccctgaccggcgtggagcccgcccggatgaaccggaagaagggggataaagggtttgaatcaccaaggccttacaagctgacccatcaggtagtttgcattaataacattaacttccagaggaaaagtgtagtgggtttcgttgagctaacaatttttccgacggtggcgaaccttaacaggattaaattgaattctaaacaatgtagaatctaccgagtgaggataaatgacctggaggctgcgtttatctataacgaccccaccctcgaagtatgccactctgaaagcaaacagcgcaacttaaattatttttccaacgcctacgcggccgctgtaagcgccgtggaccctgacgccggaaatggcgagctctgcatcaaggtccctagcgagctgtggaaacacgtggacgagctcaaagttcttaagattcacattaatttttcactcgatcagccaaaaggtgggttacactttgtggtgccatccgtggagggctctatggccgagagaggcgctcacgtgttttcttgtggttaccagaacagtacaaggttctggttcccctgcgtggattcttactcagaactgtgcacatggaagctcgaattcactgtggatgccgctatggtggcagtgagcaatggtgacttggtcgagacagtgtatacacacgatatgagaaagaagacattccattacatgctcactattcccacggctgcaagcaatatcagtctggcaatagggccttttgagatcctcgtggatccatacatgcatgaggtgactcatttctgtctaccccaactgctgccactgctgaagcacaccacttcctacctgcacgaggttttcgagttctatgaggaaatcttgacttgcagatacccttattcttgttttaagaccgtatttatagacgaagcctacgttgaagtggcagcttacgctagtatgagcatcttctctacaaatctcttgcattccgcaatgatcatagacgagacaccgctgacacgcagatgcctggctcagtcgctggcccagcagttcttcgggtgcttcattagtcgaatgtcttggagtgatgaatgggtcttgaaggggatctccggctacatttacgggttgtggatgaagaagacatttggcgtaaacgagtatcggcactggatcaaagaggaacttgataaaattgtggcttatgagctcaagacaggcggagtgttgctccacccgattttcggcggtggcaaagaaaaggataatccggcttcgcatctacactttagcattaagcacccccacaccctgtcatgggagtactactctatgtttcagtgcaaggctcaccttgtgatgcgcctgattgagaaccgcatatctatggaattcatgctgcaggtcttcaacaagctcttatccctggcatccactgcgagtagccagaaattccagtcccatatgtggtcgcagatgttagtgtccaccagcgggttcctgaagagtatctctaacgtaagtggaaaagatatccaacccttaattaaacagtgggtggatcaaagcggcgtagtgaaattctacggctcctttgctttcaatcgtaagaggaacgtgctggaattagagattaaacaggattacacttccccggggactcagaagtatgtaggccccctgaaggttactgtccaagagcttgacggaagtttcaatcacacactccagatcgaggagaactctctgaagcacgacattccctgccacagcaagtctaggcgtaataagaagaagaagatccctcttatgaatggagaagaagttgacatggacctcagcgcgatggatgcagatagtcctctattatggatccggatagatccggacatgtccgtcctgcgaaaggtggaattcgagcaagccgattttatgtggcaatatcagctcagatacgaacgggatgttgttgcccaacaggagagcatattagcgctggagaagttccctaccccagcctctcgcctggctctcacagacattcttgaacaggaacagtgcttctacagagtgcggatgtctgcctgcttttgtctggccaagattgcgaattcgatggtgagcacctggacgggaccgccagccatgaaatccctcttcacacgcatgttttgctgcaagagttgtccgaacattgtgaagacgaataacttcatgtcctttcagagctactttctgcagaagaccatgcccgtggctatggcattactgcgggatgtgcataacctgtgcccgaaggaagttctaaccttcattctcgaccttattaagtacaacgataaccgcaaaaacaagttctctgacaattattatagggctgagatgatcgatgccttggcaaacagtgtaactcccgcggtgtccgtcaacaatgaggttcgaacactggacaatctaaatcccgatgtgcggttgatcctggaggaaataacccgattcttgaacatggaaaaactcctgccctcataccggcacacaatcactgtgtcctgcttgagagcaatccgggtgcttcagaaaaacggtcacgtacctagcgaccccgctttattcaaatcctacgccgagtacggccacttcgtggacatccggattgcggctctggaggctgtagttgactacacaaaggtggaccggtcctatgaagaactgcagtggctgctgaacatgatacaaaatgaccctgtaccatacgtgcgacacaagattctgaatatgttgacaaaaaatcccccctttacaaaaaacatggagtcccccctatgcaacgaggcactggtggatcagctgtggaagctgatgaacagtggtacatcacacgactggcgattgcgatgtggggctgtagacctgtatttcacactatttggtctgtcccggcccagttgtctgccgttaccagaactcggtctggtcctgaatctgaaggaaaaaaaagccgtcttaaacccgacaataattccagagtccgtggcagggaatcaggaagcggcaaacaatccctcttcccatccacagcttgtaggcttccagaaccctttcagttcaagccaagatgaagaggaaatagatatggacactgtccacgatagtcaggccttcatttcccaccaccttaatatgctcgaacgccctagtactcctgggctctctaaataccgtccagcctcgtccaggagcgcgcttatcccgcagcatagtgctggctgcgatagcacaccgaccactaagccccagtggagtctggagcttgccaggaagggcaccggtaaagagcaagcccccctcgagatgtccatgcaccccgcggcatccgcacctctgagcgtatttaccaaggagtccacagctagtaaacacagcgaccatcatcaccaccaccaccacgaacacaagaaaaaaaagaagaaacacaagcacaaacacaagcacaagcataagcacgacagcaaagaaaaagataaggagccctttacatttagtagtcctgcctccggccgctccattaggagcccatccctcagcgactag

SEQ ID NO: 135905 - DNA, 5048 bp, Artificial Sequence
  derived and/or modified sequence
acttccgctgacgtcggaggtcagaggttacagacaagatgtcggcggatggtagcttcgagcccttgcggagaggagcatctctgtgacagaagcttgtcgacggcggcttctaggagctagtcgaaggagcgaggttgaggcgggcagcgacccgtcaggtcgctcacctgggcaccggccagctgcgagacgtgacttggggaccgcaggggagtggagagtgtgaggtgccaaagactagtaatgccccgtatccccctaggaagccgggaagccaagctccgcgggaccgcttcatgccgctgactggtgtagagcccgccagaatgaacaggaagaaaggagacaagggctttgaaagcccaaggccatataaattaacccatcaggtcgtctgcatcaacaacataaatttccagagaaaatctgttgtgggatttgtggaactgactatatttcccacagttgcaaacttgaatagaatcaagttgaacagcaaacagtgtagaatataccgagtaaggatcaatgatttagaggctgcttttatttataatgacccaaccttggaagtttgtcacagtgaatcaaaacagagaaacctcaattatttttccaatgcttatgcagctgcagttagtgctgtggaccctgatgcaggaaatggagaactttgcattaaggttccatcagagctatggaaacacgttgatgagttaaaggtcctgaagatacacatcaatttttctttggatcagcccaaaggaggtcttcattttgtggtacccagtgtagagggaagtatggcagagagaggtgctcatgttttctcttgtgggtatcaaaattctacaagattttggttcccttgtgttgattcatactctgaattgtgtacatggaaattagaatttacagtagatgctgcaatggttgctgtttctaatggcgatttggtggagacagtgtatactcatgatatgaggaagaaaactttccattatatgcttaccattcctacagcagcgtcaaatatctccttggccattggaccatttgaaatactggtagatccatacatgcatgaggttactcatttttgtttgccccaacttcttccattgctgaaacataccacatcataccttcatgaagtctttgaattttatgaagaaattcttacatgtcgttacccatactcctgttttaagactgtcttcattgatgaggcttatgttgaagtggctgcttatgcttccatgagcatttttagcacaaatcttttacacagtgccatgattatagatgagacacctttgactagaaggtgtttagcccaatccttggcccagcagttttttggttgtttcatatctagaatgtcttggtctgatgaatgggtgctgaagggaatttcaggctatatctatggactttggatgaaaaaaacttttggtgttaatgagtaccgccattggattaaagaggagctagacaaaatagtggcatatgaactaaaaactggtggggttttactacatcccatatttggtggaggaaaagagaaggataatccggcttcccatctacacttttcaataaagcatccacatacactgtcctgggaatactacagtatgtttcagtgtaaagcccaccttgtgatgagattgattgaaaataggatcagtatggaatttatgctacaagttttcaataaactgctaagtctggctagtactgcttcatctcagaagttccagtcacatatgtggagtcagatgttggtttccacatctgggtttttgaaatccatttcaaatgtctctggcaaagatattcagccgttaataaagcagtgggtagatcagagtggagtggtaaaattttatggaagttttgcatttaatagaaaacgaaatgtcttggaactggaaataaaacaggactatacatctcctggaactcagaaatacgtgggaccacttaaagtgacagtgcaggagttagatggatccttcaatcatacactgcaaattgaagaaaacagccttaaacatgatataccctgccattccaaaagtagaaggaataaaaagaaaaaaatcccactgatgaatggagaagaagttgatatggatctttctgcaatggatgctgattcccctttgctgtggataaggatagacccagatatgtcagtattgaggaaggtagaatttgagcaagctgattttatgtggcagtatcagctccgctatgagagagatgttgttgcacagcaggaatccattttggctttggaaaaattccctactccagcatctcggcttgcactcactgatatattagaacaagagcagtgtttctacagagtaagaatgtcagcttgcttctgtcttgcaaagattgcaaattcaatggtgagcacatggacaggaccaccagccatgaagtcactcttcactaggatgttttgttgtaaaagttgtccaaacattgtgaaaacaaacaactttatgagctttcaaagctattttctacagaagactatgccagttgcaatggctttattaagagatgttcataatctttgtcctaaagaagtcttaacatttattttagacttaatcaagtacaatgacaacaggaaaaataagttttcagataactattatcgtgcagaaatgattgatgccctggccaactctgttacacctgcagtcagtgtgaataatgaagttagaactttggataacttaaatcctgatgtgcgactcattcttgaagaaatcaccagatttttgaatatggaaaaacttcttccgagttacaggcataccatcactgtcagttgtttgagagccatacgggtacttcagaagaacggacatgtgccaagtgatccagctctttttaaatcttatgctgaatatggccactttgtggacattaggatagcagctttggaagcagttgttgattatactaaagtggacagaagttatgaagaactgcaatggctacttaatatgattcagaatgaccctgtaccctatgtaaggcataagattctcaacatgttgactaagaacccaccatttactaagaacatggagtctcccttatgcaatgaagccctggtagatcaactttggaaacttatgaattctggtacttcacatgactggaggttacggtgtggtgctgtggacttgtacttcacactttttggcctcagtagaccttcctgtttacccttgccagagcttgggttggttcttaatctaaaggagaaaaaagctgtcttgaatcctaccataattccagagtcagtagcaggcaaccaagaagctgcaaataatccaagcagtcacccacagctagttggatttcagaaccctttttccagttctcaagatgaggaggagattgatatggatactgttcatgatagccaggccttcatttcccatcatttaaacatgcttgaaaggccgtcaactccagggctctcgaaatatcggccagctagctcccgatctgctttaataccccagcactcagcaggctgtgacagcacacccaccacaaaaccccagtggagtttggaacttgcacggaagggaacaggtaaagaacaagcacctttggagatgagtatgcatccagcggcaagcgctccactctcagtctttactaaggaatctacagcctccaaacacagtgaccaccatcaccaccatcaccatgagcacaagaaaaagaagaagaagcataaacataagcacaaacacaagcataagcatgacagtaaagaaaaggacaaggagcctttcactttctccagccctgccagtggcaggtctattcgttctccttccctttcagactgagaaggggacaaaaagacctttcctttcatgtccagaagaatgtatgtaactaaagctttgtcctctgtgaagaattataaaagggaggggggaaaggattcgcctctcctacagaaattctgaattcatttaagttctaagcatttgatttatgttatttatacagttgggatctaattaggaaaatgtgttttgtagttctggataaactatttcatccgctgtttcctccccaaaacacacacacagagcaaactccctttcataaaagccctcatatccactggcagtccccgttcgcatcatggtctccatgtgtaccgccaaagtcaattatgtttgaaagcctttggtggatgttatggggcaaagttatgatttacacagaagcaactgccaaatctgtggtgcaaccactatctccagtgaaatattgtataacaccatttggaactactgaaaagacagtggcttttctacagtactcttccttattgcaccatttttgtattaacgtagaaactaagcatcagaatttatgaacaaagaatatgttatttttccttttgctctaaaatactgagatttggggaagcaattcttttttaaaaaaattttgaataactatcttttgataacacattcggcggttacgatgttggaatttagcagaactatcaaatccaaaattattttcaaatcaagatgtttaaattataagtttttttgttttgttttccagtaagtataaatgaaaatattcatatgtaaaatatgttttgcttaatgtggacaatttacacacccaacacatactgtttccaaaattatttctatatgacacaaagtatgatacctttaaaaaggtgagcttatatattgtttattaacctggaaatagacaatttggctctcataccataagcatttaaaaacatatgaaatattttgatttctttatatggtggtgtgtttttatttctgaattttccatgtgctttaatatttgtttaagaatattttttatatctgttcaatttttatcattccccttatcattagaaagtttgacaaaaatacttgaatcttggacctctaaatatacttttagttgtgtttaacttgtttaataaataactttttaagttg

SEQ ID NO: 135906 - DNA, 3600 bp, Artificial Sequence
  derived and/or modified sequence
atgcccttgaccggtgtagagccagctagaatgaatcgtaagaaaggggacaagggtttcgagtctccacggccatacaagctgactcaccaggtggtgtgcatcaacaatattaatttccagaggaaatcagtcgtcggctttgtcgagctgacaatatttccaacagtggccaatctgaataggataaagttgaattccaaacagtgccggatctacagagtaaggatcaacgatcttgaagctgcctttatctacaatgacccaacgctggaggtgtgtcactcagagagtaaacagcgcaacctgaattatttctctaacgcttatgctgctgcggtaagtgccgttgatcctgatgctggtaacggagaactgtgcatcaaggtgcctagcgagctctggaagcacgttgacgagctgaaggtattgaagattcacatcaacttctcactggatcagcctaaggggggactccattttgtcgtgcctagcgtcgaggggtctatggcagagcgcggagcccatgtcttctcctgcggatatcaaaacagtacaaggttctggttcccatgcgtggatagctacagcgagctgtgcacctggaagctggaattcacagttgatgccgcaatggtggccgtgtctaacggtgatctcgtcgagacagtatacacccatgatatgagaaaaaaaaccttccactacatgttgacgatacccactgctgcctctaacatctcactggcaattggcccattcgaaatcttagtcgatccttacatgcatgaggtgactcacttttgcctacctcagctgcttccgcttttgaagcacaccaccagctatctgcatgaagtcttcgagttttacgaagaaatcttgacctgtcggtatccctattcatgctttaagaccgtcttcattgacgaagcatacgtcgaggttgcagcctatgccagcatgtcaatcttctcaacgaatctgctccactctgccatgatcatagatgaaacaccacttacgcgaaggtgcttagcacagtctctggctcagcagttctttggctgcttcatttctcggatgtcgtggtccgacgaatgggtcctaaaaggcatctcaggctacatctacggtctgtggatgaagaagaccttcggtgtcaacgagtaccgacactggattaaggaagagctcgataagatcgttgcatatgaacttaagacaggcggtgtactgctgcacccaatcttcggtggaggaaaagagaaggataatcccgcaagccatctgcacttttcaattaagcacccacatacgctctcatgggagtactattccatgttccaatgcaaagctcacctggtaatgcgcctgattgagaatcgcataagcatggaattcatgttgcaggtgttcaacaaactgctctcattggcttctacagccagctctcagaagtttcaaagccacatgtggagccagatgctcgtctcaaccagcggatttctgaaatctatttccaacgtatctgggaaagacattcagccccttataaagcagtgggtggatcaatctggggtcgttaagttttatggttccttcgccttcaacaggaaacggaacgttctggaattggagatcaagcaggattatacaagcccaggaacacagaagtatgttggacccttgaaggttacagtgcaggagttggatgggtcctttaaccacactctgcagatcgaggagaactccctaaagcatgacatcccctgccattcgaaaagccgcagaaataagaaaaagaaaatacctctcatgaacggggaggaggtggacatggacctgagcgctatggacgcagactccccgttgctgtggatcagaatagatcctgacatgtctgtcctgcggaaggtggagttcgaacaggcagattttatgtggcagtaccagctgaggtatgaacgggatgtagtggcccagcaggaatcaattctcgcccttgagaaattccctactccggcttctaggcttgcactcaccgatatcttggagcaagagcagtgtttttaccgcgtgcgaatgtcggcatgcttttgtctcgccaaaatcgccaacagtatggtttccacctggacgggccctccggctatgaagagcctttttacacgcatgttctgttgcaagtcttgtccaaatattgttaagaccaataatttcatgagcttccagagttattttctccagaagactatgccagtggcaatggctctgctgagagacgtgcataatctgtgcccgaaggaagtgctcactttcatactagatctgatcaaatataacgataaccggaaaaataagttttcagataactactatagggccgagatgatcgacgctctggccaacagcgttactccagcggtgtccgtgaataacgaggtacggacactggacaatctcaatcccgatgtgagacttattctcgaggagatcaccagatttctgaatatggagaaactattgccaagttaccggcacactatcactgtttcctgtctgcgagctattagggtgctgcaaaaaaatggtcatgtccccagtgatcccgctctgttcaaatcgtatgcggagtatggccacttcgtggacattcgaattgcagccctggaggccgtggtcgactacacaaaagtggatcgatcgtacgaggagctgcagtggctcctgaacatgatccagaatgatccggttccctatgtgcgccacaagatcttgaatatgctgacaaaaaatcctccctttaccaaaaatatggaatccccactttgtaatgaggcccttgtggaccagctgtggaagttaatgaacagcggaacaagccatgattggcgcttgagatgcggcgctgtggacctgtattttaccctttttggtctgagccgcccaagttgtctgccactgcctgagctgggtctcgtcttgaatctaaaagaaaagaaagcagttcttaacccgactattatccccgaatctgtcgccggaaaccaggaagccgctaataatccctccagtcaccctcagcttgtcgggttccagaatcctttctcctcaagccaggatgaagaggagattgacatggatacggtgcatgatagtcaggcattcatcagtcaccacctgaacatgctggagcgtccttccacccccggtctgtccaagtaccgcccagcttcaagtcggagtgctcttattcctcagcattctgcaggttgtgattccacccctaccacaaagccccaatggtcactagaactggctcgcaagggcacaggcaaagaacaggcccctttagaaatgtcgatgcacccagccgctagcgccccactctccgtgtttacaaaagagagcactgcttccaagcattctgaccatcatcaccaccatcaccatgagcacaagaagaagaagaaaaagcacaagcacaagcacaaacacaaacacaaacatgactcaaaagagaaggacaaggagccatttacctttagcagccctgctagtggacgatctatacggagcccctcactttcagactag

SEQ ID NO: 135907 - DNA, 3600 bp, Artificial Sequence
  derived and/or modified sequence
atgcccctgaccggcgtggagcccgccagaatgaacagaaagaagggcgacaagggcttcgagagccccagaccctacaagctgacccaccaggtggtgtgcatcaacaacatcaacttccagagaaagagcgtggtgggcttcgtggagctgaccatcttccccaccgtggccaacctgaacagaatcaagctgaacagcaagcagtgcagaatctacagagtgagaatcaacgacctggaggccgccttcatctacaacgaccccaccctggaggtgtgccacagcgagagcaagcagagaaacctgaactacttcagcaacgcctacgccgccgccgtgagcgccgtggaccccgacgccggcaacggcgagctgtgcatcaaggtgcccagcgagctgtggaagcacgtggacgagctgaaggtgctgaagatccacatcaacttcagcctggaccagcccaagggcggcctgcacttcgtggtgcccagcgtggagggcagcatggccgagagaggcgcccacgtgttcagctgcggctaccagaacagcaccagattctggttcccctgcgtggacagctacagcgagctgtgcacctggaagctggagttcaccgtggacgccgccatggtggccgtgagcaacggcgacctggtggagaccgtgtacacccacgacatgagaaagaagaccttccactacatgctgaccatccccaccgccgccagcaacatcagcctggccatcggccccttcgagatcctggtggacccctacatgcacgaggtgacccacttctgcctgccccagctgctgcccctgctgaagcacaccaccagctacctgcacgaggtgttcgagttctacgaggagatcctgacctgcagatacccctacagctgcttcaagaccgtgttcatcgacgaggcctacgtggaggtggccgcctacgccagcatgagcatcttcagcaccaacctgctgcacagcgccatgatcatcgacgagacccccctgaccagaagatgcctggcccagagcctggcccagcagttcttcggctgcttcatcagcagaatgagctggagcgacgagtgggtgctgaagggcatcagcggctacatctacggcctgtggatgaagaagaccttcggcgtgaacgagtacagacactggatcaaggaggagctggacaagatcgtggcctacgagctgaagaccggcggcgtgctgctgcaccccatcttcggcggcggcaaggagaaggacaaccccgccagccacctgcacttcagcatcaagcacccccacaccctgagctgggagtactacagcatgttccagtgcaaggcccacctggtgatgagactgatcgagaacagaatcagcatggagttcatgctgcaggtgttcaacaagctgctgagcctggccagcaccgccagcagccagaagttccagagccacatgtggagccagatgctggtgagcaccagcggcttcctgaagagcatcagcaacgtgagcggcaaggacatccagcccctgatcaagcagtgggtggaccagagcggcgtggtgaagttctacggcagcttcgccttcaacagaaagagaaacgtgctggagctggagatcaagcaggactacaccagccccggcacccagaagtacgtgggccccctgaaggtgaccgtgcaggagctggacggcagcttcaaccacaccctgcagatcgaggagaacagcctgaagcacgacatcccctgccacagcaagagcagaagaaacaagaagaagaagatccccctgatgaacggcgaggaggtggacatggacctgagcgccatggacgccgacagccccctgctgtggatcagaatcgaccccgacatgagcgtgctgagaaaggtggagttcgagcaggccgacttcatgtggcagtaccagctgagatacgagagagacgtggtggcccagcaggagagcatcctggccctggagaagttccccacccccgccagcagactggccctgaccgacatcctggagcaggagcagtgcttctacagagtgagaatgagcgcctgcttctgcctggccaagatcgccaacagcatggtgagcacctggaccggcccccccgccatgaagagcctgttcaccagaatgttctgctgcaagagctgccccaacatcgtgaagaccaacaacttcatgagcttccagagctacttcctgcagaagaccatgcccgtggccatggccctgctgagagacgtgcacaacctgtgccccaaggaggtgctgaccttcatcctggacctgatcaagtacaacgacaacagaaagaacaagttcagcgacaactactacagagccgagatgatcgacgccctggccaacagcgtgacccccgccgtgagcgtgaacaacgaggtgagaaccctggacaacctgaaccccgacgtgagactgatcctggaggagatcaccagattcctgaacatggagaagctgctgcccagctacagacacaccatcaccgtgagctgcctgagagccatcagagtgctgcagaagaacggccacgtgcccagcgaccccgccctgttcaagagctacgccgagtacggccacttcgtggacatcagaatcgccgccctggaggccgtggtggactacaccaaggtggacagaagctacgaggagctgcagtggctgctgaacatgatccagaacgaccccgtgccctacgtgagacacaagatcctgaacatgctgaccaagaacccccccttcaccaagaacatggagagccccctgtgcaacgaggccctggtggaccagctgtggaagctgatgaacagcggcaccagccacgactggagactgagatgcggcgccgtggacctgtacttcaccctgttcggcctgagcagacccagctgcctgcccctgcccgagctgggcctggtgctgaacctgaaggagaagaaggccgtgctgaaccccaccatcatccccgagagcgtggccggcaaccaggaggccgccaacaaccccagcagccacccccagctggtgggcttccagaaccccttcagcagcagccaggacgaggaggagatcgacatggacaccgtgcacgacagccaggccttcatcagccaccacctgaacatgctggagagacccagcacccccggcctgagcaagtacagacccgccagcagcagaagcgccctgatcccccagcacagcgccggctgcgacagcacccccaccaccaagccccagtggagcctggagctggccagaaagggcaccggcaaggagcaggcccccctggagatgagcatgcaccccgccgccagcgcccccctgagcgtgttcaccaaggagagcaccgccagcaagcacagcgaccaccaccaccaccaccaccacgagcacaagaagaagaagaagaagcacaagcacaagcacaagcacaagcacaagcacgacagcaaggagaaggacaaggagcccttcaccttcagcagccccgccagcggcagaagcatcagaagccccagcctgagcgactag

SEQ ID NO: 135908 - protein, 1085 aa, Artificial Sequence
  derived and/or modified sequence
MAAGSDLLDEVFFNSEVDEKVVSDLVGSLESQLAASAAHHHHLAPRTPEVRAAAAGALGNHVVSGSPAGAAGAGPAAPAEGAPGAAPEPPPAGRARPGGGGPQRPGPPSPRRPLVPAGPAPPAAKLRPPPEGSAGSCAPVPAAAAVAAGPEPAPAGPAKPAGPAALAARAGPGPGPGPGPGPGPGPGKPAGPGAAQTLNGSAALLNSHHAAAPAVSLVNNGPAALLPLPKPAAPGTVIQTPPFVGAAAPPAPAAPSPPAAPAPAAPAAAPPPPPPAPATLARPPGHPAGPPTAAPAVPPPAAAQNGGSAGAAPAPAPAAGGPAGVSGQPGPGAAAAAPAPGVKAESPKRVVQAAPPAAQTLAASGPASTAASMVIGPTMQGALPSPAAVPPPAPGTPTGLPKGAAGAVTQSLSRTPTATTSGIRATLTPTVLAPRLPQPPQNPTNIQNFQLPPGMVLVRSENGQLLMIPQQALAQMQAQAHAQPQTTMAPRPATPTSAPPVQISTVQAPGTPIIARQVTPTTIIKQVSQAQTTVQPSATLQRSPGVQPQLVLGGAAQTASLGTATAVQTGTPQRTVPGATTTSSAATETMENVKKCKNFLSTLIKLASSGKQSTETAANVKELVQNLLDGKIEAEDFTSRLYRELNSSPQPYLVPFLKRSLPALRQLTPDSAAFIQQSQQQPPPPTSQATTALTAVVLSSSVQRTAGKTAATVTSALQPPVLSLTQPTQVGVGKQGQPTPLVIQQPPKPGALIRPPQVTLTQTPMVALRQPHNRIMLTTPQQIQLNPLQPVPVVKPAVLPGTKALSAVSAQAAAAQKNKLKEPGGGSFRDDDDINDVASMAGVNLSEESARILATNSELVGTLTRSCKDETFLLQAPLQRRILEIGKKHGITELHPDVVSYVSHATQQRLQNLVEKISETAQQKNFSYKDDDRYEQASDVRAQLKFFEQLDQIEKQRKDEQEREILMRAAKSRSRQEDPEQLRLKQKAKEMQQQELAQMRQRDANLTALAAIGPRKKRKVDCPGPGSGAEGSGPGSVVPGSSGVGTPRQFTRQRITRVNLRDLIFCLENERETSHSLLLYKAFLK

SEQ ID NO: 135909 - protein, 949 aa, Artificial Sequence
  derived and/or modified sequence
GRGLLQQRGGRESGPAPPAAKLRPPPEGSAGSCAPVPAAAAVAAGPEPAPAGPAKPAGPAALAARAGPGPGPGPGPGPGPGPGKPAGPGAAQTLNGSAALLNSHHAAAPAVSLVNNGPAALLPLPKPAAPAAAPPPPPPAPATLARPPGHPAGPPTAAPAVPPPAAAQNGGSAGAAPAPAPAAGGPAGVSGQPGPGAAAAAPAPGVKAESPKRVVQAAPPAAQTLAASGPASTAASMVIGPTMQGALPSPAAVPPPAPGTPTGLPKGAAGAVTQSLSRTPTATTSGIRATLTPTVLAPRLPQPPQNPTNIQNFQLPPGMVLVRSENGQLLMIPQQALAQMQAQAHAQPQTTMAPRPATPTSAPPVQISTVQAPGTPIIARQVTPTTIIKQVSQAQTTVQPSATLQRSPGVQPQLVLGGAAQTASLGTATAVQTGTPQRTVPGATTTSSAATETMENVKKCKNFLSTLIKLASSGKQSTETAANVKELVQNLLDGKIEAEDFTSRLYRELNSSPQPYLVPFLKRSLPALRQLTPDSAAFIQQSQQQPPPPTSQATTALTAVVLSSSVQRTAGKTAATVTSALQPPVLSLTQPTQVGVGKQGQPTPLVIQQPPKPGALIRPPQVTLTQTPMVALRQPHNRIMLTTPQQIQLNPLQPVPVVKPAVLPGTKALSAVSAQAAAAQKNKLKEPGGGSFRDDDDINDVASMAGVNLSEESARILATNSELVGTLTRSCKDETFLLQAPLQRRILEIGKKHGITELHPDVVSYVSHATQQRLQNLVEKISETAQQKNFSYKDDDRYEQASDVRAQLKFFEQLDQIEKQRKDEQEREILMRAAKSRSRQEDPEQLRLKQKAKEMQQQELAQMRQRDANLTALAAIGPRKKRKVDCPGPGSGAEGSGPGSVVPGSSGVGTPRQFTRQRITRVNLRDLIFCLENERETSHSLLLYKAFLK

SEQ ID NO: 135910 - DNA, 4647 bp, Artificial Sequence
  derived and/or modified sequence
atggcggcgggctcggatctgctggacgaggtcttcttcaacagcgaggtggacgagaaagtggtgagcgacctggtgggctcgctggagtcgcagctggcggccagcgcggcccaccaccaccacctcgcgccgcgcacgcccgaggtgcgggccgcggccgccggcgcgctcgggaaccatgttgtgagcggcagcccggccggagccgcgggcgcagggccggccgcccccgccgagggcgcgcccggagcggcgccggagccgccccccgcaggtagagcgcggccggggggcggggggccgcagcgcccgggccccccctcaccgcgccgcccccttgtccccgcagggcccgcgccgcccgccgcgaagctgaggccgccgcccgagggcagcgcggggtcctgcgccccggtgcccgccgccgccgccgtcgccgcggggcccgagcccgcccccgccggccccgccaagcccgccggccccgccgcgctggccgcccgcgccggccccggccccgggcccggccccggccccggccccggccctggccctggcaagcccgccggccccggcgccgcgcaaactttgaatgggagcgccgcgctgctgaactcgcaccacgccgccgcacctgctgtcagcctggtcaacaacgggcccgccgcgctgctgccgctgcccaagcccgccgcccccggcactgtcatccagacgccccccttcgtgggcgccgccgcgccccccgcgcccgccgcgccctcgccccccgccgcccccgcgcccgccgcccccgccgccgccccgcccccgccaccccccgcgcccgccactctggcccggccgcccggccaccccgccggacccccgaccgccgcgcccgccgtgccgccccccgccgccgcccagaacgggggcagcgccggggcagcccccgcccccgccccggccgccgggggccccgcgggggtcagcggccaacccgggcccggcgcggcggctgcggcgccggcgccgggggtcaaggccgagtcgcccaagagggtggtgcaggcggcgcccccggcggcgcagaccctggcggccagcggcccggccagcacggcggccagcatggtcatcgggccaactatgcaaggggcgctgcccagcccggccgccgtcccgccgcccgcccccgggacccccaccgggctgcccaaaggcgcggccggcgcagtgacccagagcctgtcccggacgcccacggccaccaccagcgggattcgggccaccctgacgcccaccgtgctggccccccgcttgccgcagccgcctcagaacccgaccaacatccagaacttccagctgcccccaggaatggtcctcgtccgaagtgagaatgggcagttgttaatgattcctcagcaggccttggcccagatgcaggcgcaggcccatgcccagcctcagaccaccatggcgcctcgccctgccacccccacaagtgcccctcccgtccagatctccaccgtacaggcacctggaacacctatcattgcacggcaggtgaccccaactaccataattaagcaagtgtctcaggcccagacaacggtgcagcccagtgcaaccctgcagcgctcgcccggcgtccagcctcagctcgttctgggtggcgctgcccagacggcttcacttgggacggcgacggctgttcagacggggactcctcagcgcacggtaccaggggcgaccaccacttcctcagctgccacggaaactatggaaaacgtgaagaaatgtaaaaatttcctatctacgttaataaaactggcttcatctggcaagcagtctacagagacagcagctaatgtgaaagagctcgtgcagaatttactggatggaaaaatagaagcagaagatttcacaagcaggttataccgagaacttaattcttcacctcaaccttaccttgtgcctttcctgaagaggagcttacccgccttgagacagctgacccccgactccgcggccttcatccagcagagccagcagcagccgccaccgcccacctcgcaggccaccactgcgctcacggccgtggtgctgagtagctcggtccagcgcacggccgggaagacggcggccaccgtgaccagtgccctccagccccctgtgctcagcctcacgcagcccacgcaggtcggcgtcggcaagcaggggcaacccacaccgctggtcatccagcagcctccgaagccaggagccctgatccggcccccgcaggtgacgttgacgcagacacccatggtcgccctgcggcagcctcacaaccggatcatgctcaccacgcctcagcagatccagctgaacccactgcagccagtccctgtggtgaaacccgccgtgttacctggaaccaaagccctttctgctgtctcggcacaagcagctgctgcacagaaaaataaactcaaggagcctgggggaggttcgtttcgggacgatgatgacattaatgatgttgcatcgatggctggagtaaacttgtcagaagaaagtgcaagaatattagccacgaactctgaattggtgggcacgctaacgcggtcctgtaaagatgaaaccttcctcctccaagcgcctttgcagagaagaatattagaaataggtaaaaaacatggtataacggaattacatccagatgtagtaagttatgtatcacatgccacgcaacaaaggctacagaatcttgtagagaaaatatcagaaacagctcagcagaagaacttttcttacaaggatgacgacagatatgagcaggcgagtgacgtccgggcacagctcaagttttttgaacagcttgatcaaatcgaaaagcagaggaaggatgagcaggagcgggagatcctgatgagggcagcaaagtctcggtcaagacaagaagatccagaacagttaaggctgaaacagaaggcaaaggagatgcagcaacaggaactggcacaaatgagacagcgggacgccaacctcacagcactagcagcgatcgggcccaggaaaaagaggaaagtggactgtccggggccgggctcaggagcagaggggtcgggccccggctcagtggtcccaggcagctcgggtgtcggaacccccagacagttcacgcgacaaagaatcacgcgggtcaacctcagggacctcatattttgtttagaaaatgaacgtgagacaagccattcactgctgctctacaaagcattccttaagtgacacaggaggacgcctggggactttttatatatttgcagattacgcctttttgtaacgagcaaatgggatattgtttaaaaaacagccacctctttacaatggaacagttttatattcctgtttctaaatcagctcttcagtgtgaaagaaaacacgtttctgtaacagagagaacacaaaggcctgtggatactcttaaaggacaattaaatcttaactcatcttgattgagtggccttcctgccaaacaagccatatataaagactgatggaatcgttagcaaataattagctgccctctgtcaactcatagcagtttctgcattatttgtgcattttggtttagttctacctaacttactatgtaggtgtatgtctacagccgatgacctcatttcgtttattttatttttgtaatagtcagttggcaaagcaaactgattttttagactatttatcttccttcccttcccctcccaccccgctctcctctctgccccctgccctcccctcccctcccttcccctccactccgctgagaatcctggaggaatacacaattcatcgttgcacccccacctcagagtgtaatcgcatttctgcttggtagaggccgagcccagcaaaggtggctccttctgaatgtgtggtcagcatctgtacaaatgcattttatttgctatagtttgtaaagctgtaaagttaaaagagatgaaaaccttttcagcataaatatattttacttgcactgtgttttttagctaaaagtgaaaacctagattaaataaaatcaaagttgagaagaatcatcaaaagactgtttctcggtgtgaatcaagtgttgaaaaatggttggtgtattttgtcagtaattgtacataacttttggcacatgacatagaaatggctatgtaaactataattattttgctaagagactgtatgcaagccttgggccgactttacagacgtccagagcaaagccccttctttgtacctatttttttattacaaatatactaattggttctttctattttcagaggttattgtatgaaattgtctattgatagtacttttatgactgtaaatactctggctttctccgtgtgaattctcacattagactttaattcgagcgcgtgtgaactgaacgctgatcagtattttttatcaacacctgagaactgttacaccttttattttgtcttttaggaaatccctgtctttccattttttcatgtaaattttgcacagttacttgttcatatgtaaatattttactttcagaaatgaagtttttaattgctattgttttatataggattgaaagaaaattaactcctttattaaaaacaaatttatctgtaaaaaaaaaaaaaaaaaaaa

SEQ ID NO: 135911 - DNA, 492 bp, Artificial Sequence
  derived and/or modified sequence
atgcagagcgtggacagcatgctgggcaccgtgggcggctgcggcggcggggaggccgccagcaccttcagcaaggaccccagcggctgctgcgtgggcaatgactgcagagatggcggccggggcctggagaggagacatggccgctggagcagaggagagggcggggagagcggcctgtgcagcggcggccagatggccagcgagattgagtactgggatggcctggccatctctgtgatggaggtggagaaggccttcggcagcaccaacgtgctgtggaagacagagcccttcagcctgtgggcctgcacagctgcctgcccccccagcctgagccccaccctgctggccctgggcctgcccagagatggcaaggagctggccgagcagggcagcctgtggacagtgctggagcccggcggggactggagccacagccagagccagctgggcaccccaggccggggcaagggggccctgggcttctag

SEQ ID NO: 135912 - DNA, 72 bp, Artificial Sequence
  derived and/or modified sequence
aagttcagccagcccgaggtggccgagggcatgagccggcagaaccttggcttgaagctgcggggcaggtag

SEQ ID NO: 135913 - DNA, 3258 bp, Artificial Sequence
  derived and/or modified sequence
atggccgccggcagcgacctgctggacgaggtgttcttcaacagcgaggtggacgagaaggtggtgagcgacctggtgggcagcctggagagccagctggccgccagcgccgcccaccaccaccacctggcccccagaacccccgaggtgagagccgccgccgccggcgccctgggcaaccacgtggtgagcggcagccccgccggcgccgccggcgccggccccgccgcccccgccgagggcgcccccggcgccgcccccgagcccccccccgccggcagagccagacccggcggcggcggcccccagagacccggcccccccagccccagaagacccctggtgcccgccggccccgccccccccgccgccaagctgagacccccccccgagggcagcgccggcagctgcgcccccgtgcccgccgccgccgccgtggccgccggccccgagcccgcccccgccggccccgccaagcccgccggccccgccgccctggccgccagagccggccccggccccggccccggccccggccccggccccggccccggccccggcaagcccgccggccccggcgccgcccagaccctgaacggcagcgccgccctgctgaacagccaccacgccgccgcccccgccgtgagcctggtgaacaacggccccgccgccctgctgcccctgcccaagcccgccgcccccggcaccgtgatccagaccccccccttcgtgggcgccgccgccccccccgcccccgccgcccccagcccccccgccgcccccgcccccgccgcccccgccgccgccccccccccccccccccccgcccccgccaccctggccagaccccccggccaccccgccggcccccccaccgccgcccccgccgtgcccccccccgccgccgcccagaacggcggcagcgccggcgccgcccccgcccccgcccccgccgccggcggccccgccggcgtgagcggccagcccggccccggcgccgccgccgccgcccccgcccccggcgtgaaggccgagagccccaagagagtggtgcaggccgccccccccgccgcccagaccctggccgccagcggccccgccagcaccgccgccagcatggtgatcggccccaccatgcagggcgccctgcccagccccgccgccgtgcccccccccgcccccggcacccccaccggcctgcccaagggcgccgccggcgccgtgacccagagcctgagcagaacccccaccgccaccaccagcggcatcagagccaccctgacccccaccgtgctggcccccagactgccccagcccccccagaaccccaccaacatccagaacttccagctgccccccggcatggtgctggtgagaagcgagaacggccagctgctgatgatcccccagcaggccctggcccagatgcaggcccaggcccacgcccagccccagaccaccatggcccccagacccgccacccccaccagcgccccccccgtgcagatcagcaccgtgcaggcccccggcacccccatcatcgccagacaggtgacccccaccaccatcatcaagcaggtgagccaggcccagaccaccgtgcagcccagcgccaccctgcagagaagccccggcgtgcagccccagctggtgctgggcggcgccgcccagaccgccagcctgggcaccgccaccgccgtgcagaccggcaccccccagagaaccgtgcccggcgccaccaccaccagcagcgccgccaccgagaccatggagaacgtgaagaagtgcaagaacttcctgagcaccctgatcaagctggccagcagcggcaagcagagcaccgagaccgccgccaacgtgaaggagctggtgcagaacctgctggacggcaagatcgaggccgaggacttcaccagcagactgtacagagagctgaacagcagcccccagccctacctggtgcccttcctgaagagaagcctgcccgccctgagacagctgacccccgacagcgccgccttcatccagcagagccagcagcagccccccccccccaccagccaggccaccaccgccctgaccgccgtggtgctgagcagcagcgtgcagagaaccgccggcaagaccgccgccaccgtgaccagcgccctgcagccccccgtgctgagcctgacccagcccacccaggtgggcgtgggcaagcagggccagcccacccccctggtgatccagcagccccccaagcccggcgccctgatcagacccccccaggtgaccctgacccagacccccatggtggccctgagacagccccacaacagaatcatgctgaccaccccccagcagatccagctgaaccccctgcagcccgtgcccgtggtgaagcccgccgtgctgcccggcaccaaggccctgagcgccgtgagcgcccaggccgccgccgcccagaagaacaagctgaaggagcccggcggcggcagcttcagagacgacgacgacatcaacgacgtggccagcatggccggcgtgaacctgagcgaggagagcgccagaatcctggccaccaacagcgagctggtgggcaccctgaccagaagctgcaaggacgagaccttcctgctgcaggcccccctgcagagaagaatcctggagatcggcaagaagcacggcatcaccgagctgcaccccgacgtggtgagctacgtgagccacgccacccagcagagactgcagaacctggtggagaagatcagcgagaccgcccagcagaagaacttcagctacaaggacgacgacagatacgagcaggccagcgacgtgagagcccagctgaagttcttcgagcagctggaccagatcgagaagcagagaaaggacgagcaggagagagagatcctgatgagagccgccaagagcagaagcagacaggaggaccccgagcagctgagactgaagcagaaggccaaggagatgcagcagcaggagctggcccagatgagacagagagacgccaacctgaccgccctggccgccatcggccccagaaagaagagaaaggtggactgccccggccccggcagcggcgccgagggcagcggccccggcagcgtggtgcccggcagcagcggcgtgggcacccccagacagttcaccagacagagaatcaccagagtgaacctgagagacctgatcttctgcctggagaacgagagagagaccagccacagcctgctgctgtacaaggccttcctgaagtag

SEQ ID NO: 135914 - DNA, 2850 bp, Artificial Sequence
  derived and/or modified sequence
ggcagaggcctgctgcagcagagaggcggcagagagagcggccccgccccccccgccgccaagctgagacccccccccgagggcagcgccggcagctgcgcccccgtgcccgccgccgccgccgtggccgccggccccgagcccgcccccgccggccccgccaagcccgccggccccgccgccctggccgccagagccggccccggccccggccccggccccggccccggccccggccccggccccggcaagcccgccggccccggcgccgcccagaccctgaacggcagcgccgccctgctgaacagccaccacgccgccgcccccgccgtgagcctggtgaacaacggccccgccgccctgctgcccctgcccaagcccgccgcccccgccgccgccccccccccccccccccccgcccccgccaccctggccagaccccccggccaccccgccggcccccccaccgccgcccccgccgtgcccccccccgccgccgcccagaacggcggcagcgccggcgccgcccccgcccccgcccccgccgccggcggccccgccggcgtgagcggccagcccggccccggcgccgccgccgccgcccccgcccccggcgtgaaggccgagagccccaagagagtggtgcaggccgccccccccgccgcccagaccctggccgccagcggccccgccagcaccgccgccagcatggtgatcggccccaccatgcagggcgccctgcccagccccgccgccgtgcccccccccgcccccggcacccccaccggcctgcccaagggcgccgccggcgccgtgacccagagcctgagcagaacccccaccgccaccaccagcggcatcagagccaccctgacccccaccgtgctggcccccagactgccccagcccccccagaaccccaccaacatccagaacttccagctgccccccggcatggtgctggtgagaagcgagaacggccagctgctgatgatcccccagcaggccctggcccagatgcaggcccaggcccacgcccagccccagaccaccatggcccccagacccgccacccccaccagcgccccccccgtgcagatcagcaccgtgcaggcccccggcacccccatcatcgccagacaggtgacccccaccaccatcatcaagcaggtgagccaggcccagaccaccgtgcagcccagcgccaccctgcagagaagccccggcgtgcagccccagctggtgctgggcggcgccgcccagaccgccagcctgggcaccgccaccgccgtgcagaccggcaccccccagagaaccgtgcccggcgccaccaccaccagcagcgccgccaccgagaccatggagaacgtgaagaagtgcaagaacttcctgagcaccctgatcaagctggccagcagcggcaagcagagcaccgagaccgccgccaacgtgaaggagctggtgcagaacctgctggacggcaagatcgaggccgaggacttcaccagcagactgtacagagagctgaacagcagcccccagccctacctggtgcccttcctgaagagaagcctgcccgccctgagacagctgacccccgacagcgccgccttcatccagcagagccagcagcagccccccccccccaccagccaggccaccaccgccctgaccgccgtggtgctgagcagcagcgtgcagagaaccgccggcaagaccgccgccaccgtgaccagcgccctgcagccccccgtgctgagcctgacccagcccacccaggtgggcgtgggcaagcagggccagcccacccccctggtgatccagcagccccccaagcccggcgccctgatcagacccccccaggtgaccctgacccagacccccatggtggccctgagacagccccacaacagaatcatgctgaccaccccccagcagatccagctgaaccccctgcagcccgtgcccgtggtgaagcccgccgtgctgcccggcaccaaggccctgagcgccgtgagcgcccaggccgccgccgcccagaagaacaagctgaaggagcccggcggcggcagcttcagagacgacgacgacatcaacgacgtggccagcatggccggcgtgaacctgagcgaggagagcgccagaatcctggccaccaacagcgagctggtgggcaccctgaccagaagctgcaaggacgagaccttcctgctgcaggcccccctgcagagaagaatcctggagatcggcaagaagcacggcatcaccgagctgcaccccgacgtggtgagctacgtgagccacgccacccagcagagactgcagaacctggtggagaagatcagcgagaccgcccagcagaagaacttcagctacaaggacgacgacagatacgagcaggccagcgacgtgagagcccagctgaagttcttcgagcagctggaccagatcgagaagcagagaaaggacgagcaggagagagagatcctgatgagagccgccaagagcagaagcagacaggaggaccccgagcagctgagactgaagcagaaggccaaggagatgcagcagcaggagctggcccagatgagacagagagacgccaacctgaccgccctggccgccatcggccccagaaagaagagaaaggtggactgccccggccccggcagcggcgccgagggcagcggccccggcagcgtggtgcccggcagcagcggcgtgggcacccccagacagttcaccagacagagaatcaccagagtgaacctgagagacctgatcttctgcctggagaacgagagagagaccagccacagcctgctgctgtacaaggccttcctgaagtag

SEQ ID NO: 135915 - DNA, 3258 bp, Artificial Sequence
  derived and/or modified sequence
atggccgcaggcagtgatctacttgacgaggtattttttaactccgaggttgacgagaaagttgtttcggacctggtgggctctctggagtcccagcttgctgcatccgctgcacaccaccaccatctggccccgaggactcccgaggttagagctgccgccgccggggcactcggaaaccatgtggtgagcggatcccccgcgggcgccgccggtgctgggccagccgccccagccgagggcgccccaggcgcggcgcctgaaccacctccggctggaagagcccggccaggaggcggcggaccacagcggccaggccccccaagtccccgacgtccgctggtgcccgccggtccagccccacctgcagccaagctgcgacccccccccgaaggctccgcaggctcctgtgcccccgtgcccgccgcagccgccgtggccgctggccctgagcctgcgcctgccggaccagccaagcctgcgggccccgccgcactggccgccagggctggacccggacctggacctggtcccggaccaggtccagggcccgggcccggcaagcctgctggcccgggcgccgcacagactttaaatggcagtgccgcactcctgaatagtcaccacgccgctgctccagctgtatcattagtgaataatggccccgctgcactcctgcctctgccaaagcctgccgccccgggcacggtgattcagactcccccctttgtcggcgctgcggcgccacctgcacccgccgccccctctcctccagcagccccagcgcccgccgctcccgccgcagcacccccaccccccccacccgctccagccacacttgcacgcccaccagggcatccggcaggccctccaaccgcagctccagcagtccctccacccgcagctgcccagaacggcggctccgccggagcagctccagcaccggcgccagcagccggaggtccagccggagtctccggccagcccggccctggggcagctgcagcggcaccagccccaggcgtgaaagcagaatctcccaaaagggtggttcaggccgcccctccagccgcccagaccctcgctgcttctggtcctgcttccaccgctgcaagcatggtgataggtcccacaatgcagggggctttaccctctccggccgccgtcccacctcccgccccaggcactccaactggattacctaaaggcgcggcaggcgcggtgactcaatcactttctcgaaccccaactgctactacttctggcatccgggctacactgacccccacggtccttgctccaagactccctcagcccccacagaaccctactaatatccaaaactttcaactgcccccaggaatggtactggtgagatctgagaatgggcagctgttaatgattccccagcaggctctggctcagatgcaggcacaggcccacgctcaaccccagactacgatggctccaaggccagccaccccaacttccgctcctccagtgcagatatccactgtgcaggcccctggaacccctataatcgccaggcaggtcacccctacaaccattattaagcaggtgtcccaggctcagacaactgttcagcccagcgccactctgcagagaagccctggggtgcagcctcaattggtcttgggcggtgccgctcaaaccgctagtctggggaccgcaaccgcagtgcagaccggtacaccacagcgcacagtgcctggggctacaaccactagttccgcagctaccgagaccatggaaaatgtgaaaaagtgcaagaacttcctgagtacactcattaagttggccagctctggaaagcagtccactgagacagctgctaatgtcaaagagttggttcagaacctgctggacggcaagatcgaggccgaagatttcacaagtaggctttaccgcgaacttaactcctctccgcagccttatcttgtcccatttctgaagcgctcccttcccgccctgagacaactcactcctgattccgcggccttcatacagcagagccaacaacagccacccccacccaccagtcaagctaccacagccctgacagcagtcgttctctctagctctgtgcagcgcacagccggaaagacagctgccactgtaacatccgccttacagccgcctgtcttgtcgttgacacagcctacacaggttggggtgggaaagcagggacagccgacccctttggtgatccagcagcccccaaagcccggggccctaattcggcctcctcaggtgacgcttacccagacccctatggttgcgctgcgccagcctcacaatcggattatgctgaccactccacagcagatacaactaaatccccttcagcccgttccagtcgtgaagcccgctgtactacccgggacaaaggccctgtccgctgtttcagctcaggctgcagctgctcagaaaaacaagctcaaggaaccaggcggcggtagcttcagggatgatgatgacatcaatgatgtcgccagtatggccggagtgaatctgtccgaggagagtgctcgaatcctggccaccaattccgaactggtcggcactctgacgcgaagttgtaaggatgaaaccttcctcctccaagcaccgcttcagcgacggatcctggaaatcggaaagaaacacggtattactgaactccatcctgatgtagtaagttacgtttcccatgctactcagcagcgtctgcaaaatctggtcgagaaaattagtgaaactgcgcaacaaaagaacttctcttacaaggacgacgaccgatacgaacaggcgtctgacgtgagggcacagctgaaatttttcgaacagctcgaccagatcgagaaacagagaaaggatgaacaggagagagagattctcatgcgggcggcaaagtcccggtccaggcaggaagacccagagcaactgcggctgaagcagaaggccaaagagatgcagcaacaggagctcgcccaaatgcgtcagagagacgccaatttaaccgccttggcagcaatcgggcctcgtaagaaacgaaaagtcgattgccccgggccaggaagcggtgccgaagggtccgggccaggctccgtagtccctggtagcagtggagtggggacaccaaggcagttcacgcggcagaggataacccgggtgaatctgagggacctcattttctgcctggaaaatgagagagagaccagtcactccctgctgctctacaaggcattcctcaaatag

SEQ ID NO: 135916 - DNA, 2850 bp, Artificial Sequence
  derived and/or modified sequence
ggccggggcctcctgcagcagcgcgggggaagagaaagcggccccgctcctcccgccgctaaactccgcccacctccggaggggtctgccggctcctgcgccccggtgccagccgcagctgcggttgcagcaggtcccgaaccagccccggccggccctgccaagccagctggccctgctgcccttgcggcacgagcaggaccaggccctggtccaggaccaggccccggcccagggccaggcccggggaagccagctggtcccggggcggcgcaaactctgaacggaagtgctgccctcctaaattcacatcacgcggcggctcccgccgtgagcctggtgaacaacggtcccgctgccctgctgcctctgcccaagcctgccgcacctgccgccgccccccctcctcctcctccggcccccgccacccttgcccggccccctggccatccagcaggccccccaaccgctgcacctgctgtgcccccacctgcagctgcccagaacggcgggtcagctggtgcagccccagcccccgcccccgctgctggcggcccagcaggcgtgtcaggccaacccggccccggcgccgcggcggccgccccagctccaggagttaaggccgagagcccaaagcgcgttgttcaggccgctcctccggccgcgcagactctcgctgcgtcagggccagctagcaccgccgcttcaatggtcatcggcccgactatgcagggagcacttccgtccccagcagcggtgccacccccagcacccggtactcctaccggtctgccaaagggagcagccggcgccgtgacccagtccctgtcccgtacacccacagccacaaccagcggcattagggccactcttacaccgaccgtcctggcacctagactaccacagcctcctcagaatcctactaacatccagaattttcagttgcctcctggaatggtcctggtcagaagtgaaaacggtcaacttcttatgattccacaacaggctcttgcccagatgcaggcacaggcacatgcacagccacagacgacgatggctccccggcccgcaacccctacctccgctcctcccgtgcagatcagtacagttcaggcacctgggacacctatcattgcccgccaggttacaccaactaccatcataaagcaggtgtcacaagctcagactaccgtgcaaccatccgcaaccctccaaagatcacccggggtgcagccacagctagtactaggaggagccgcgcaaacagcatccttgggtacagccacggcggtgcaaaccgggaccccccagcgcaccgtcccaggtgcaaccacaacctcgtcagccgcaacggagacaatggagaatgtgaagaaatgcaagaactttttatccacgctgattaagttggcttctagcgggaagcagagtaccgaaacagcagccaacgtgaaggaactggtgcagaatctactggatggaaagatagaggccgaagacttcacctcccggctctacagggagcttaactcttccccccagccctatcttgtgcctttcctgaaaaggagcctgccagctctgcgacagttaacccctgatagcgcagctttcatccagcaaagccaacagcagcctccaccaccaaccagccaagctacgaccgctctgaccgctgtggttctctcctcatcggtccagaggacagccggcaaaacagctgcaaccgtcacctctgcattgcaaccccccgttctctcacttactcaaccaacccaagtgggcgtggggaagcaaggccagcctaccccactggttatccaacaaccaccaaagcccggcgctctcattcgccccccacaggtgacgctaacccaaactccaatggttgctctgcgacagccccacaaccggatcatgctgacaactccccagcaaatccaactgaatcccctgcagccagtacctgtagtgaagcctgctgtgctgccaggaaccaaggctctttccgccgtctcagcacaagccgctgccgcccagaagaataagttgaaggaaccaggtggaggctctttccgcgacgatgacgacataaatgacgttgcctccatggcaggagtgaatttatctgaggaaagtgcccggatcctggcaactaacagcgagctcgtcggaaccctgacccgcagctgcaaggatgaaacgtttctgctgcaggcaccactgcaacgaagaatcctggaaatcggaaaaaagcatggcattactgagctccaccctgatgtggtgtcttacgtcagccacgcgacgcagcagagacttcagaacctggttgaaaaaatctcagagactgctcagcaaaagaatttctcttacaaggacgacgataggtatgagcaggccagtgacgtgcgggcccagctcaagttttttgaacagcttgaccagattgaaaagcagcgtaaagacgagcaagaaagagaaattctgatgcgggctgccaagagtcgaagcagacaagaggaccccgaacaacttcggcttaagcagaaagcaaaagaaatgcagcaacaggagctggctcagatgagacagcgtgatgccaatcttacagcactggccgccattgggcctcgaaaaaaacgcaaagtcgactgtcccggtcccgggtcaggagctgaggggagcggaccgggtagtgttgtccctggatctagtggtgtgggcactccacggcagtttactaggcagagaatcacaagagtgaacctacgcgacctgattttttgtctcgaaaacgaaagagaaaccagccactccctcctgctgtacaaggcgtttttaaaatag

SEQ ID NO: 135917 - DNA, 3258 bp, Artificial Sequence
  derived and/or modified sequence
atggctgctggcagtgacctgctggatgaggtgttcttcaacagcgaggtggatgagaaggtggtgtctgacctggtgggcagcctggagagccagctggccgccagcgctgcccaccaccaccacctggcccccaggaccccagaggtgcgggctgctgctgctggggccctgggcaaccacgtggtgtctggcagccctgctggagctgctggagctggccctgctgccccagctgagggcgcccctggagctgcccctgagcccccacctgctggccgggcccggcctgggggcggcggcccccagaggcctggcccccccagcccccggcggcccctggtgcctgctggccctgcccctcctgctgccaagctgcggcccccacctgagggcagcgctggcagctgtgcccctgtgcctgctgctgctgctgtggccgccggccctgagcccgccccagctggccctgccaagccagctggccctgctgccctggccgcccgggccggccctggccctggccctggccctggccctggccctggccctggccctgggaagccagctggccctggggccgcccagaccctgaatggatctgctgccctgctgaacagccaccacgccgccgccccagctgtgtccctggtgaacaacggccctgctgccctgctgcccctgcccaagccagctgcccctggcaccgtcatccagaccccaccatttgtgggcgctgctgcccccccagccccagctgcccccagccccccagctgccccagccccagctgccccagctgctgcccctcctcctcctcctccagccccagccaccctggcccggcccccaggccaccctgctggccccccaacagctgccccagctgtgcccccacctgctgctgcccagaatggaggcagcgctggagctgccccagccccagccccagctgctgggggccctgctggggtgtctggccagcccggccctggagctgctgctgctgccccagcccctggggtgaaggccgagagccccaagagggtggtgcaggccgcccctcctgctgcccagaccctggccgccagcggccctgccagcacagctgcctccatggtgattggccccaccatgcagggcgccctgcccagccctgctgctgtgcccccaccagcccctggcacccccaccggcctgcccaagggagctgctggagctgtgacccagagcctgagcaggacccccacagccaccaccagcggcatccgggccaccctgacccccaccgtgctggccccccggctgccccagcccccccagaaccccaccaacatccagaacttccagctgcccccaggcatggtgctggtgcgctcagaaaatggccagctgctgatgatcccccagcaggccctggcccagatgcaggcccaggcccacgcccagccccagaccaccatggcccccaggcctgccacccccaccagcgcccctcctgtgcagatcagcacagtgcaggcccctggcacccccatcatcgcccggcaggtgacccccaccaccatcatcaagcaggtgtcccaggcccagaccaccgtgcagcccagcgccaccctgcagaggagccctggggtgcagccccagctggtgctgggcggggccgcccagacagccagcctgggcacagccacagctgtgcagacaggcaccccccagaggacagtgcctggggccaccaccaccagcagcgctgccacagagaccatggagaatgtgaagaagtgcaagaacttcctgagcaccctcatcaagctggccagcagcggcaagcagagcacagaaacagctgccaacgtgaaggagctggtgcagaacctgctggatggcaagattgaagctgaggacttcaccagccggctgtaccgggagctgaacagcagcccccagccctacctggtgcccttcctgaagaggagcctgcctgccctgcggcagctgaccccagattctgctgccttcatccagcagagccagcagcagcccccaccacccaccagccaggccaccacagccctgacagctgtggtgctgagcagctctgtgcagaggacagctgggaagacagctgccaccgtgaccagcgccctgcagccccctgtgctgagcctgacccagcccacccaggtgggcgtgggcaagcagggccagcccacccccctggtgatccagcagccccccaagccaggggccctgatccggcccccccaggtgaccctgacccagacccccatggtggccctgcggcagccccacaaccgcatcatgctgaccaccccccagcagatccagctgaaccccctgcagcctgtgcctgtggtgaagccagctgtgctgcccggcaccaaggccctgtctgctgtgtctgcccaggccgccgccgcccagaagaacaagctgaaggagcccggcggcggcagcttcagagatgatgatgacatcaatgatgtggcctccatggccggcgtgaacctgtctgaggagagcgcccgcatcctggccaccaacagcgagctggtgggcaccctgaccaggagctgcaaggatgagaccttcctgctgcaggcccccctgcagaggcgcatcctggagatcggcaagaagcacggcatcacagagctgcacccagatgtggtgtcctatgtgagccacgccacccagcagaggctgcagaacctggtggagaagatcagcgagacagcccagcagaagaacttctcctacaaggatgatgacagatatgagcaggccagtgatgtgcgggcccagctgaagttctttgagcagctggaccagatcgagaagcagaggaaggatgagcaggagcgggagatcctgatgagagctgccaagagccgcagccggcaggaggaccctgagcagctgcggctgaagcagaaggccaaggagatgcagcagcaggagctggcccagatgaggcagagagatgccaacctgacagccctggccgccatcggccccaggaagaagaggaaggtggactgccccggccctggcagcggggctgagggcagcggccctggctctgtggtgcccggcagcagcggcgtgggcaccccccggcagttcacccggcagaggatcaccagggtgaacctgcgggacctgatcttctgcctggagaatgaaagagagaccagccacagcctgctgctgtacaaggccttcctgaagtag

SEQ ID NO: 135918 - DNA, 2850 bp, Artificial Sequence
  derived and/or modified sequence
ggccggggcctgctgcagcagagaggaggccgggagagcggccctgcccctcctgctgccaagctgcggcccccacctgagggcagcgctggcagctgtgcccctgtgcctgctgctgctgctgtggccgccggccctgagcccgccccagctggccctgccaagccagctggccctgctgccctggccgcccgggccggccctggccctggccctggccctggccctggccctggccctggccctgggaagccagctggccctggggccgcccagaccctgaatggatctgctgccctgctgaacagccaccacgccgccgccccagctgtgtccctggtgaacaacggccctgctgccctgctgcccctgcccaagccagctgccccagctgctgcccctcctcctcctcctccagccccagccaccctggcccggcccccaggccaccctgctggccccccaacagctgccccagctgtgcccccacctgctgctgcccagaatggaggcagcgctggagctgccccagccccagccccagctgctgggggccctgctggggtgtctggccagcccggccctggagctgctgctgctgccccagcccctggggtgaaggccgagagccccaagagggtggtgcaggccgcccctcctgctgcccagaccctggccgccagcggccctgccagcacagctgcctccatggtgattggccccaccatgcagggcgccctgcccagccctgctgctgtgcccccaccagcccctggcacccccaccggcctgcccaagggagctgctggagctgtgacccagagcctgagcaggacccccacagccaccaccagcggcatccgggccaccctgacccccaccgtgctggccccccggctgccccagcccccccagaaccccaccaacatccagaacttccagctgcccccaggcatggtgctggtgcgctcagaaaatggccagctgctgatgatcccccagcaggccctggcccagatgcaggcccaggcccacgcccagccccagaccaccatggcccccaggcctgccacccccaccagcgcccctcctgtgcagatcagcacagtgcaggcccctggcacccccatcatcgcccggcaggtgacccccaccaccatcatcaagcaggtgtcccaggcccagaccaccgtgcagcccagcgccaccctgcagaggagccctggggtgcagccccagctggtgctgggcggggccgcccagacagccagcctgggcacagccacagctgtgcagacaggcaccccccagaggacagtgcctggggccaccaccaccagcagcgctgccacagagaccatggagaatgtgaagaagtgcaagaacttcctgagcaccctcatcaagctggccagcagcggcaagcagagcacagaaacagctgccaacgtgaaggagctggtgcagaacctgctggatggcaagattgaagctgaggacttcaccagccggctgtaccgggagctgaacagcagcccccagccctacctggtgcccttcctgaagaggagcctgcctgccctgcggcagctgaccccagattctgctgccttcatccagcagagccagcagcagcccccaccacccaccagccaggccaccacagccctgacagctgtggtgctgagcagctctgtgcagaggacagctgggaagacagctgccaccgtgaccagcgccctgcagccccctgtgctgagcctgacccagcccacccaggtgggcgtgggcaagcagggccagcccacccccctggtgatccagcagccccccaagccaggggccctgatccggcccccccaggtgaccctgacccagacccccatggtggccctgcggcagccccacaaccgcatcatgctgaccaccccccagcagatccagctgaaccccctgcagcctgtgcctgtggtgaagccagctgtgctgcccggcaccaaggccctgtctgctgtgtctgcccaggccgccgccgcccagaagaacaagctgaaggagcccggcggcggcagcttcagagatgatgatgacatcaatgatgtggcctccatggccggcgtgaacctgtctgaggagagcgcccgcatcctggccaccaacagcgagctggtgggcaccctgaccaggagctgcaaggatgagaccttcctgctgcaggcccccctgcagaggcgcatcctggagatcggcaagaagcacggcatcacagagctgcacccagatgtggtgtcctatgtgagccacgccacccagcagaggctgcagaacctggtggagaagatcagcgagacagcccagcagaagaacttctcctacaaggatgatgacagatatgagcaggccagtgatgtgcgggcccagctgaagttctttgagcagctggaccagatcgagaagcagaggaaggatgagcaggagcgggagatcctgatgagagctgccaagagccgcagccggcaggaggaccctgagcagctgcggctgaagcagaaggccaaggagatgcagcagcaggagctggcccagatgaggcagagagatgccaacctgacagccctggccgccatcggccccaggaagaagaggaaggtggactgccccggccctggcagcggggctgagggcagcggccctggctctgtggtgcccggcagcagcggcgtgggcaccccccggcagttcacccggcagaggatcaccagggtgaacctgcgggacctgatcttctgcctggagaatgaaagagagaccagccacagcctgctgctgtacaaggccttcctgaagtag

SEQ ID NO: 135919 - DNA, 3258 bp, Artificial Sequence
  derived and/or modified sequence
atggccgccggcagcgacctgctggacgaggtgttcttcaacagcgaggtcgatgagaaggtcgtaagcgatctggtgggctcacttgaaagccagctcgcagcctctgccgcccaccaccatcacctcgccccccggaccccagaagtgagggcggcggccgcgggggccctgggcaatcacgtggtatctggttccccggctggtgcagccggtgctgggccagcggcccccgctgaaggagccccgggggccgcccccgagcctccccccgccggcagggccagaccaggagggggaggaccacagcgacctgggccaccttctcctcgtcggcctctcgtgccggcagggcccgcccctcctgctgcgaaactgcggccgcctcccgagggatccgcagggtcgtgtgcccccgtccctgcagcagccgcggtcgcggctggcccggaacccgctcctgcggggcctgctaaacccgcagggcccgccgcactagcagcacgcgcaggcccaggccccggtccgggccctggccccggccccggaccagggcccggtaagcccgccggtcccggcgccgctcagacgctgaatgggtctgcagccttactgaactcacatcacgccgcagcaccagccgtttccctggttaacaatggccctgccgccctgctccctcttccaaagcccgccgccccaggtaccgtcatccaaactcctcctttcgtaggcgccgccgccccgcccgcaccagccgcccctagccctcccgcagcccccgccccagcagcccccgccgccgcaccaccaccacccccacctgctcccgccaccttagcaaggccaccaggacacccagccgggcctcctacagccgcacctgcagtgccacctccagccgccgcccagaatggaggctctgccggggctgctcctgcacccgcaccagctgccggaggccccgccggggtgtctggacagcccggccctggcgcggctgccgctgcaccagcacccggcgttaaggccgagagtcccaagcgggttgtgcaagctgccccccctgccgcacagactctcgcggccagcggaccagcctctaccgcagcttctatggtcatcggaccaacaatgcagggtgctcttccatcacctgctgctgtgccgcctccagctcccggaacgccaactggtttgccaaagggcgctgctggagcagtgacccagagcctgagccggacccccaccgccaccacctccggtattcgggcaacgttgacacccactgtcctggcccccagactgccacagcccccacagaatccgacaaacattcagaatttccaactgcctcctggaatggtgctggtgcgaagtgagaacggacagttactaatgattccccagcaggcattagcacagatgcaggcccaggctcatgcccagcctcagactacgatggctccacgacccgccactccaactagcgcccctccagtccaaataagcactgtccaagcgcccgggacaccgatcattgctcggcaggtgacacccactaccattatcaaacaggtctcacaggcgcaaacaacagttcagcccagcgcgaccctgcagcgctccccgggtgtccaaccgcagctagtgctcgggggcgctgcacaaactgcaagcctcggcacggctactgccgtgcagaccggaacaccccaacggaccgtcccaggagcgaccactacatcttcagccgcgacagagacaatggaaaatgtgaaaaagtgtaagaactttctaagtactctaatcaagctggcgtcctccggcaaacagagtacagaaacagccgccaatgtgaaagaacttgttcagaatcttttagatggcaaaattgaagccgaggacttcacttctagactttacagggaattaaacagtagcccacagccatacttggtccctttcctcaagcgcagtctgcccgccctgcgacaattgactccagacagtgctgcattcatccagcaaagccaacaacagcccccgccgccgacttcacaggccactacggctctgaccgcggtggttctgagttctagtgtgcaacggacagccggaaagactgctgctacagtcacaagcgccctgcaacctcccgtgctatccctcacacagccgactcaggtcggggtgggaaagcagggccaacccacgccactggtcatccagcaacctcccaagcccggtgcgttaatcaggccaccacaggtgacactcacccaaaccccaatggtggccctccgacagcctcataacagaataatgctaacaacacctcagcaaatccaactgaatccgctccagcccgttcccgtagtgaagcccgccgtgctcccaggaacgaaggcactgtcggctgttagcgcacaggcagccgccgcgcagaaaaataagctgaaggagccaggagggggaagctttcgtgacgacgacgatatcaatgacgtcgccagcatggcaggtgttaacctgagcgaggagagtgccaggatcttagccactaatagcgaactcgttgggaccttgacacgttcttgtaaggacgagaccttcctcctgcaggcgccgcttcagcgccgtatcctagagattggaaaaaaacacgggattactgagctccaccccgacgtggtgtcatacgtaagccatgcaacccaacagcggcttcagaatctggtggagaaaatctctgagaccgcccagcagaaaaacttctcttacaaggacgacgataggtacgagcaagcttcggacgtaagagctcaactaaagttctttgaacagcttgaccagatcgaaaaacagagaaaggacgagcaggaaagggagatcctgatgagggctgctaaatccagatctagacaagaagatcccgagcagcttaggttgaaacaaaaagccaaggagatgcagcagcaagagttagcacagatgcggcaaagagatgcgaacctcaccgcgttggccgcgattggcccacgaaagaagcgcaaagtcgactgcccaggccccggctcaggagccgaaggatctggccccggctctgtagtgcccggctcctctggggtcgggacccccagacagtttacacgccagaggatcactcgggtaaatctgagggatctgatcttttgcctcgagaatgaacgggaaacgtcccacagcttgcttctgtacaaggctttcctgaagtag

SEQ ID NO: 135920 - DNA, 2850 bp, Artificial Sequence
  derived and/or modified sequence
ggccggggcctgctgcagcagcggggcggccgggagagcggccccgcgcctcccgccgcaaagcttcggccaccacctgagggtagtgctggctcgtgcgctcccgtgccagctgccgcagctgtcgctgccgggccggagcccgcccctgccgggcccgccaagccggctgggcccgcggcacttgccgccagggccggacctgggccgggtccaggtcctggcccaggcccaggtccaggcccgggcaaacccgccggcccaggcgccgctcagactctcaacggctccgccgcccttttgaatagccaccacgccgccgcccccgctgtcagtctggtcaataatggtcctgccgctttgcttcccttgccaaagccagctgccccagccgcagcccccccgccaccacctcccgctcctgctacactggctagaccccctgggcatccggctggccctccaacggctgccccagccgttcctcctcccgccgccgcacaaaacgggggatctgccggagctgcccccgcccctgcccctgctgctggcgggccagctggcgtgagtgggcagccaggccccggagccgccgccgcagcccctgctcccggcgtgaaggccgagtcccccaaaagggttgtgcaggcggccccccctgcagctcagactcttgcagcaagcggacccgcgtcgacagcggctagcatggtaataggaccaacgatgcagggggccttacctagtcccgccgccgtgccgccgcctgcgcccggcacaccaacaggtctacccaagggagcggctggcgccgttacgcagagcttatccaggactcccactgccaccacttcaggcattagagcgaccctgacacctactgtcttagcgccgcgcctgccgcaacctccccagaaccccacaaacattcagaactttcagctccccccgggcatggtcctggtgaggtccgaaaacggacagttgttgatgatcccccaacaagcattggcacagatgcaagcccaggcgcatgcccagccacaaaccactatggccccccgcccagcaaccccaactagcgccccgccagtgcaaatcagtacagtgcaggccccagggaccccgattattgccaggcaggtgacaccaacgacgattatcaaacaagtgagccaggctcagactacagttcaaccctcagctaccctccaacgatcacccggcgtgcagcctcagctggttctgggaggagctgcccagacagcctcgctcggcacagcaaccgccgtgcagacaggcacgccccagcggacagtgccgggagctaccacaacaagcagtgccgccacagagactatggagaacgtgaagaaatgcaaaaactttttgagtaccttgattaagctggcctcttccgggaagcagtcgacggagacagccgcaaacgttaaggagcttgtgcagaatttgctggacgggaagattgaggctgaggatttcacatcccgtctctaccgggaactgaactcatcccctcaaccttatctggtgccgtttctcaagagaagcctgccagctctccgacagctgactcctgacagcgccgcctttatccagcagagtcagcaacagccccctcctcctacatcacaagcgaccaccgcactaactgcagtggtgctgtcatcctccgttcagaggaccgctgggaaaaccgccgcaaccgtgacatctgctctacaaccgcctgtgttgtctctgacacagcctacgcaggtgggcgtcggaaaacaaggccaacctactcccttagtgattcagcaacccccaaagccgggagccctcatcagaccaccgcaagtcaccttaacacagactcctatggtagccctgagacagccgcacaaccgaatcatgctcaccaccccacagcagatacagttgaatcctctgcagcccgttcctgtggtgaagcctgcagtcctccccggcactaaagcattgtccgcagtctccgcacaggccgccgcagcccagaaaaacaagcttaaggagccaggagggggctcattcagggacgacgatgatatcaatgatgtggcaagtatggccggggtcaatctgtctgaagagtcagcacgaatacttgctacgaactctgaactggtggggacattaacccgttcatgcaaagatgaaactttcctgctccaggccccgctgcagcggcgaatcctggaaattggcaagaaacacgggatcactgagctccaccctgatgtggtctcatacgtgagtcacgccactcagcagcgcctccagaacctggtggaaaagatctccgagacggcccagcagaagaatttctcatataaagatgatgacagatatgaacaggcatctgatgtgagggcccagctcaagttcttcgaacaactggaccagatagagaaacagcgcaaagacgaacaggaacgcgagatcttaatgcgtgccgctaagtcacgaagtcgccaggaagaccccgagcagctgaggcttaagcagaaagccaaggaaatgcagcagcaggaactcgctcagatgcgccaaagagatgccaacttaactgcgctggccgctattggcccacggaaaaagagaaaggtcgactgtcccggacccggctcaggagcggaggggtccggcccaggctctgtggtgcctggtagctcgggagtggggacgccccgccagttcactcgccagcggattacccgagtgaatttgcgagatcttatcttctgcctggagaacgaacgggaaaccagccatagtttacttctctacaaggcttttttaaagtag

SEQ ID NO: 135921 - DNA, 3258 bp, Artificial Sequence
  derived and/or modified sequence
atggccgcaggttccgatctgctggatgaagtcttcttcaattctgaggtcgacgagaaagtagtgtcagatttggtgggatctctcgaatcgcagctcgcggcatcagccgctcaccaccaccatttagcgcctcgcacccccgaggtgagggctgctgcagctggggcactcgggaaccacgttgtctcaggcagtcccgcaggggctgccggtgccggaccagccgcacccgctgagggggctccaggggcagccccagagcctccaccagctggtcgagctcggcctggagggggaggaccccagcgccctggacccccatcgcccaggagacctctcgtcccagccggtcccgctcctcctgccgcaaagcttcggcctccccctgagggctcggcaggatcctgcgcgcctgtccccgctgctgctgccgttgcggctggaccagaacccgcacccgcaggaccagcaaaacctgcagggccagcagctttggctgccagagccggtccagggccagggcctggccctggacctggcccaggccctggtcctggtaaacctgccggacctggtgctgctcagacacttaacggatcagcggctttgctgaatagccaccacgctgcagctcctgccgtctccctggtgaacaacgggcctgcagcccttctgcccctccctaagccggcagccccaggaactgttattcagacaccaccctttgttggagcggctgcccctcccgcacccgcagctccatcaccacctgccgctcctgccccagccgctcccgctgcggcacctccgcctccgccaccagctcccgctaccttagctcggcctcctggccaccccgctggtccccctaccgccgcaccggcagtaccgccacccgcagcggcacagaatggtggttcggcgggagccgctcctgcccctgcccctgccgctggtggacccgctggcgttagcggccagcccggtcctggtgctgctgcagccgcacctgccccaggcgttaaagctgagtcgccgaagagggtggtacaagccgcaccaccagccgcacagacactagcagccagcggcccagcttcaaccgccgcatccatggtgatcggccctactatgcaaggcgctttgcccagcccagccgcagtccccccaccagcccctggcacgcctaccgggctcccaaaaggtgccgcaggtgccgtgacacaaagcctttcacgtactcctactgctaccacttctggtattagggctacactgacccctaccgtcttagcccctagactacctcagccgccacaaaaccccaccaacattcagaactttcaacttccaccgggaatggtccttgtgaggtctgaaaacggacagctcctcatgatacctcaacaggcccttgcccaaatgcaggcacaggcgcatgctcagccacagaccacgatggcaccaagaccggctacccctactagcgctcctccagtacagatatctacggtgcaagccccagggacaccaataatagccagacaagtaactcccaccacaatcattaagcaggtgtctcaggcccagactacggtccagccttcagccacattgcagaggtctccaggcgtgcaaccccaactcgtgctcgggggagcagcccagactgcaagcttggggaccgcaaccgctgtccaaactggtacaccccagagaacggtacctggcgctaccacgaccagttcggccgcaaccgaaaccatggagaacgtgaaaaagtgcaagaacttcctttccacgttgataaaactggctagcagtggcaagcagagtactgagaccgcggctaatgtcaaggagcttgttcagaacctgctggacggtaagattgaagctgaggatttcacttctagactctaccgagaattgaactcatctccccagccgtatctcgtgccctttctgaagcgatccttgccagccctcagacaattgacccccgacagtgcggcatttattcagcaatctcagcagcaacccccacccccaacgtcccaggcaacgaccgccttaactgccgtcgtgctgtcttcatcagtgcagcgcacagctggaaaaaccgcagcaactgtaactagtgctcttcagccaccggtcctgagcctcacccagcctacccaggttggagtgggcaagcagggccagcccactcccttggtcattcagcagccccctaaacctggggctcttatccgacccccacaggtcaccttaactcaaacacccatggtcgcccttaggcagccccacaacaggattatgctaaccaccccgcagcagattcagctgaatccgctccagccggttccggtggttaagcctgcagtacttcccggaactaaagcattgagtgcagtttcggctcaggcagcagccgcacagaaaaataaactcaaggagcctggcggaggctcctttagagatgacgacgacatcaatgacgtggcgagtatggcaggggtgaacctgagcgaggagagcgcaaggatcttggcaaccaactctgaactggtcggcacacttactcggagttgcaaggacgagacctttctattgcaagccccactgcagagaaggattctggagatcggtaaaaaacatggtattacagaactacaccccgacgtcgtctcctacgtatcccatgcaactcagcagcggctacagaacctggtggaaaagatctctgagacagctcagcagaagaatttcagttacaaggatgacgataggtacgagcaggccagcgatgtgagagcacaactgaaattctttgaacagcttgaccagatcgagaaacaaaggaaggacgaacaggagcgggagattctgatgcgagccgctaaaagcagaagtagacaggaagatcccgagcagctgcgtttaaaacagaaggctaaagaaatgcagcagcaggaactggctcaaatgcggcagagagatgccaacttgactgcattggccgcaatagggccaaggaagaaacggaaggtggactgtccaggacctggctccggggcagagggctctgggcctggatccgttgtgccaggctcttccggtgtgggcacacccagacagttcacacgccagcgaattacccgcgtcaacctgcgagatttaatcttctgtctggagaacgagcgagagactagtcatagcttgcttctctataaagcctttttaaaatag

SEQ ID NO: 135922 - DNA, 2850 bp, Artificial Sequence
  derived and/or modified sequence
ggacggggactcctccaacagcgcggaggccgagaatcggggccagcaccacctgccgctaagctgagaccacctccagagggatctgcagggagctgcgcccctgtgccagccgcagccgcagtagcagcaggcccagaaccagcccctgctggccctgctaagcccgcaggacccgctgcactggctgccagggcgggacctggccctgggcctggacccggacccggtccaggtcccggaccaggtaagccagctggccctggcgctgcacagacacttaacgggagcgccgctctgctgaactctcaccacgctgctgcgccagctgtgtccctggtgaacaacggccctgccgctttactacctttgccaaagcctgcggctcctgctgctgccccaccaccaccccctcccgcacctgccacgcttgcgagacccccaggccatccggctggcccacctacagctgcacctgccgtgcccccacccgctgctgcccagaacggcggatccgccggtgccgctcccgctcccgctcctgctgccggtgggccagccggagtgtcaggacagcctgggccaggcgcagccgctgctgctcccgcaccaggcgtgaaagctgagtccccgaaacgtgtggtgcaagccgctcccccagcggctcagacactggcagcctcagggcctgcatccacagctgcctcaatggtgattgggcctaccatgcagggcgctttaccgtccccagccgcagttcctccccctgccccaggcacgccaacaggactgcccaagggagctgccggagccgtgacccagtcgctctcccggaccccaaccgccaccactagcggcattcgagccactctgactcctacagtgctcgcacccagactgccccaaccacctcagaatcctaccaacattcagaacttccaactcccccctggaatggtgctagtgcgaagtgaaaatggccagcttctgatgattcctcagcaggcccttgcacagatgcaggcccaggctcatgcacaaccacaaaccactatggcccctaggccagccactcctaccagcgcgccacccgtacagatttcaaccgtgcaggctcccggtactcctatcattgccagacaggtgactcccacaactattatcaaacaggttagccaagcccagaccacagtacagccatctgccacgcttcagaggagccccggtgtgcaaccacagctggtgctgggcggagcagcacaaacagcctctttgggaaccgccaccgccgtgcagacaggcacgccccagagaaccgttcccggagctacaacaacctcttccgcagcgacagagacaatggaaaacgtcaaaaaatgcaaaaattttcttagcacacttattaaactggcttccagcggcaagcagtccacagagactgcggcaaatgtgaaggagttggtgcagaacctgctggatggcaagatcgaagcagaagatttcacgtcccgcctgtacagggaactgaactcctctccacagccctatctcgtcccatttctcaaacgcagtctgccggctcttaggcaactgactccagacagcgctgcgtttattcagcaatcccagcaacaaccccctccccctacaagtcaagctacgactgccctgactgctgtggtgctctcttcttctgtgcagcggaccgctggcaagaccgccgctaccgtgacctcagccctgcagccccctgtcctaagcctaacccaacctacacaggtgggcgttgggaagcagggccagcccacccctcttgttattcagcagcccccaaaacctggcgcattaattcgtcccccacaagtcaccctgactcagacaccaatggtcgctttgaggcagccgcacaatcggattatgcttacaacccctcagcaaatccagctgaatccccttcagcccgttcccgtagttaagcccgctgtgttgcccggaaccaaggccctttctgccgtgagcgcccaagcggcagccgcacagaagaacaaactgaaagagccaggcggagggtcatttagagacgacgacgacatcaacgacgtcgcatctatggcgggtgtcaacctgtcagaggaaagcgcccgtattctggctacaaacagtgaacttgtcggcaccctgacccgtagctgcaaagatgagacgttcctcctacaagctcctctgcagcgaaggatcctggagattgggaagaaacacggcatcacggaactgcatcctgatgtggtttcatacgtgagtcacgcgacacagcagcggctgcagaatctcgtcgagaagatttccgagacagcccagcagaaaaacttcagttacaaggatgacgacagatacgagcaggcatcagacgtgagagctcagctcaaatttttcgaacagctggaccaaatcgaaaaacagcgaaaggatgagcaagagagggaaatccttatgagggccgctaagagtaggtccagacaagaagatcccgagcagctcaggcttaagcaaaaggccaaggaaatgcagcagcaggagctcgcccagatgaggcagcgcgacgctaatctgacagccctggcagccatcggccctagaaaaaaaagaaaggtggattgccctgggcctgggtccggcgcagagggatctgggcctggaagcgtggtgcccggaagctccggggtcggaactccgcgacagtttacaagacagagaattacaagggtgaacctgagggatctgatcttctgtctggagaacgagcgagagacatcacattccttactgctttacaaagcgtttttaaaatag

SEQ ID NO: 135923 - DNA, 4630 bp, Artificial Sequence
  derived and/or modified sequence
atggcggcgggctcggatctgctggacgaggtcttcttcaacagcgaggtggacgagaaagtggtgagcgacctggtgggctcgctggagtcgcagctggcggccagcgcggcccaccaccaccacctcgcgccgcgcacgcccgaggtgcgggccgcggccgccggcgcgctcgggaaccatgttgtgagcggcagcccggccggagccgcgggcgcagggccggccgcccccgccgagggcgcgcccggagcggcgccggagccgccccccgcaggtagagcgcggccggggggcggggggccgcagcgcccgggccccccctcaccgcgccgcccccttgtccccgcagggcccgcgccgcccgccgcgaagctgaggccgccgcccgagggcagcgcggggtcctgcgccccggtgcccgccgccgccgccgtcgccgcggggcccgagcccgcccccgccggccccgccaagcccgccggccccgccgcgctggccgcccgcgccggccccggccccgggcccggccccggccccggccccggccctggccctggcaagcccgccggccccggcgccgcgcaaactttgaatgggagcgccgcgctgctgaactcgcaccacgccgccgcacctgctgtcagcctggtcaacaacgggcccgccgcgctgctgccgctgcccaagcccgccgcccccggcactgtcatccagacgccccccttcgtgggcgccgccgcgccccccgcgcccgccgcgccctcgccccccgccgcccccgcgcccgccgcccccgccgccgccccgcccccgccaccccccgcgcccgccactctggcccggccgcccggccaccccgccggacccccgaccgccgcgcccgccgtgccgccccccgccgccgcccagaacgggggcagcgccggggcagcccccgcccccgccccggccgccgggggccccgcgggggtcagcggccaacccgggcccggcgcggcggctgcggcgccggcgccgggggtcaaggccgagtcgcccaagagggtggtgcaggcggcgcccccggcggcgcagaccctggcggccagcggcccggccagcacggcggccagcatggtcatcgggccaactatgcaaggggcgctgcccagcccggccgccgtcccgccgcccgcccccgggacccccaccgggctgcccaaaggcgcggccggcgcagtgacccagagcctgtcccggacgcccacggccaccaccagcgggattcgggccaccctgacgcccaccgtgctggccccccgcttgccgcagccgcctcagaacccgaccaacatccagaacttccagctgcccccaggaatggtcctcgtccgaagtgagaatgggcagttgttaatgattcctcagcaggccttggcccagatgcaggcgcaggcccatgcccagcctcagaccaccatggcgcctcgccctgccacccccacaagtgcccctcccgtccagatctccaccgtacaggcacctggaacacctatcattgcacggcaggtgaccccaactaccataattaagcaagtgtctcaggcccagacaacggtgcagcccagtgcaaccctgcagcgctcgcccggcgtccagcctcagctcgttctgggtggcgctgcccagacggcttcacttgggacggcgacggctgttcagacggggactcctcagcgcacggtaccaggggcgaccaccacttcctcagctgccacggaaactatggaaaacgtgaagaaatgtaaaaatttcctatctacgttaataaaactggcttcatctggcaagcagtctacagagacagcagctaatgtgaaagagctcgtgcagaatttactggatggaaaaatagaagcagaagatttcacaagcaggttataccgagaacttaattcttcacctcaaccttaccttgtgcctttcctgaagaggagcttacccgccttgagacagctgacccccgactccgcggccttcatccagcagagccagcagcagccgccaccgcccacctcgcaggccaccactgcgctcacggccgtggtgctgagtagctcggtccagcgcacggccgggaagacggcggccaccgtgaccagtgccctccagccccctgtgctcagcctcacgcagcccacgcaggtcggcgtcggcaagcaggggcaacccacaccgctggtcatccagcagcctccgaagccaggagccctgatccggcccccgcaggtgacgttgacgcagacacccatggtcgccctgcggcagcctcacaaccggatcatgctcaccacgcctcagcagatccagctgaacccactgcagccagtccctgtggtgaaacccgccgtgttacctggaaccaaagccctttctgctgtctcggcacaagcagctgctgcacagaaaaataaactcaaggagcctgggggaggttcgtttcgggacgatgatgacattaatgatgttgcatcgatggctggagtaaacttgtcagaagaaagtgcaagaatattagccacgaactctgaattggtgggcacgctaacgcggtcctgtaaagatgaaaccttcctcctccaagcgcctttgcagagaagaatattagaaataggtaaaaaacatggtataacggaattacatccagatgtagtaagttatgtatcacatgccacgcaacaaaggctacagaatcttgtagagaaaatatcagaaacagctcagcagaagaacttttcttacaaggatgacgacagatatgagcaggcgagtgacgtccgggcacagctcaagttttttgaacagcttgatcaaatcgaaaagcagaggaaggatgagcaggagcgggagatcctgatgagggcagcaaagtctcggtcaagacaagaagatccagaacagttaaggctgaaacagaaggcaaaggagatgcagcaacaggaactggcacaaatgagacagcgggacgccaacctcacagcactagcagcgatcgggcccaggaaaaagaggaaagtggactgtccggggccgggctcaggagcagaggggtcgggccccggctcagtggtcccaggcagctcgggtgtcggaacccccagacagttcacgcgacaaagaatcacgcgggtcaacctcagggacctcatattttgtttagaaaatgaacgtgagacaagccattcactgctgctctacaaagcattccttaagtgacacaggaggacgcctggggactttttatatatttgcagattacgcctttttgtaacgagcaaatgggatattgtttaaaaaacagccacctctttacaatggaacagttttatattcctgtttctaaatcagctcttcagtgtgaaagaaaacacgtttctgtaacagagagaacacaaaggcctgtggatactcttaaaggacaattaaatcttaactcatcttgattgagtggccttcctgccaaacaagccatatataaagactgatggaatcgttagcaaataattagctgccctctgtcaactcatagcagtttctgcattatttgtgcattttggtttagttctacctaacttactatgtaggtgtatgtctacagccgatgacctcatttcgtttattttatttttgtaatagtcagttggcaaagcaaactgattttttagactatttatcttccttcccttcccctcccaccccgctctcctctctgccccctgccctcccctcccctcccttcccctccactccgctgagaatcctggaggaatacacaattcatcgttgcacccccacctcagagtgtaatcgcatttctgcttggtagaggccgagcccagcaaaggtggctccttctgaatgtgtggtcagcatctgtacaaatgcattttatttgctatagtttgtaaagctgtaaagttaaaagagatgaaaaccttttcagcataaatatattttacttgcactgtgttttttagctaaaagtgaaaacctagattaaataaaatcaaagttgagaagaatcatcaaaagactgtttctcggtgtgaatcaagtgttgaaaaatggttggtgtattttgtcagtaattgtacataacttttggcacatgacatagaaatggctatgtaaactataattattttgctaagagactgtatgcaagccttgggccgactttacagacgtccagagcaaagccccttctttgtacctatttttttattacaaatatactaattggttctttctattttcagaggttattgtatgaaattgtctattgatagtacttttatgactgtaaatactctggctttctccgtgtgaattctcacattagactttaattcgagcgcgtgtgaactgaacgctgatcagtattttttatcaacacctgagaactgttacaccttttattttgtcttttaggaaatccctgtctttccattttttcatgtaaattttgcacagttacttgttcatatgtaaatattttactttcagaaatgaagtttttaattgctattgttttatataggattgaaagaaaattaactcctttattaaaaacaaatttatctgtatt

SEQ ID NO: 135924 - DNA, 4222 bp, Artificial Sequence
  derived and/or modified sequence
ggacgaggtcttcttcaacagcgaggtggacgagaaagtgggcccgcgccgcccgccgcgaagctgaggccgccgcccgagggcagcgcggggtcctgcgccccggtgcccgccgccgccgccgtcgccgcggggcccgagcccgcccccgccggccccgccaagcccgccggccccgccgcgctggccgcccgcgccggccccggccccgggcccggccccggccccggccccggccctggccctggcaagcccgccggccccggcgccgcgcaaactttgaatgggagcgccgcgctgctgaactcgcaccacgccgccgcacctgctgtcagcctggtcaacaacgggcccgccgcgctgctgccgctgcccaagcccgccgcccccgccgccgccccgcccccgccaccccccgcgcccgccactctggcccggccgcccggccaccccgccggacccccgaccgccgcgcccgccgtgccgccccccgccgccgcccagaacgggggcagcgccggggcagcccccgcccccgccccggccgccgggggccccgcgggggtcagcggccaacccgggcccggcgcggcggctgcggcgccggcgccgggggtcaaggccgagtcgcccaagagggtggtgcaggcggcgcccccggcggcgcagaccctggcggccagcggcccggccagcacggcggccagcatggtcatcgggccaactatgcaaggggcgctgcccagcccggccgccgtcccgccgcccgcccccgggacccccaccgggctgcccaaaggcgcggccggcgcagtgacccagagcctgtcccggacgcccacggccaccaccagcgggattcgggccaccctgacgcccaccgtgctggccccccgcttgccgcagccgcctcagaacccgaccaacatccagaacttccagctgcccccaggaatggtcctcgtccgaagtgagaatgggcagttgttaatgattcctcagcaggccttggcccagatgcaggcgcaggcccatgcccagcctcagaccaccatggcgcctcgccctgccacccccacaagtgcccctcccgtccagatctccaccgtacaggcacctggaacacctatcattgcacggcaggtgaccccaactaccataattaagcaagtgtctcaggcccagacaacggtgcagcccagtgcaaccctgcagcgctcgcccggcgtccagcctcagctcgttctgggtggcgctgcccagacggcttcacttgggacggcgacggctgttcagacggggactcctcagcgcacggtaccaggggcgaccaccacttcctcagctgccacggaaactatggaaaacgtgaagaaatgtaaaaatttcctatctacgttaataaaactggcttcatctggcaagcagtctacagagacagcagctaatgtgaaagagctcgtgcagaatttactggatggaaaaatagaagcagaagatttcacaagcaggttataccgagaacttaattcttcacctcaaccttaccttgtgcctttcctgaagaggagcttacccgccttgagacagctgacccccgactccgcggccttcatccagcagagccagcagcagccgccaccgcccacctcgcaggccaccactgcgctcacggccgtggtgctgagtagctcggtccagcgcacggccgggaagacggcggccaccgtgaccagtgccctccagccccctgtgctcagcctcacgcagcccacgcaggtcggcgtcggcaagcaggggcaacccacaccgctggtcatccagcagcctccgaagccaggagccctgatccggcccccgcaggtgacgttgacgcagacacccatggtcgccctgcggcagcctcacaaccggatcatgctcaccacgcctcagcagatccagctgaacccactgcagccagtccctgtggtgaaacccgccgtgttacctggaaccaaagccctttctgctgtctcggcacaagcagctgctgcacagaaaaataaactcaaggagcctgggggaggttcgtttcgggacgatgatgacattaatgatgttgcatcgatggctggagtaaacttgtcagaagaaagtgcaagaatattagccacgaactctgaattggtgggcacgctaacgcggtcctgtaaagatgaaaccttcctcctccaagcgcctttgcagagaagaatattagaaataggtaaaaaacatggtataacggaattacatccagatgtagtaagttatgtatcacatgccacgcaacaaaggctacagaatcttgtagagaaaatatcagaaacagctcagcagaagaacttttcttacaaggatgacgacagatatgagcaggcgagtgacgtccgggcacagctcaagttttttgaacagcttgatcaaatcgaaaagcagaggaaggatgagcaggagcgggagatcctgatgagggcagcaaagtctcggtcaagacaagaagatccagaacagttaaggctgaaacagaaggcaaaggagatgcagcaacaggaactggcacaaatgagacagcgggacgccaacctcacagcactagcagcgatcgggcccaggaaaaagaggaaagtggactgtccggggccgggctcaggagcagaggggtcgggccccggctcagtggtcccaggcagctcgggtgtcggaacccccagacagttcacgcgacaaagaatcacgcgggtcaacctcagggacctcatattttgtttagaaaatgaacgtgagacaagccattcactgctgctctacaaagcattccttaagtgacacaggaggacgcctggggactttttatatatttgcagattacgcctttttgtaacgagcaaatgggatattgtttaaaaaacagccacctctttacaatggaacagttttatattcctgtttctaaatcagctcttcagtgtgaaagaaaacacgtttctgtaacagagagaacacaaaggcctgtggatactcttaaaggacaattaaatcttaactcatcttgattgagtggccttcctgccaaacaagccatatataaagactgatggaatcgttagcaaataattagctgccctctgtcaactcatagcagtttctgcattatttgtgcattttggtttagttctacctaacttactatgtaggtgtatgtctacagccgatgacctcatttcgtttattttatttttgtaatagtcagttggcaaagcaaactgattttttagactatttatcttccttcccttcccctcccaccccgctctcctctctgccccctgccctcccctcccctcccttcccctccactccgctgagaatcctggaggaatacacaattcatcgttgcacccccacctcagagtgtaatcgcatttctgcttggtagaggccgagcccagcaaaggtggctccttctgaatgtgtggtcagcatctgtacaaatgcattttatttgctatagtttgtaaagctgtaaagttaaaagagatgaaaaccttttcagcataaatatattttacttgcactgtgttttttagctaaaagtgaaaacctagattaaataaaatcaaagttgagaagaatcatcaaaagactgtttctcggtgtgaatcaagtgttgaaaaatggttggtgtattttgtcagtaattgtacataacttttggcacatgacatagaaatggctatgtaaactataattattttgctaagagactgtatgcaagccttgggccgactttacagacgtccagagcaaagccccttctttgtacctatttttttattacaaatatactaattggttctttctattttcagaggttattgtatgaaattgtctattgatagtacttttatgactgtaaatactctggctttctccgtgtgaattctcacattagactttaattcgagcgcgtgtgaactgaacgctgatcagtattttttatcaacacctgagaactgttacaccttttattttgtcttttaggaaatccctgtctttccattttttcatgtaaattttgcacagttacttgttcatatgtaaatattttactttcagaaatgaagtttttaattgctattgttttatataggattgaaagaaaattaactcctttattaaaaacaaatttatctgtatt

SEQ ID NO: 135925 - protein, 264 aa, Artificial Sequence
  derived and/or modified sequence
MESGKTASPKSMPKDAQMMAQILKDMGITEYEPRVINQMLEFAFRYVTTILDDAKIYSSHAKKATVDADDVRLAIQCRADQSFTSPPPRDFLLDIARQRNQTPLPLIKPYSGPRLPPDRYCLTAPNYRLKSLQKKASTSAGRITVPRLSVGSVTSRPSTPTLGTPTPQTMSVSTKVGTPMSLTGQRFTVQMPTSQSPAVKASIPATSAVQNVLINPSLIGSKNILITTNMMSSQNTANESSNALKRKREDDDDDDDDDDDYDNL

SEQ ID NO: 135926 - protein, 198 aa, Artificial Sequence
  derived and/or modified sequence
MESGKTASPKSMPKDAQMMAQILKDMGITEYEPRVINQMLEFAFRYVTTILDDAKIYSSHAKKATVDADDVRLAIQCRADQSFTSPPPRDFLLDIARQRNQTPLPLIKPYSGPRLPPDRYCLTAPNYRLKSLQKKASTSAGRITVPRLSVGSVTSRPSTPTLGTPTPQTMSVSTKVGTPMSLTGQRFTVQMPTSQSPA

SEQ ID NO: 135927 - protein, 136 aa, Artificial Sequence
  derived and/or modified sequence
MESGKTASPKSMPKDAQMMAQILKDMGITEYEPRVINQMLEFAFRYVTTILDDAKIYSSHAKKATVDADDVRLAIQCRADQSFTSPPPRDFLLDIARQRNQTPLPLIKPYSGPRLPPDRYCLTAPNYRLKSLQKKA

SEQ ID NO: 135928 - protein, 102 aa, Artificial Sequence
  derived and/or modified sequence
MESGKTASPKSMPKDAQMMAQILKDMGITEYEPRVINQMLEFAFRYVTTILDDAKIYSSHAKKATVDADDVRLAIQCRADQSFTSPPPRDFLLDIARQRNQT

SEQ ID NO: 135929 - protein, 166 aa, Artificial Sequence
  derived and/or modified sequence
MESGKTASPKSMPKDAQMMAQILKDMGITEYEPRVINQMLEFAFRYVTTILDDAKIYSSHAKKATVDADDVRLAIQCRADQSFTSPPPRDFLLDIARQRNQTPLPLIKPYSGPRLPPDRYCLTAPNYRLKSLQKKASTSAGRITVPRLSVGSVTSRPSTPTLGTPT

SEQ ID NO: 135930 - protein, 127 aa, Artificial Sequence
  derived and/or modified sequence
MESGKTASPKSMPKDAQMMAQILKDMGITEYEPRVINQMLEFAFRYVTTILDDAKIYSSHAKKATVDADDVRLAIQCRADQSFTSPPPRDFLLDIARQRNQTPLPLIKPYSGPRLPPDRYCLTAPNY

SEQ ID NO: 135931 - DNA, 1245 bp, Artificial Sequence
  derived and/or modified sequence
gtgggcttttgctgccgcccgccccttccggctcctccctgtagagcaaagggcacgtgagcgaggcgcccgaagccgtcgcggcggggaccatgttgcttccgaacatcctgctcaccggtacaccaggggttggaaaaaccacactaggcaaagaacttgcgtcaaaatcaggactgaaatacattaatgtgggtgatttagctcgagaagtctgatcatcggatatcatggagtctggcaagacggcttctcccaagagcatgccgaaagatgcacagatgatggcacaaatcctgaaggatatggggattacagaatatgagccaagagttataaatcagatgttggagtttgccttccgatatgtgaccacaattctagatgatgcaaaaatttattcaagccatgctaagaaagctactgttgatgcagatgatgtgcgattggcaatccagtgccgcgctgatcagtcttttacctctcctcccccaagagattttttattagatattgcaaggcaaagaaatcaaacccctttgccattgatcaagccatattcaggtcctaggttgccacctgatagatactgcttaacagctccaaactataggctgaaatctttacagaaaaaggcatcaacttctgcgggaagaataacagtcccgcggttaagtgttggttcagttactagcagaccaagtactcccacactaggcacaccaaccccacagaccatgtctgtttcaactaaagtagggactcccatgtccctcacaggtcaaaggtttacagtacagatgcctacttctcagtctccagctgtaaaagcttcaattcctgcaacctcagcagttcagaatgttctgattaatccatcattaatcgggtccaaaaacattcttattaccactaatatgatgtcatcacaaaatactgccaatgaatcatcaaatgcattgaaaagaaaacgtgaagatgatgatgatgacgatgatgatgatgatgactatgataatctgtaatctagccttgctgaatgtaacatgtatacttggtcttgaattcattgtactgatattaaacatgcatgctggatgttttcaagttgtgttttagaaaactaataataatgagtaaacacagttaccatacttttcaattgaaatgaaggtttttcatcagccttaaaagtgtaagaaaaataaagttgtcattcattcgaaaaaaaaaaaaaaaaaaaaa

SEQ ID NO: 135932 - DNA, 795 bp, Artificial Sequence
  derived and/or modified sequence
atggagagcggcaagaccgccagccccaagagcatgcccaaggacgcccagatgatggcccagatcctgaaggacatgggcatcaccgagtacgagcccagagtgatcaaccagatgctggagttcgccttcagatacgtgaccaccatcctggacgacgccaagatctacagcagccacgccaagaaggccaccgtggacgccgacgacgtgagactggccatccagtgcagagccgaccagagcttcaccagccccccccccagagacttcctgctggacatcgccagacagagaaaccagacccccctgcccctgatcaagccctacagcggccccagactgccccccgacagatactgcctgaccgcccccaactacagactgaagagcctgcagaagaaggccagcaccagcgccggcagaatcaccgtgcccagactgagcgtgggcagcgtgaccagcagacccagcacccccaccctgggcacccccaccccccagaccatgagcgtgagcaccaaggtgggcacccccatgagcctgaccggccagagattcaccgtgcagatgcccaccagccagagccccgccgtgaaggccagcatccccgccaccagcgccgtgcagaacgtgctgatcaaccccagcctgatcggcagcaagaacatcctgatcaccaccaacatgatgagcagccagaacaccgccaacgagagcagcaacgccctgaagagaaagagagaggacgacgacgacgacgacgacgacgacgacgactacgacaacctgtag

SEQ ID NO: 135933 - DNA, 795 bp, Artificial Sequence
  derived and/or modified sequence
atggaatctgggaaaaccgcttctccaaagagtatgcctaaggatgcccagatgatggcccagatcctcaaggatatggggatcacggagtacgagccccgggtgatcaaccaaatgttggagttcgcgttccggtacgtcacaaccattctggatgacgctaaaatctacagctcccatgcaaagaaggcgactgttgacgctgatgacgtgcgcctagcaatccaatgtcgagcggaccaaagtttcacaagccctccaccgcgggattttctgctagacatcgctcgtcagaggaaccaaacccccttgcctcttatcaagccctactccggccccagactacctcctgaccgttactgcctgaccgcacccaactaccggctgaagtctttgcagaagaaagcaagtacgagcgccgggagaatcaccgtaccaagattgtccgttggatccgtcactagtcgcccttcaacgccgacccttggaacccctactcctcagaccatgtctgtcagcactaaagttggaacacctatgtccctgaccggtcaaagattcacagtacagatgcccacctcacagagccctgctgttaaggctagtatcccagcaacgtcagcggtgcagaacgtgctcatcaaccctagcctcatcggctctaaaaacatcctgatcaccaccaatatgatgtcatcacagaacactgcaaatgaatcctctaacgctctgaaaaggaaacgggaggacgacgacgacgatgatgacgacgatgatgactatgacaatctgtag

SEQ ID NO: 135934 - DNA, 795 bp, Artificial Sequence
  derived and/or modified sequence
atggagagcggcaagacagccagccccaagtccatgcccaaggatgcccagatgatggcccagatcctgaaggacatgggcatcacagaatatgagcccagggtcatcaaccagatgctggagtttgccttccgctacgtgaccaccatcctggatgatgccaagatctacagcagccacgccaagaaggccaccgtggatgctgatgatgtgcggctggccatccagtgcagagctgaccagagcttcaccagccccccaccccgggacttcctgctggacatcgcccggcagaggaaccagacccccctgcccctcatcaagccctacagcggcccccggctgcccccagaccgctactgcctgacagcccccaactaccgcctgaagagcctgcagaagaaggccagcaccagcgctggccgcatcaccgtgccccggctgtctgtgggctctgtgaccagccggcccagcacccccaccctgggcacccccaccccccagaccatgtctgtgtccaccaaggtgggcacccccatgagcctgaccggccagcgcttcaccgtgcagatgcccaccagccagagccctgctgtgaaggccagcatcccagccaccagcgctgtgcagaatgtgctgatcaaccccagcctgattggcagcaagaacatcctgatcaccaccaacatgatgagcagccagaacacagccaatgaaagcagcaatgccctgaagaggaagagagaagatgatgatgatgatgatgatgatgatgatgattatgacaacctgtag

SEQ ID NO: 135935 - DNA, 795 bp, Artificial Sequence
  derived and/or modified sequence
atggagagcggcaagaccgccagccccaagagcatgcccaaggacgctcagatgatggcccagattctgaaagacatgggcattaccgagtacgagccgcgcgtgattaatcaaatgctggaattcgcttttcggtatgtgactactatcttagacgatgccaagatttactcttctcatgcaaagaaagctaccgtggacgccgacgacgttagactcgctatccagtgcagggccgaccagagcttcacctcacctccacctcgcgactttttgctagacatcgccagacagaggaaccagaccccgctgcctttgattaagccttacagcggcccgcgcttgcctcctgataggtattgccttaccgcaccaaactatagactgaaaagcctgcagaagaaggcctccacctcagcaggccggattacagtccctaggctgagtgtgggctccgtcacttctcggccctctacacccaccctcgggaccccaactccccagaccatgagcgtgtccaccaaggttgggacgccaatgagcctgactgggcagaggtttaccgtgcagatgcctacgtcccaatctcccgcggtgaaggccagtatccctgcaacatccgccgtccaaaatgtgttaataaacccatcacttattggctcgaaaaatatcctgattacaaccaatatgatgtcctcccagaatactgccaatgagtcttcaaatgcccttaagaggaagcgagaggatgatgatgatgacgacgacgacgacgatgattacgacaacctatag

SEQ ID NO: 135936 - DNA, 795 bp, Artificial Sequence
  derived and/or modified sequence
atggagagtggcaagaccgcaagccctaagtccatgccaaaagatgcccagatgatggctcagatactgaaggatatgggcataaccgagtatgagccacgagttattaaccagatgttggaatttgcttttaggtatgtcaccacgatactcgatgatgccaagatctacagtagccatgctaaaaaggccactgtggatgcagatgacgttaggcttgctattcagtgtagagcagaccagtcttttacctcccctcccccaagagattttcttctggacattgcacggcaaaggaaccagacacccctgccccttattaagccatatagtggtcccaggctgccacccgaccgatattgtctgactgccccaaattatcgccttaaatctcttcaaaagaaggcaagcacaagcgccggtaggataaccgtcccgagactttccgtgggatctgtgacttctcgcccatctactcctaccctggggactccaactccacagaccatgtcagtgtcaacaaaggtgggcacccccatgtctttaaccggccagcgtttcaccgttcagatgccaaccagccagtcaccagcagtgaaggccagtataccagccacttccgccgttcagaacgtgctaataaatccgtctttgattggttcaaagaatattttgattaccaccaatatgatgtctagtcaaaataccgctaacgaatcatctaacgccctcaagcgaaaacgcgaggatgatgatgatgacgacgatgacgatgatgattacgacaatctgtag

SEQ ID NO: 135937 - DNA, 1283 bp, Artificial Sequence
  derived and/or modified sequence
gcggctgggccgccggggcaggctaggggcgccgcggtgggcttcggggcctttggggccgtgggcttttgctgccgcccgccccttccggctcctccctgtagagcaaagggcacgtgagcgaggcgcccgaagccgtcgcggcggggaccatgttgcttccgaacatcctgctcaccggtacaccaggggttggaaaaaccacactaggcaaagaacttgcgtcaaaatcaggactgaaatacattaatgtgggtgatttagctcgagaagtctgatcatcggatatcatggagtctggcaagacggcttctcccaagagcatgccgaaagatgcacagatgatggcacaaatcctgaaggatatggggattacagaatatgagccaagagttataaatcagatgttggagtttgccttccgatatgtgaccacaattctagatgatgcaaaaatttattcaagccatgctaagaaagctactgttgatgcagatgatgtgcgattggcaatccagtgccgcgctgatcagtcttttacctctcctcccccaagagattttttattagatattgcaaggcaaagaaatcaaacccctttgccattgatcaagccatattcaggtcctaggttgccacctgatagatactgcttaacagctccaaactataggctgaaatctttacagaaaaaggcatcaacttctgcgggaagaataacagtcccgcggttaagtgttggttcagttactagcagaccaagtactcccacactaggcacaccaaccccacagaccatgtctgtttcaactaaagtagggactcccatgtccctcacaggtcaaaggtttacagtacagatgcctacttctcagtctccagctgtaaaagcttcaattcctgcaacctcagcagttcagaatgttctgattaatccatcattaatcgggtccaaaaacattcttattaccactaatatgatgtcatcacaaaatactgccaatgaatcatcaaatgcattgaaaagaaaacgtgaagatgatgatgatgacgatgatgatgatgatgactatgataatctgtaatctagccttgctgaatgtaacatgtatacttggtcttgaattcattgtactgatattaaacatgcatgctggatgttttcaagttgtgttttagaaaactaataataatgagtaaacacagttaccatacttttcaattgaaatgaaggtttttcatcagccttaaaagtgtaagaaaaataaagttgtcattcattc

SEQ ID NO: 135938 - DNA, 597 bp, Artificial Sequence
  derived and/or modified sequence
atggagagcggcaagaccgccagccccaagagcatgcccaaggacgcccagatgatggcccagatcctgaaggacatgggcatcaccgagtacgagcccagagtgatcaaccagatgctggagttcgccttcagatacgtgaccaccatcctggacgacgccaagatctacagcagccacgccaagaaggccaccgtggacgccgacgacgtgagactggccatccagtgcagagccgaccagagcttcaccagccccccccccagagacttcctgctggacatcgccagacagagaaaccagacccccctgcccctgatcaagccctacagcggccccagactgccccccgacagatactgcctgaccgcccccaactacagactgaagagcctgcagaagaaggccagcaccagcgccggcagaatcaccgtgcccagactgagcgtgggcagcgtgaccagcagacccagcacccccaccctgggcacccccaccccccagaccatgagcgtgagcaccaaggtgggcacccccatgagcctgaccggccagagattcaccgtgcagatgcccaccagccagagccccgcctag

SEQ ID NO: 135939 - DNA, 411 bp, Artificial Sequence
  derived and/or modified sequence
atggagagcggcaagaccgccagccccaagagcatgcccaaggacgcccagatgatggcccagatcctgaaggacatgggcatcaccgagtacgagcccagagtgatcaaccagatgctggagttcgccttcagatacgtgaccaccatcctggacgacgccaagatctacagcagccacgccaagaaggccaccgtggacgccgacgacgtgagactggccatccagtgcagagccgaccagagcttcaccagccccccccccagagacttcctgctggacatcgccagacagagaaaccagacccccctgcccctgatcaagccctacagcggccccagactgccccccgacagatactgcctgaccgcccccaactacagactgaagagcctgcagaagaaggcctag

SEQ ID NO: 135940 - DNA, 309 bp, Artificial Sequence
  derived and/or modified sequence
atggagagcggcaagaccgccagccccaagagcatgcccaaggacgcccagatgatggcccagatcctgaaggacatgggcatcaccgagtacgagcccagagtgatcaaccagatgctggagttcgccttcagatacgtgaccaccatcctggacgacgccaagatctacagcagccacgccaagaaggccaccgtggacgccgacgacgtgagactggccatccagtgcagagccgaccagagcttcaccagccccccccccagagacttcctgctggacatcgccagacagagaaaccagacctag

SEQ ID NO: 135941 - DNA, 501 bp, Artificial Sequence
  derived and/or modified sequence
atggagagcggcaagaccgccagccccaagagcatgcccaaggacgcccagatgatggcccagatcctgaaggacatgggcatcaccgagtacgagcccagagtgatcaaccagatgctggagttcgccttcagatacgtgaccaccatcctggacgacgccaagatctacagcagccacgccaagaaggccaccgtggacgccgacgacgtgagactggccatccagtgcagagccgaccagagcttcaccagccccccccccagagacttcctgctggacatcgccagacagagaaaccagacccccctgcccctgatcaagccctacagcggccccagactgccccccgacagatactgcctgaccgcccccaactacagactgaagagcctgcagaagaaggccagcaccagcgccggcagaatcaccgtgcccagactgagcgtgggcagcgtgaccagcagacccagcacccccaccctgggcacccccacctag

SEQ ID NO: 135942 - DNA, 384 bp, Artificial Sequence
  derived and/or modified sequence
atggagagcggcaagaccgccagccccaagagcatgcccaaggacgcccagatgatggcccagatcctgaaggacatgggcatcaccgagtacgagcccagagtgatcaaccagatgctggagttcgccttcagatacgtgaccaccatcctggacgacgccaagatctacagcagccacgccaagaaggccaccgtggacgccgacgacgtgagactggccatccagtgcagagccgaccagagcttcaccagccccccccccagagacttcctgctggacatcgccagacagagaaaccagacccccctgcccctgatcaagccctacagcggccccagactgccccccgacagatactgcctgaccgcccccaactactag

SEQ ID NO: 135943 - DNA, 795 bp, Artificial Sequence
  derived and/or modified sequence
atggagagtggcaagaccgcgtcacctaaaagcatgcctaaggacgctcaaatgatggcccagattcttaaggatatgggcatcaccgagtatgagccacgagtcatcaatcagatgttggaatttgcgttcaggtacgtgacaaccatcctggatgacgccaaaatctatagttctcatgccaagaaagccaccgtggatgcagatgatgtgcgtctcgctattcagtgtcgggccgaccagagcttcacctctccccctccacgggatttcctgctcgatattgcccggcagcgaaatcagacccccctccctttaattaagccctatagtggacccaggctgcctcctgataggtactgtttgactgccccgaactataggctgaagagtctgcaaaagaaggccagcactagcgcggggcgaatcactgttccacggctgagtgttggatctgtgacgagccgaccgtcgacaccaactctaggcaccccaactccgcagaccatgagcgtgagcactaaggtaggaactccaatgagcctgactggtcaaagattcactgtccagatgcctacgagtcagagccccgcagtgaaagcttcgattcctgcaactagcgcagtgcagaatgtgcttataaatccttcgctgatcggcagcaaaaacattcttatcacgacaaatatgatgagcagtcagaacactgccaatgagtcttcaaacgccctgaaaaggaaaagagaggacgatgacgatgacgacgatgacgatgacgattacgataatttgtag

SEQ ID NO: 135944 - DNA, 795 bp, Artificial Sequence
  derived and/or modified sequence
atggagtcaggtaagacagcttcccccaagagcatgccaaaggacgctcagatgatggcgcaaatccttaaagatatgggcattactgagtacgaaccacgagtgatcaatcaaatgctggagtttgcctttcgatatgtgaccaccatactcgacgatgccaagatttatagtagccatgcaaagaaagccaccgtagatgctgacgacgttagactcgctatacagtgtagagccgaccagtccttcacctcaccaccaccgagggattttctgttagacatcgcccggcagagaaatcagacacctttacccctgatcaagccctattccggtccacggctgcctcctgatcggtattgtctgacggcccccaattaccgtctgaaatccctccaaaagaaggcgtccacgagcgcaggacggatcacagtgccacggctgtctgtgggaagcgtgacatcccgtccatcaacacccaccctggggacaccgacccctcagactatgagtgtgtcaactaaggtcggtacaccaatgtctctgactggccagcggtttaccgtacagatgcccactagccagtctcctgccgtgaaggcttcaatacctgcaacgagcgctgtccagaacgtgctgatcaacccgtctcttatcggttctaaaaatattctaattacgacgaacatgatgtcctcccagaacactgcaaatgaatcgagtaacgcactgaaacggaaacgggaagatgatgacgacgacgacgatgacgacgatgattacgataacctttag

SEQ ID NO: 135945 - DNA, 597 bp, Artificial Sequence
  derived and/or modified sequence
atggagtccggcaagaccgcctctccaaaatccatgccaaaagatgcccagatgatggctcagattctcaaagacatgggtataactgaatatgaaccaagagtgatcaaccagatgctcgagtttgctttcaggtatgttacaaccattctggatgacgctaaaatatacagttcccatgccaagaaggctactgttgatgccgacgacgtaaggttggcgatccagtgtcgggctgaccagagcttcacttcacctccgcctcgggatttcctgctcgatatcgctcgccagcgtaaccagacacctctgcccctgataaaaccttacagcgggcctagacttccaccggatcggtactgcctgactgcaccgaactaccgattaaagagcctgcagaagaaggcatccacgtcagctggccgcataacagtcccccgactcagtgtagggtcagtgacttcaaggccatcaaccccaactctaggaaccccaaccccccagaccatgagtgtgtcaacgaaggtgggaaccccgatgagcttaactggtcagcggttcaccgtccagatgcccacctcccagtcacctgcatag

SEQ ID NO: 135946 - DNA, 411 bp, Artificial Sequence
  derived and/or modified sequence
atggagtcaggtaagacagcttccccaaagtctatgcctaaggacgcacagatgatggcacagatcctcaaagatatgggtattactgagtatgagcctcgggtcataaaccagatgcttgaattcgcctttcgatacgtcaccacaatacttgatgatgcaaaaatctactccagccacgcgaaaaaggcgacagtcgacgccgacgatgtgcggctagcaatccagtgtagggctgatcagtccttcacttctccccctccgagggacttcctgcttgatatcgctaggcagaggaatcaaacacccctcccgctaattaagccctattcagggcccaggttaccccctgatcgatactgtctgacagctcctaattatagactcaagtccctacagaagaaggcttag

SEQ ID NO: 135947 - DNA, 795 bp, Artificial Sequence
  derived and/or modified sequence
atggaaagcggaaagactgcatctccaaaatctatgccaaaagatgcacaaatgatggctcagattctaaaagatatgggcataaccgaatatgagcctcgcgtgatcaatcaaatgctcgaatttgcatttcggtatgtaactactatactggacgacgcaaaaatatattcctcgcatgctaagaaagccacagttgacgcagatgatgtccggctcgccattcagtgccgagccgatcaatcattcacctcaccccctcccagagacttcctgctcgatattgcgcggcaacgaaatcagactccactgccattgattaagccatactccgggcccaggctgccccctgaccgatattgcctgaccgcccccaactataggcttaagtccctccagaaaaaagcatccacaagcgcgggcagaatcaccgtcccccggctctccgtcggcagtgtgacttcgaggccgtctacacccactttgggtaccccgaccccccagacaatgtctgtatctacaaaggtgggtacacctatgagtctgaccgggcaacgctttaccgtgcaaatgccaacatctcaatcccccgcagtcaaggcatccatccctgctacctctgccgtgcagaatgtcctcattaatccatccctcatcggttccaagaatatcctcattactacaaacatgatgtcatctcaaaatacggcaaatgaatcttcgaacgcccttaaacggaagagagaagacgacgatgatgacgatgacgacgatgatgactatgataatctgtag

SEQ ID NO: 135948 - DNA, 309 bp, Artificial Sequence
  derived and/or modified sequence
atggaaagtggcaaaactgcatccccaaaatccatgccaaaagacgctcagatgatggcgcagatcctgaaagacatggggataactgagtatgaacctcgagttatcaaccaaatgctggagtttgcctttagatatgtgacaacgattctcgatgatgcaaagatatattcttctcatgctaaaaaagccaccgtggacgccgacgacgtcaggctggccatacaatgtagagctgaccagtcttttacctctccgcccccgcgggacttcctgcttgacatcgctagacagaggaatcagacctag

SEQ ID NO: 135949 - DNA, 501 bp, Artificial Sequence
  derived and/or modified sequence
atggaaagtgggaaaactgcctcccctaagagtatgccgaaagacgcgcagatgatggcccagatcttgaaggatatgggcattacagagtacgagccccgagttatcaatcaaatgttggagtttgccttccggtatgtcacaactatcctagatgacgccaagatctacagcagccacgccaaaaaagcaacggtggacgccgacgatgtacgtctggccattcaatgtcgtgcagaccaaagctttacaagcccccctccgcgcgatttcttgctggatattgcccgccagcgaaatcagacccccctgccccttatcaagccgtacagcggaccccgactgcctcccgatcgatattgcctgaccgctcctaactaccgtctgaaaagcctgcagaaaaaagcaagtacaagcgctggccgtatcacggtgcctcggctcagcgtaggctctgtcacctcccgaccctccacacccaccctgggaacgcccacgtag

SEQ ID NO: 135950 - DNA, 384 bp, Artificial Sequence
  derived and/or modified sequence
atggagagcggcaagactgctagccctaaatctatgcctaaagacgcccagatgatggctcaaattctgaaagatatggggatcactgagtacgaaccacgagtaatcaaccagatgctagagtttgcttttcgctatgtaactacaatccttgatgatgctaagatatattcttcgcatgccaagaaggccacagtggacgcagatgatgtcaggcttgccattcagtgcagagccgaccagagctttaccagtcccccccctcgggactttctcctcgacatcgcaaggcagagaaaccagacgcctcttcccctgatcaaaccttactccggcccacggctccctccagatcgatactgtctcacggcccccaactattag

SEQ ID NO: 135951 - DNA, 597 bp, Artificial Sequence
  derived and/or modified sequence
atggagagcggcaagacagccagccccaagtccatgcccaaggatgcccagatgatggcccagatcctgaaggacatgggcatcacagaatatgagcccagggtcatcaaccagatgctggagtttgccttccgctacgtgaccaccatcctggatgatgccaagatctacagcagccacgccaagaaggccaccgtggatgctgatgatgtgcggctggccatccagtgcagagctgaccagagcttcaccagccccccaccccgggacttcctgctggacatcgcccggcagaggaaccagacccccctgcccctcatcaagccctacagcggcccccggctgcccccagaccgctactgcctgacagcccccaactaccgcctgaagagcctgcagaagaaggccagcaccagcgctggccgcatcaccgtgccccggctgtctgtgggctctgtgaccagccggcccagcacccccaccctgggcacccccaccccccagaccatgtctgtgtccaccaaggtgggcacccccatgagcctgaccggccagcgcttcaccgtgcagatgcccaccagccagagccctgcctag

SEQ ID NO: 135952 - DNA, 411 bp, Artificial Sequence
  derived and/or modified sequence
atggagagcggcaagacagccagccccaagtccatgcccaaggatgcccagatgatggcccagatcctgaaggacatgggcatcacagaatatgagcccagggtcatcaaccagatgctggagtttgccttccgctacgtgaccaccatcctggatgatgccaagatctacagcagccacgccaagaaggccaccgtggatgctgatgatgtgcggctggccatccagtgcagagctgaccagagcttcaccagccccccaccccgggacttcctgctggacatcgcccggcagaggaaccagacccccctgcccctcatcaagccctacagcggcccccggctgcccccagaccgctactgcctgacagcccccaactaccgcctgaagagcctgcagaagaaggcctag

SEQ ID NO: 135953 - DNA, 309 bp, Artificial Sequence
  derived and/or modified sequence
atggagagcggcaagacagccagccccaagtccatgcccaaggatgcccagatgatggcccagatcctgaaggacatgggcatcacagaatatgagcccagggtcatcaaccagatgctggagtttgccttccgctacgtgaccaccatcctggatgatgccaagatctacagcagccacgccaagaaggccaccgtggatgctgatgatgtgcggctggccatccagtgcagagctgaccagagcttcaccagccccccaccccgggacttcctgctggacatcgcccggcagaggaaccagacctag

SEQ ID NO: 135954 - DNA, 501 bp, Artificial Sequence
  derived and/or modified sequence
atggagagcggcaagacagccagccccaagtccatgcccaaggatgcccagatgatggcccagatcctgaaggacatgggcatcacagaatatgagcccagggtcatcaaccagatgctggagtttgccttccgctacgtgaccaccatcctggatgatgccaagatctacagcagccacgccaagaaggccaccgtggatgctgatgatgtgcggctggccatccagtgcagagctgaccagagcttcaccagccccccaccccgggacttcctgctggacatcgcccggcagaggaaccagacccccctgcccctcatcaagccctacagcggcccccggctgcccccagaccgctactgcctgacagcccccaactaccgcctgaagagcctgcagaagaaggccagcaccagcgctggccgcatcaccgtgccccggctgtctgtgggctctgtgaccagccggcccagcacccccaccctgggcacccccacctag

SEQ ID NO: 135955 - DNA, 384 bp, Artificial Sequence
  derived and/or modified sequence
atggagagcggcaagacagccagccccaagtccatgcccaaggatgcccagatgatggcccagatcctgaaggacatgggcatcacagaatatgagcccagggtcatcaaccagatgctggagtttgccttccgctacgtgaccaccatcctggatgatgccaagatctacagcagccacgccaagaaggccaccgtggatgctgatgatgtgcggctggccatccagtgcagagctgaccagagcttcaccagccccccaccccgggacttcctgctggacatcgcccggcagaggaaccagacccccctgcccctcatcaagccctacagcggcccccggctgcccccagaccgctactgcctgacagcccccaactactag

SEQ ID NO: 135956 - DNA, 795 bp, Artificial Sequence
  derived and/or modified sequence
atggagagcggcaagaccgccagccccaagagcatgcccaaggacgcccagatgatggctcagattcttaaagacatgggcatcacggagtatgaacctagggtgataaatcagatgctggaattcgcctttcgctatgtgactactatcctcgacgacgctaagatctactcaagccatgctaagaaggccaccgtggacgctgatgacgtgcggctggccattcagtgcagggctgatcaatcttttacctcccctcccccgagagacttccttctcgacattgctagacagcgtaatcaaaccccactgcccctgatcaagccttattccggcccgaggttgccaccagatcgctactgcctcactgcacctaattatcggctgaagagcctgcagaagaaggccagtacttctgccggcaggatcacagtacctcggctgtcggtgggctcggttacctcccgaccgagcactcccacactcggcacgcccactccacagaccatgtctgtgtccactaaggtcggcacgccaatgtccctgacagggcagcggttcactgtccagatgccgaccagccagagcccagccgtcaaggcatccataccagccacctccgccgtccagaacgtcttaataaaccccagcctaatcgggtctaaaaatattctgatcactaccaacatgatgtctagccaaaacaccgctaatgagagcagcaacgccctaaagagaaaacgagaggatgatgacgacgacgacgacgacgacgatgactatgacaacctgtag

SEQ ID NO: 135957 - DNA, 795 bp, Artificial Sequence
  derived and/or modified sequence
atggagagcggcaagaccgccagccccaagagcatgcccaaggacgcccagatgatggctcagattttaaaggatatgggcatcactgagtacgaaccacgggtgatcaaccagatgcttgagtttgccttccgctacgtgactaccatactggatgatgcaaagatctatagcagccatgccaagaaggccacagtcgatgccgacgatgtgcgccttgccattcagtgtcgagccgaccagagttttacatcacctccaccccgggacttcctgctggacatcgcgcgccagaggaaccaaacccccttgccacttatcaaaccgtattctggaccccgcttaccaccagatcgatattgccttaccgcacccaactaccgcctgaaaagcctccagaaaaaggcctcaactagtgccggccgtataactgtgcctaggctgagtgtcggatcggtcacctctagacctagtacccctaccctaggtactccgacaccacagacgatgagcgtctccaccaaggttgggacaccaatgagcttgactggtcaacggtttacagttcagatgcccacatcacagtcaccagcggtgaaagcatcaatcccagcaacttctgctgtgcagaatgttctgatcaatccttccctgatcggcagtaaaaatattctcattactactaatatgatgtcgtcgcagaacaccgcaaacgaaagctcgaacgctctcaaaagaaagcgcgaggacgacgatgacgacgatgatgatgacgatgattacgataatctgtag

SEQ ID NO: 135958 - DNA, 597 bp, Artificial Sequence
  derived and/or modified sequence
atggagagcggcaagaccgccagccccaagagcatgcccaaggacgcacagatgatggcgcagattctaaaggacatgggcattactgagtacgaaccccgcgtgattaatcaaatgcttgagttcgcctttcgctatgtcaccacaattctcgacgacgccaaaatttacagttcccacgcaaaaaaagcgaccgtggacgctgacgacgtgagactggccattcagtgcagggccgatcagtccttcacctcaccacctccgagggactttctgttggatatagccaggcagcgcaatcagacccccctcccactgattaagccatacagcggcccacgtctaccccctgacagatactgtttgaccgctcctaactatagactgaagtctctacagaaaaaggcaagcacatccgccggacggattacagtgcctcggctcagcgtcggctctgtgacaagccggccttcaacacccacactggggacgcctactccacagaccatgtctgtgtccacgaaggtggggacccccatgtcccttaccgggcagcggttcaccgtgcagatgcccacaagccaatcccctgcctag

SEQ ID NO: 135959 - DNA, 411 bp, Artificial Sequence
  derived and/or modified sequence
atggagagcggcaagaccgccagccccaagagcatgcccaaggacgcacagatgatggcgcagatactcaaggacatgggcatcacagaatacgagcctcgagtcattaatcagatgttagagtttgcttttcgttatgtgacaactatcctggatgacgctaaaatttatagcagccacgcgaagaaggccaccgtggatgccgatgacgtgcggctggccattcagtgtcgtgcagaccagtccttcacaagcccacctcctcgggatttcctgcttgatattgcaagacagagaaatcagacaccacttcccctgatcaagccttattctggtccacggctcccccccgaccgatattgtctcaccgctccaaactatcgacttaaaagccttcaaaagaaagcctag

SEQ ID NO: 135960 - DNA, 795 bp, Artificial Sequence
  derived and/or modified sequence
atggagagcggcaagaccgccagccccaagagcatgcccaaggacgcacaaatgatggcgcagatcctgaaggacatgggaatcacagagtacgaaccaagagtcatcaatcaaatgctagagtttgcattcagatacgtgactactattctggatgacgcgaaaatctactcttctcacgcaaagaaagccaccgtcgatgcagacgacgtgcgactcgctatacagtgcagggccgaccagtcctttacaagcccaccacctcgagactttctgctcgatatagctagacagagaaaccaaacaccgctccccctcataaaaccctatagcggacccagactgcccccggacagatattgcctcactgccccaaactacaggcttaagtctcttcagaagaaggcaagcacctctgccggtagaatcacggtcccacgactctccgtgggcagcgttacaagcaggccgtctacccccacacttggtacccccaccccacagaccatgagtgtgtctactaaggtgggcaccccaatgagtctcactggtcaacggttcaccgtccagatgccaacctcacaatcgcctgctgtgaaggctagcatccctgcaacatcagcagtgcagaacgtgcttattaaccctagcctgattgggtccaaaaacatcctcatcacaactaatatgatgagctctcaaaataccgccaacgaatcaagtaacgccttaaaacggaaacgggaggatgacgacgatgacgacgacgatgacgatgactacgataacctgtag

SEQ ID NO: 135961 - DNA, 309 bp, Artificial Sequence
  derived and/or modified sequence
atggagagcggcaagaccgccagccccaagagcatgcccaaggacgcccagatgatggcccagatcttgaaagacatggggattacagagtatgaaccacgtgtgataaaccagatgttagaatttgccttcaggtatgtgaccacaatactggatgacgcaaagatctattcatcgcacgccaaaaaagctacagtggatgctgacgacgttcgccttgctattcagtgccgagcagaccagagcttcaccagccccccaccccgtgacttcctcctagacattgccagacaaagaaatcagacatag

SEQ ID NO: 135962 - DNA, 501 bp, Artificial Sequence
  derived and/or modified sequence
atggagagcggcaagaccgccagccccaagagcatgcccaaggacgcacagatgatggcgcagatccttaaggacatgggtataacagagtatgagccacgcgtcattaatcagatgcttgagtttgcgtttcggtatgtgactactatacttgacgacgccaagatatatagcagccatgctaaaaaggctactgtggacgcagatgacgtccgcctggcgatccagtgcagggctgatcaatcttttacgtcacccccgcccagggatttcctgctcgatatcgcccgccagcggaaccagactcccctgcccctcattaagccttatagcggtccaagactgccccccgacaggtactgcttaaccgctccaaattatcgtctcaagagcttacagaaaaaggccagcacctcagcaggccgcattaccgtgccgagacttagtgtagggagcgtaaccagcaggcccagtacaccaactctggggaccccgacctag

SEQ ID NO: 135963 - DNA, 384 bp, Artificial Sequence
  derived and/or modified sequence
atggagagcggcaagaccgccagccccaagagcatgcccaaggacgcgcagatgatggctcagattttgaaggatatgggcattaccgaatatgagcccagggtgatcaatcagatgctggagtttgcgttccgctacgtgaccaccatcttagacgacgccaagatatatagttctcacgcaaagaaagctacagtcgacgccgacgacgtaagactggcgatccaatgcagggcagatcagagctttacatcacctccaccccgcgattttcttctagatatcgccaggcagaggaaccagactccactccctctgataaagccttactctggcccacgactcccccccgacaggtattgtctcacagctcctaactactag

SEQ ID NO: 135964 - DNA, 795 bp, Artificial Sequence
  derived and/or modified sequence
atggaaagtggaaagacggcaagtccaaagtctatgcccaaagatgcgcagatgatggctcagattctcaaagatatgggaattacagaatacgaacctagggtcatcaatcagatgctggagttcgccttcagatacgtgaccactattctggacgacgctaaaatctattccagccatgccaagaaggcaactgttgacgcagacgacgtgaggttagcaatccagtgccgcgctgaccagagtttcacctcgcctccacccagggatttcctccttgacatagctcggcagagaaaccagaccccactgccattgataaaaccatacagcggtcccaggctgcctccggataggtattgtctgacagccccaaactaccgccttaagagtttgcagaagaaagcaagtactagcgcaggtagaattacggtgcctcgactgtctgtgggcagcgtcacaagcaggcccagtacaccaacactggggaccccaactccccagactatgtccgtctcaaccaaggtggggacccctatgtcccttactgggcagcgattcactgtgcagatgcccacctcacagtctccagccgtcaaagcgagcatccctgctacttctgccgtgcagaacgtcctgatcaaccccagcctgataggcagtaagaacatcctcattaccactaatatgatgtctagtcagaataccgctaatgagtccagcaacgccttaaagcgaaaaagagaggacgatgacgatgacgatgatgatgacgatgattacgacaacttatag

SEQ ID NO: 135965 - DNA, 333 bp, Artificial Sequence
  derived and/or modified sequence
atgtcttgtcaacaaaatcagcagcaatgccagcctccccctaaatgtatcccaaagtgtccgcctaaatgcctgactccgaggtgcccgcctaaatgtccgcctaagtgtcctccggtctcttcttgctgctccgtctcaagtggcggatgttgcggaagctcctcagggggttgttgttctagtggaggtggcggttgctgcctctcccaccataggagacgacgcagtcattgtcacaggccccaatcttctggctgttgcagtcagccttccgggggatcaagttgctgtgggggaggaagcggtcaacatagcggagggtgctgctag

SEQ ID NO: 135966 - DNA, 795 bp, Artificial Sequence
  derived and/or modified sequence
atggaatctggcaaaaccgccagcccaaagtctatgccaaaagacgcgcagatgatggcccagatccttaaagacatgggaataaccgaatatgagccccgagtcattaaccagatgctcgagtttgcctttcggtatgtgactactatactggacgatgcaaagatctacagctcccatgctaaaaaggcaactgttgatgccgacgacgtgagactggcaatccagtgtcgtgcagatcaatcgttcacctcccccccacctcgggactttctactggatatcgccaggcagaggaaccagactcccctgccactgatcaagccttacagcggccctcgtctgcccccagatcggtactgtttaactgccccaaactatcgcttgaagtctctgcagaagaaagccagcacgtctgcgggaagaataaccgtacctaggctaagtgttggcagtgttacttctcgcccatccaccccgactctaggcacgccaacaccgcagacgatgagtgtgtccaccaaagtcggtacccccatgtccctgacggggcagcgattcaccgttcagatgcctacaagccaaagccccgcagtgaaagccagcatacctgccacctctgccgtccagaacgtgcttatcaacccctccttaattggaagcaaaaatatcttgataacgaccaacatgatgtccagccaaaacacagctaacgagtcctcgaatgcattaaaacgcaaaagggaagacgacgacgacgatgacgatgatgatgatgactatgacaacctgtag

SEQ ID NO: 135967 - DNA, 597 bp, Artificial Sequence
  derived and/or modified sequence
atggaaagcggcaagacagcctcacccaagtccatgccgaaagatgcccaaatgatggcccaaatcctgaaagatatgggcattacagaatatgagcccagggtaattaaccaaatgctcgagtttgctttccgttacgtgactactatcttagatgacgcgaaaatctactcctctcatgctaagaaagccactgtagatgctgatgacgtgcgtcttgcgattcagtgccgtgccgaccagtccttcaccagccctccgcctcgtgactttctccttgatatagcacgtcagagaaatcaaaccccactcccactgatcaaaccttattccggacccagactgccacccgatcgttactgccttaccgcacccaactaccggctaaagtctctacagaagaaagcctccacttccgccggacgcataaccgtgcctcggctttctgtcggatcggtgactagcaggccaagcacacctaccctcggaactcctacacctcaaacgatgagcgtgtctaccaaggtgggcactcccatgagcctcacaggccagcggttcacagtgcagatgccaaccagccagtccccggcatag

SEQ ID NO: 135968 - DNA, 411 bp, Artificial Sequence
  derived and/or modified sequence
atggaatcagggaaaacagcttcccccaagtctatgccaaaggacgctcagatgatggctcagattttgaaggacatggggattaccgagtatgaaccccgtgtaatcaatcagatgctggagttcgcattcaggtatgtcaccactatacttgacgatgccaaaatttacagctcccacgctaagaaggctaccgtggatgcagacgacgtgagactggccattcagtgccgagcagatcaatccttcaccagcccacccccacgtgacttcttactagatattgccagacaacgtaatcaaaccccactaccacttatcaaaccttattcgggccctaggctgcctcccgaccgatattgcctcacagccccaaactatcgcttaaagtcattgcagaagaaagcttag

SEQ ID NO: 135969 - DNA, 795 bp, Artificial Sequence
  derived and/or modified sequence
atggagtctgggaaaacagccagtcccaaatcgatgcctaaagatgcccagatgatggcacagattcttaaagacatgggcataacagagtatgagccacgggtgatcaaccaaatgttagaatttgcctttcgttacgtgaccacaattctggatgacgctaagatatatagctctcacgcgaaaaaggctaccgtggatgctgacgacgtgcggctggctattcagtgccgggctgaccagtcattcacaagcccccctccccgagacttcctcctcgatattgccaggcagcgcaatcagacaccactgcccctcattaagccatactctggaccgcgtctccccccagaccggtattgccttaccgcgcctaactaccggctcaaatcattgcagaagaaggccagcacctcagcaggacgtatcaccgtgcctcggttaagtgttggatccgtcaccagccgtccatcaacacctacactgggaactcctacaccgcagactatgtcagtaagcacaaaagtcggaacacccatgtctctgacaggccagcggtttacggtgcagatgcccacatcacagtcccccgctgtgaaggcctccatccccgcaacatctgctgtgcagaatgtgctcatcaatccctccctaataggatcgaagaacatactgattactactaatatgatgagttcccaaaacactgcaaacgaaagctcaaacgccttgaaaaggaaacgggaagacgacgatgatgacgatgacgacgacgatgattacgacaacttgtag

SEQ ID NO: 135970 - DNA, 309 bp, Artificial Sequence
  derived and/or modified sequence
atggagagcggcaaaactgcgtcgcccaagtctatgcccaaagacgcacagatgatggcacagattctcaaagatatgggtatcacagagtacgaacccagggtgattaaccagatgctggagttcgctttcaggtacgtgacgacgattctggatgacgccaagatttatagttcccacgctaagaaagccaccgtagatgccgacgatgtcaggctggccattcagtgccgggctgatcaatcctttacttccccaccccctcgtgacttcctcttggatatagccaggcagaggaatcagacgtag

SEQ ID NO: 135971 - DNA, 501 bp, Artificial Sequence
  derived and/or modified sequence
atggagagtggaaaaactgcctccccaaagtcaatgccgaaggatgctcagatgatggcccaaatcctgaaggatatgggaatcacagagtacgaacctagggtcatcaaccagatgttggaatttgctttcaggtatgtgacaaccattctagatgatgccaagatatattcttcgcacgctaagaaggctactgtcgacgcggatgacgtgaggctcgctatccagtgccgggcagatcagagtttcacgtcgcctccccctagggactttctcctggatattgccaggcagcgaaaccaaactccactgccactgattaagccgtacagtggcccacgcttgccgcctgatcgatattgtctcaccgctccaaattacagactcaagtccctgcagaaaaaagcaagtacatctgccggtcgtattaccgttcctcgcttgtcagtgggctctgtgaccagcaggccgtctacgcccacactgggtacacctacttag

SEQ ID NO: 135972 - DNA, 384 bp, Artificial Sequence
  derived and/or modified sequence
atggagtcagggaagacagcttcccctaaatccatgccaaaagatgcccaaatgatggcccagatactcaaggacatgggaatcactgagtacgagccacgcgtcataaatcagatgttagagttcgcttttaggtacgtgaccacaattctagatgacgccaaaatctattccagccatgcaaaaaaggccaccgtggatgctgacgatgtgcgtctggcgattcagtgtagagccgatcagtcgtttacttccccacctcccagggatttcctactcgacatcgcccgtcagcgaaatcaaacgcctttaccactgatcaaaccctacagtggcccacgactgcctcccgaccggtactgcctcacagctcctaattattag

SEQ ID NO: 135973 - DNA, 1461 bp, Artificial Sequence
  derived and/or modified sequence
cccaggaaagcttgaaggcagagatagactcacgtctctaagacatatacataatatagccgcaaccgcggcggccttactttcccggagctgcatccccttttaggcgaagagcggaggcgaccagggactaccctaggtgaaagggcagccacctggccctacccgggctcaacgccgagcctctcggaggtacggcctcccggggaccttccagactggtcggcgcaagcgaagggcggggaccaccgaaggagtgtgtgacttaggcatccagcgcactgcctgacccgaagtaccgacccgagttatgcccaccctccaactttgcgacggaaatgtgtcatcgaaagccaggtacaccaggggttggaaaaaccacactaggcaaagaacttgcgtcaaaatcaggactgaaatacattaatgtgggtgatttagctcgagaagtctgatcatcggatatcatggagtctggcaagacggcttctcccaagagcatgccgaaagatgcacagatgatggcacaaatcctgaaggatatggggattacagaatatgagccaagagttataaatcagatgttggagtttgccttccgatatgtgaccacaattctagatgatgcaaaaatttattcaagccatgctaagaaagctactgttgatgcagatgatgtgcgattggcaatccagtgccgcgctgatcagtcttttacctctcctcccccaagagattttttattagatattgcaaggcaaagaaatcaaacccctttgccattgatcaagccatattcaggtcctaggttgccacctgatagatactgcttaacagctccaaactataggctgaaatctttacagaaaaaggcatcaacttctgcgggaagaataacagtcccgcggttaagtgttggttcagttactagcagaccaagtactcccacactaggcacaccaaccccacagaccatgtctgtttcaactaaagtagggactcccatgtccctcacaggtcaaaggtttacagtacagatgcctacttctcagtctccagctgtaaaagcttcaattcctgcaacctcagcagttcagaatgttctgattaatccatcattaatcgggtccaaaaacattcttattaccactaatatgatgtcatcacaaaatactgccaatgaatcatcaaatgcattgaaaagaaaacgtgaagatgatgatgatgacgatgatgatgatgatgactatgataatctgtaatctagccttgctgaatgtaacatgtatacttggtcttgaattcattgtactgatattaaacatgcatgctggatgttttcaagttgtgttttagaaaactaataataatgagtaaacacagttaccatacttttcaattgaaatgaaggtttttcatcagccttaaaagtgtaagaaaaataaagttgtcattcattcg

SEQ ID NO: 135974 - DNA, 966 bp, Artificial Sequence
  derived and/or modified sequence
atgttgcttccgaacatcctgctcaccggtcagggcgcgcggccgggagggactgggctggggcaggctgggggcgcagagtgctctgggcatcgggcgcccaggtgggggcccctcactgccctcttcagaggccggccgagggccacgaggcggttgtcagcgccccgggagccgaccctcgcgggcgttgcgggaggcgagggaggggacgcggaacgttaattccgttggcctgaggctccgggggggggcgggggggggtacaccaggggttggaaaaaccacactaggcaaagaacttgcgtcaaaatcaggactgaaatacattaatgtgggtgatttagctcgagaagtctgatcatcggatatcatggagtctggcaagacggcttctcccaagagcatgccgaaagatgcacagatgatggcacaaatcctgaaggatatggggattacagaatatgagccaagagttataaatcagatgttggagtttgccttccgatatgtgaccacaattctagatgatgcaaaaatttattcaagccatgctaagaaagctactgttgatgcagatgatgtgcgattggcaatccagtgccgcgctgatcagtcttttacctctcctcccccaagagattttttattagatattgcaaggcaaagaaatcaaacccctttgccattgatcaagccatattcaggtcctaggttgccacctgatagatactgcttaacagctccaaactataggctgaaatctttacagaaaaaggcatcaacttctgcgggaagaataacagtcccgcggttaagtgttggttcagttactagcagaccaagtactcccacactaggcacaccaaccccacagaccatgtctgtttcaactaaagtagggactcccatgtccctcacaggtcaaaggtttacagtacagatgcctacttctcagtctccagc

SEQ ID NO: 135975 - DNA, 588 bp, Artificial Sequence
  derived and/or modified sequence
tacacgcgcgagccaccacacgtggccatgaacagtttttaaatctttataagttaaagcaaataggccaggtacaccaggggttggaaaaaccacactaggcaaagaacttgcgtcaaaatcaggactgaaatacattaatgtgggtgatttagctcgagaagtctgatcatcggatatcatggagtctggcaagacggcttctcccaagagcatgccgaaagatgcacagatgatggcacaaatcctgaaggatatggggattacagaatatgagccaagagttataaatcagatgttggagtttgccttccgatatgtgaccacaattctagatgatgcaaaaatttattcaagccatgctaagaaagctactgttgatgcagatgatgtgcgattggcaatccagtgccgcgctgatcagtcttttacctctcctcccccaagagattttttattagatattgcaaggcaaagaaatcaaacccctttgccattgatcaagccatattcaggtcctaggttgccacctgatagatactgcttaacagctccaaactataggctgaaatctttacagaaaaaggc

SEQ ID NO: 135976 - DNA, 1331 bp, Artificial Sequence
  derived and/or modified sequence
gtgccactgcactccagcctgggcgacaagagtgaaactctgtctcaaaaaaaaaattttacatatgattgctaattaggaaatttttcatttcagtcgtcaagaacttttaagggcagaggccaggtgagactctgtctcaaaaataaaaggaaaggcagaaggtggaccgcagtgtgataagtagtatttcacaaacagtatttttctgtggcttgtcttacaggtacaccaggggttggaaaaaccacactaggcaaagaacttgcgtcaaaatcaggactgaaatacattaatgtgggtgatttagctcgagaagtctgatcatcggatatcatggagtctggcaagacggcttctcccaagagcatgccgaaagatgcacagatgatggcacaaatcctgaaggatatggggattacagaatatgagccaagagttataaatcagatgttggagtttgccttccgatatgtgaccacaattctagatgatgcaaaaatttattcaagccatgctaagaaagctactgttgatgcagatgatgtgcgattggcaatccagtgccgcgctgatcagtcttttacctctcctcccccaagagattttttattagatattgcaaggcaaagaaatcaaacccctttgccattgatcaagccatattcaggtcctaggttgccacctgatagatactgcttaacagctccaaactataggctgaaatctttacagaaaaaggcatcaacttctgcgggaagaataacagtcccgcggttaagtgttggttcagttactagcagaccaagtactcccacactaggcacaccaaccccacagaccatgtctgtttcaactaaagtagggactcccatgtccctcacaggtcaaaggtttacagtacagatgcctacttctcagtctccagctgtaaaagcttcaattcctgcaacctcagcagttcagaatgttctgattaatccatcattaatcgggtccaaaaacattcttattaccactaatatgatgtcatcacaaaatactgccaatgaatcatcaaatgcattgaaaagaaaacgtgaagatgatgatgatgacgatgatgatgatgatgactatgataatctgtaatctagccttgctgaatgtaacatgtatacttggtcttgaattcattgtactgatattaaacatgcatgctggatgttttcaagttgtgttttagaaaactaataataatgagtaaacacagttaccatacttttcaattgaaatgaaggtttttcatcagccttaaaagtgtaagaaaaataaagttgtcattcattcga

SEQ ID NO: 135977 - DNA, 754 bp, Artificial Sequence
  derived and/or modified sequence
atttcgtttgtaaaatgggttgttgattctttggcagggttggccttgggatttttagcgaaataacgtaaggccatatctgcttcccggtagagtcattaatggtggatgcctcactccttaggcctccgtgggccgtattttattttttctttgcttctgataaacgcctcagattagatttcggtaaacgagttcagatgtttgtgacgtgacgaaattgctgtatgcttttgttgagttacatcaaaggatccccccgccccttaaaaggaaggcatatagagcatttcgggtcgtttctcgcgtaggagtgggtctttgaagccatactcagggtacaccaggggttggaaaaaccacactaggcaaagaacttgcgtcaaaatcaggactgaaatacattaatgtgggtgatttagctcgagaagtctgatcatcggatatcatggagtctggcaagacggcttctcccaagagcatgccgaaagatgcacagatgatggcacaaatcctgaaggatatggggattacagaatatgagccaagagttataaatcagatgttggagtttgccttccgatatgtgaccacaattctagatgatgcaaaaatttattcaagccatgctaagaaagctactgttgatgcagatgatgtgcgattggcaatccagtgccgcgctgatcagtcttttacctctcctcccccaagagattttttattagatattgcaaggcaaagaaatcaaacc

SEQ ID NO: 135978 - DNA, 761 bp, Artificial Sequence
  derived and/or modified sequence
ccgaccctcgcgggcgttgcgggaggcgagggaggggacgcggaacgttaattccgttggcctgaggctccgggggggggcgggggggggtggagagaggtcggcagatccagctctccagcttggcaacctgcttagtctttctgaatctggtacaccaggggttggaaaaaccacactaggcaaagaacttgcgtcaaaatcaggactgaaatacattaatgtgggtgatttagctcgagaagtctgatcatcggatatcatggagtctggcaagacggcttctcccaagagcatgccgaaagatgcacagatgatggcacaaatcctgaaggatatggggattacagaatatgagccaagagttataaatcagatgttggagtttgccttccgatatgtgaccacaattctagatgatgcaaaaatttattcaagccatgctaagaaagctactgttgatgcagatgatgtgcgattggcaatccagtgccgcgctgatcagtcttttacctctcctcccccaagagattttttattagatattgcaaggcaaagaaatcaaacccctttgccattgatcaagccatattcaggtcctaggttgccacctgatagatactgcttaacagctccaaactataggctgaaatctttacagaaaaaggcatcaacttctgcgggaagaataacagtcccgcggttaagtgttggttcagttactagcagaccaagtactcccacactaggcacaccaaccc

SEQ ID NO: 135979 - DNA, 582 bp, Artificial Sequence
  derived and/or modified sequence
acatcctgctcaccggtcagggcgcgcggccgggagggactgggctggggcaggctgggggcgcagagtgctctgggcatcgggcgcccaggtacaccaggggttggaaaaaccacactaggcaaagaacttgcgtcaaaatcaggactgaaatacattaatgtgggtgatttagctcgagaagtctgatcatcggatatcatggagtctggcaagacggcttctcccaagagcatgccgaaagatgcacagatgatggcacaaatcctgaaggatatggggattacagaatatgagccaagagttataaatcagatgttggagtttgccttccgatatgtgaccacaattctagatgatgcaaaaatttattcaagccatgctaagaaagctactgttgatgcagatgatgtgcgattggcaatccagtgccgcgctgatcagtcttttacctctcctcccccaagagattttttattagatattgcaaggcaaagaaatcaaacccctttgccattgatcaagccatattcaggtcctaggttgccacctgatagatactgcttaacagctccaaactat

SEQ ID NO: 135980 - protein, 260 aa, Artificial Sequence
  derived and/or modified sequence
MDIASTNTSNKSDTNMEQVPATNDTIKRLESKLLKNQAKQQSESGRLSLGASRGSSVESLPPTSEGKRMSADMSEIEARIAATTGNGQPRRRSIQDLTVTGTEPGQVSSRSSSPSVRMITTSGPTSEKPTRSHPWTPDDSTDTNGSDNSIPMAYLTLDHQLQPLAPCPNSKESMAVFEQHCKMAQEYMKVQTEIALLLQRKQELVAELDQDEKDQQNTSRLVQEHKKLLDENKSLSTYYQQCKKQLEVIRSQQQKRQGTS

SEQ ID NO: 135981 - protein, 579 aa, Artificial Sequence
  derived and/or modified sequence
MSTASAASSSSSSSAGEMIEAPSQVLNFEEIDYKEIEVEEVVGRGAFGVVCKAKWRAKDVAIKQIESESERKAFIVELRQLSRVNHPNIVKLYGACLNPVCLVMEYAEGGSLYNVLHGAEPLPYYTAAHAMSWCLQCSQGVAYLHSMQPKALIHRDLKPPNLLLVAGGTVLKICDFGTACDIQTHMTNNKGSAAWMAPEVFEGSNYSEKCDVFSWGIILWEVITRRKPFDEIGGPAFRIMWAVHNGTRPPLIKNLPKPIESLMTRCWSKDPSQRPSMEEIVKIMTHLMRYFPGADEPLQYPCQYSDEGQSNSATSTGSFMDIASTNTSNKSDTNMEQVPATNDTIKRLESKLLKNQAKQQSESGRLSLGASRGSSVESLPPTSEGKRMSADMSEIEARIAATTGNGQPRRRSIQDLTVTGTEPGQVSSRSSSPSVRMITTSGPTSEKPTRSHPWTPDDSTDTNGSDNSIPMAYLTLDHQLQPLAPCPNSKESMAVFEQHCKMAQEYMKVQTEIALLLQRKQELVAELDQDEKDQQNTSRLVQEHKKLLDENKSLSTYYQQCKKQLEVIRSQQQKRQGTS

SEQ ID NO: 135982 - DNA, 783 bp, Artificial Sequence
  derived and/or modified sequence
atggatatcgcttccacaaatacaagcaataagagcgataccaatatggaacaggtgccagcgaccaatgacacgattaaacgactggaatcgaagctgttgaagaaccaggccaagcaacaaagtgagagtggccgattgtctctaggagcatctagaggatcttccgtcgaatccttgccgcctactagcgaggggaaacgtatgtctgcagacatgtctgaaatcgaggcccgcattgctgcgaccacaggaaacggccagccacggcgccgcagtatccaagatcttaccgttaccggtaccgaaccaggtcaggtgtcttctcgtagtagcagcccttcggtaagaatgatcactacttctggtcccacctctgagaaaccgaccaggtctcacccatggacacccgacgatagcaccgacaccaatggtagtgataactctatccctatggcctatctcacccttgaccaccaactacagccgcttgcaccctgtcctaattccaaggagagtatggcggtgtttgagcagcactgcaagatggctcaggaatacatgaaagtgcagacagaaattgcgctgctgctccagaggaagcaagaattggttgcggagctagaccaggacgagaaggatcagcaaaacactagtcggctcgtgcaggagcacaagaaactgcttgacgagaataaatctttgtctacctactaccagcagtgtaagaagcagctcgaggtgatacgtagtcagcagcagaaacggcagggcacatcttag

SEQ ID NO: 135983 - DNA, 1740 bp, Artificial Sequence
  derived and/or modified sequence
atgtctacggccagcgctgcgagctcttcctcatcatcctctgccggcgagatgattgaggcaccgtcccaggtcctcaattttgaagaaatcgattacaaggagattgaagtggaagaagttgtgggtagaggcgcattcggtgtggtgtgtaaagcaaagtggagagccaaagatgtggccatcaagcagatcgaatctgagtctgaacgcaaagcttttatcgtcgagctgaggcagctttctcgggtaaaccatccaaatatcgtcaaactctacggcgcctgtctcaaccctgtgtgtttggtgatggagtacgctgaagggggctctctctataacgtcctccacggggcagaacctctgccatactacaccgcagcgcacgcaatgtcctggtgtttgcagtgttctcagggggtggcctacctgcacagcatgcaacccaaagcacttatacatcgggacctgaagcctccaaacctcctcctggtcgcaggcggaaccgtcctgaaaatctgcgattttggaaccgcgtgtgatatacagactcacatgaccaacaacaaggggtccgctgcttggatggcgcctgaggtgttcgaaggtagtaactatagtgaaaaatgcgatgtgttctcttggggcattatcctctgggaggtcatcacccgccgcaaacccttcgacgaaatcgggggccccgccttcaggatcatgtgggcagtgcataatgggactcgtcctcctttgattaagaatctgcctaagccgatcgaatcacttatgacaagatgttggtccaaggatccgtcccagagaccgtcaatggaagaaattgtgaaaatcatgacacatctcatgagatacttccctggggccgacgagccactgcagtacccatgccagtactccgacgaagggcagtcaaatagcgcaacttccaccgggtccttcatggatatcgccagcaccaatacatctaataagagcgatacaaatatggaacaggtgcctgccacaaatgacaccattaaacgtttagagagcaagcttcttaagaaccaggccaagcaacagagtgagtccggacgcttgtcactgggggctagcaggggctcctccgtggaaagtctgccaccaaccagtgaaggaaagcggatgagtgcggatatgtccgagatcgaggcgaggatcgcagcaaccactgggaacggacaacctaggcgccggtcaatccaagacctgactgtgacggggacagaaccgggtcaggtctcgtctcgctcatcgtcaccatccgtgagaatgatcacaacaagcgggcctacttcagagaagcccacccgatctcacccctggacgcccgacgacagcacagacactaatggaagcgacaactcaataccaatggcctaccttacgttggatcatcaattacaaccgctggccccctgccccaacagtaaagagtcaatggctgttttcgagcagcattgtaaaatggcacaggaatatatgaaagtgcagactgagatcgcactgcttctccaaaggaagcaggagctcgtggccgagcttgaccaggacgaaaaggaccagcagaacacgtcgagactggtgcaagagcacaagaagttgctcgacgagaacaaaagtctgtcgacgtattatcagcagtgcaagaaacaattggaggtcattaggtcccagcagcagaagcgccaggggacatcttag

SEQ ID NO: 135984 - DNA, 783 bp, Artificial Sequence
  derived and/or modified sequence
atggacatcgccagcaccaacaccagcaacaagagtgacaccaacatggagcaggtgcctgccaccaatgacaccatcaagaggctggagagcaagctgctgaagaaccaggccaagcagcagagcgagagcggccgcctgagcctgggcgccagccggggcagctctgtggagagcctgccccccaccagcgagggcaagaggatgtctgctgacatgtctgaaattgaggccagaattgctgccaccactggaaatggccagcccaggagaagaagcatccaggacctgactgtgactggaacagagcccggccaggtgagcagccgcagcagcagccccagcgtgaggatgatcaccaccagcggccccaccagcgagaagcccaccaggagccacccctggaccccagatgacagcacagacaccaacggcagtgacaacagcatccccatggcctacctgaccctggaccaccagctgcagcccctggccccctgccccaacagcaaggagagcatggctgtgtttgagcagcactgcaagatggcccaggagtacatgaaggtgcagacagagatcgccctgctgctgcagaggaagcaggagctggtggccgagctggaccaggatgagaaggaccagcagaacaccagccggctggtgcaggagcacaagaagctgctggatgagaacaagagcctgagcacctactaccagcagtgcaagaagcagctggaggtgatccgcagccagcagcagaagaggcagggcaccagctag

SEQ ID NO: 135985 - DNA, 1740 bp, Artificial Sequence
  derived and/or modified sequence
atgagcacagccagcgctgccagcagcagcagcagcagcagcgctggggagatgattgaggcccccagccaggtgctgaactttgaggagattgactacaaggagattgaggtggaggaggtggtgggccgcggggcctttggagtggtgtgcaaggccaagtggagggccaaggatgtggccatcaagcagattgaaagtgaaagtgagaggaaggccttcatcgtggagctgcggcagctgagccgggtgaaccaccccaacatcgtgaagctgtatggagcctgcctgaaccctgtgtgcctggtgatggagtatgcagagggcggcagcctgtacaacgtgctgcatggagctgagcccctgccctactacacagctgcccacgccatgtcctggtgcctgcagtgcagccagggcgtggcctacctgcacagcatgcagcccaaggccctgatccaccgggacctgaagccacccaacctgctgctggtggccggcggcaccgtgctgaagatctgtgactttggaacagcctgtgacatccagacccacatgaccaacaacaagggcagcgctgcctggatggcccctgaggtgtttgagggcagcaactacagcgagaagtgtgatgtgttctcctggggcatcatcctgtgggaggtgatcaccaggaggaagccctttgatgagatcggcggccctgccttccgcatcatgtgggccgtgcacaacggcaccaggcctcctctcatcaagaacctgcccaagcccatcgagagcctgatgacccgctgctggagcaaggaccccagccagaggcccagcatggaggagatcgtgaagatcatgacccacctgatgagatacttccctggagcagatgagcccctgcagtacccctgccagtacagtgatgagggccagagcaacagcgccaccagcacaggcagcttcatggacatcgccagcaccaacaccagcaacaagagtgacaccaacatggagcaggtgcctgccaccaatgacaccatcaagaggctggagagcaagctgctgaagaaccaggccaagcagcagagcgagagcggccgcctgagcctgggcgccagccggggcagctctgtggagagcctgccccccaccagcgagggcaagaggatgtctgctgacatgtctgaaattgaggccagaattgctgccaccactggaaatggccagccccggcggcgcagcatccaggacctgactgtgactggaacagagcccggccaggtgagcagccgcagcagcagccccagcgtgaggatgatcaccaccagcggccccaccagcgagaagcccaccaggagccacccctggaccccagatgacagcacagacaccaatggaagtgacaacagcatccccatggcctacctgaccctggaccaccagctgcagcccctggccccctgccccaacagcaaggagagcatggctgtgtttgagcagcactgcaagatggcccaggagtacatgaaggtgcagacagaaattgccctgctgctgcagaggaagcaggagctggtggccgagctggaccaggatgagaaggaccagcagaacaccagccggctggtgcaggagcacaagaagctgctggatgagaacaagagcctgagcacctactaccagcagtgcaagaagcagctggaggtgatccgcagccagcagcagaagaggcagggcaccagctag

SEQ ID NO: 135986 - DNA, 3328 bp, Artificial Sequence
  derived and/or modified sequence
cataatggtactcgaccaccactgataaaaaatttacctaagcccattgagagcctgatgactcgttgttggtctaaagatccttcccagcgcccttcaatggaggaaattgtgaaaataatgactcacttgatgcgggtataatccttcttttgaggggctttggatttaggggaatttaatatgtgctgagttttaatggaattttaaaagggatgttattactatattctgctttatatattgctatgttttctaagtgagaatgggcatttattactcatagtcagaagaggaaacatttcgagagggaaaatctagttctttatcactggaaagatggctagactaggtttctagacttgcttttttctttttgcttacattagtggacaagtatgtttgtctctgggcctgttgcctcatttgtaatgtgggagaaactgaaatagatagtctctaaagccatcacaggacttggatatattaatattatgacttcaatacatgataaactaaattttacatttttctgataccaattttcatcaagcatttagtcatttatgcaaggcaataggttgcattctcagacacatttatttgagtgacttttactatttggcctattttcaggtttttatatcccagtaaaaagttaaactttcttctatttagaagaacccttttaaatgattatcaaattttcctagtctgtgaatcaagcgcctttagaattatttggaatattttacgcctctggtttttggtacattaacaaaaactgtgaagtggtatcttggctttaaaaagttcaaatatctatgaaagtgcctgaattttgaaacagtttgttcagtagaagaatcttacaatctccttaaatatagactaagtaatttcctaaatggtaaaacgttgtttattcaatctattgaaaatttcttacgcaaagcagcttgaactaatctactaaaagtttaccatcgtatttggataccagtcatatatagaagcctaggccttaaaggtgtgtgcataagaaaacaacttagtctctgtagtcagattacttaaaactttaggatatataagttattgcagttgtaattttgcttctctgttccttgtctaatttgaggagaatacgtttcctttttttctctaaattctaacatttttgtccagcagatactttgagtattatgcctccagtttgtagaaagacattcataatctatcctcttaatatttaaaatgttctaacaattattctatggtatactagtctcagtcttcagactaacagtcactggaagtttacatcactactgtaagaacatgagtatgttttacataattatgagaaatgatactattttatttcatatgtttctctagagaaatatttgctgttttcttcaagactatctagactccaatgtaagctagattcttaggtaggtgcatggcattgatcaaagttgaaatccaagagtacattattgtaatctttgtaaaataaaaaacttaggcacctacaaatttagtatataacttagggaaaataaaacattaatcaggatttaatttgtattaaggaaattttaagctgtggtttacttttttatatatagtactttccaggagcagatgagccattacagtatccttgtcagtattcagatgaaggacagagcaactctgccaccagtacaggctcattcatggacattgcttctacaaatacgagtaacaaaagtgacactaatatggagcaagttcctgccacaaatgatactattaagcgcttagaatcaaaattgttgaaaaatcaggcaaagcaacagagtgaatctggacgtttaagcttgggagcctcccgtgggagcagtgtggagagcttgcccccaacctctgagggcaagaggatgagtgctgacatgtctgaaatagaagctaggatcgccgcaaccacaggcaacggacagccaagacgtagatccatccaagacttgactgtaactggaacagaacctggtcaggtgagcagtaggtcatccagtcccagtgtcagaatgattactacctcaggaccaacctcagaaaagccaactcgaagtcatccatggacccctgatgattccacagataccaatggatcagataactccatcccaatggcttatcttacactggatcaccaactacagcctctagcaccgtgcccaaactccaaagaatctatggcagtgtttgaacagcattgtaaaatggcacaagaatatatgaaagttcaaacagaaattgcattgttattacagagaaagcaagaactagttgcagaactggaccaggatgaaaaggaccagcaaaatacatctcgcctggtacaggaacataaaaagcttttagatgaaaacaaaagcctttctacttactaccagcaatgcaaaaaacaactagaggtcatcagaagtcagcagcagaaacgacaaggcacttcatgattctctgggaccgttacattttgaaatatgcaaagaaagactttttttttaaggaaaggaaaaccttataatgacgattcatgagtgttagctttttggcgtgttctgaatgccaactgcctatatttgctgcatttttttcattgtttattttccttttctcatggtggacatacaattttactgtttcattgcataacatggtagcatctgtgacttgaatgagcagcactttgcaacttcaaaacagatgcagtgaactgtggctgtatatgcatgctcattgtgtgaaggctagcctaacagaacaggaggtatcaaactagctgctatgtgcaaacagcgtccattttttcatattagaggtggaacctcaagaatgactttattcttgtatctcatctcaaaatattaataatttttttcccaaaagatggtatataccaagttaaagacagggtattataaatttagagtgattggtggtatattacggaaatacggaacctttagggatagttccgtgtaagggctttgatgccagcatccttggatcagtactgaactcagttccatccgtaaaatatgtaaaggtaagtggcagctgctctatttaatgaaagcagttttaccggattttgttagactaaaatttgattgtgatacattgaacaaaatggaactcatttttttttaaggagtaaagatttttaattctgtgattgtgtgtatgtgtgttgaaactgtaaagcttttatgactctaatattaatctcttaaatgaaattaaaaggcaaaagaacatgattgagcttaaa

SEQ ID NO: 135987 - DNA, 4830 bp, Artificial Sequence
  derived and/or modified sequence
ggacacggctgtggccgctgcctctacccccgccacggatcgccgggtagtaggactgcgcggctccaggctgagggtcggtccggaggcgggtgggcgcgggtctcacccggattgtccgggtggcaccgttcccggccccaccgggcgccgcgagggatcatgtctacagcctctgccgcctcctcctcctcctcgtcttcggccggtgagatgatcgaagccccttcccaggtcctcaactttgaagagatcgactacaaggagatcgaggtggaagaggttgttggaagaggagcctttggagttgtttgcaaagctaagtggagagcaaaagatgttgctattaaacaaatagaaagtgaatctgagaggaaagcgtttattgtagagcttcggcagttatcccgtgtgaaccatcctaatattgtaaagctttatggagcctgcttgaatccagtgtgtcttgtgatggaatatgctgaagggggctctttatataatgtgctgcatggtgctgaaccattgccatattatactgctgcccacgcaatgagttggtgtttacagtgttcccaaggagtggcttatcttcacagcatgcaacccaaagcgctaattcacagggacctgaaaccaccaaacttactgctggttgcaggggggacagttctaaaaatttgtgattttggtacagcctgtgacattcagacacacatgaccaataacaaggggagtgctgcttggatggcacctgaagtttttgaaggtagtaattacagtgaaaaatgtgacgtcttcagctggggtattattctttgggaagtgataacgcgtcggaaaccctttgatgagattggtggcccagctttccgaatcatgtgggctgttcataatggtactcgaccaccactgataaaaaatttacctaagcccattgagagcctgatgactcgttgttggtctaaagatccttcccagcgcccttcaatggaggaaattgtgaaaataatgactcacttgatgcggtactttccaggagcagatgagccattacagtatccttgtcagtattcagatgaaggacagagcaactctgccaccagtacaggctcattcatggacattgcttctacaaatacgagtaacaaaagtgacactaatatggagcaagttcctgccacaaatgatactattaagcgcttagaatcaaaattgttgaaaaatcaggcaaagcaacagagtgaatctggacgtttaagcttgggagcctcccgtgggagcagtgtggagagcttgcccccaacctctgagggcaagaggatgagtgctgacatgtctgaaatagaagctaggatcgccgcaaccacaggcaacggacagccaagacgtagatccatccaagacttgactgtaactggaacagaacctggtcaggtgagcagtaggtcatccagtcccagtgtcagaatgattactacctcaggaccaacctcagaaaagccaactcgaagtcatccatggacccctgatgattccacagataccaatggatcagataactccatcccaatggcttatcttacactggatcaccaactacagcctctagcaccgtgcccaaactccaaagaatctatggcagtgtttgaacagcattgtaaaatggcacaagaatatatgaaagttcaaacagaaattgcattgttattacagagaaagcaagaactagttgcagaactggaccaggatgaaaaggaccagcaaaatacatctcgcctggtacaggaacataaaaagcttttagatgaaaacaaaagcctttctacttactaccagcaatgcaaaaaacaactagaggtcatcagaagtcagcagcagaaacgacaaggcacttcatgattctctgggaccgttacattttgaaatatgcaaagaaagactttttttttaaggaaaggaaaaccttataatgacgattcatgagtgttagctttttggcgtgttctgaatgccaactgcctatatttgctgcatttttttcattgtttattttccttttctcatggtggacatacaattttactgtttcattgcataacatggtagcatctgtgacttgaatgagcagcactttgcaacttcaaaacagatgcagtgaactgtggctgtatatgcatgctcattgtgtgaaggctagcctaacagaacaggaggtatcaaactagctgctatgtgcaaacagcgtccattttttcatattagaggtggaacctcaagaatgactttattcttgtatctcatctcaaaatattaataatttttttcccaaaagatggtatataccaagttaaagacagggtattataaatttagagtgattggtggtatattacggaaatacggaacctttagggatagttccgtgtaagggctttgatgccagcatccttggatcagtactgaactcagttccatccgtaaaatatgtaaaggtaagtggcagctgctctatttaatgaaagcagttttaccggattttgttagactaaaatttgattgtgatacattgaacaaaatggaactcatttttttttaaggagtaaagatttttaattctgtgattgtgtgtatgtgtgttgaaactgtaaagcttttatgactctaatattaatctcttaaatgaaattaaaaggcaaaagaacatgattgagcttaaatgatcatttcttcctgcagtgattcttggattgttttctcatgtatttgaaaaaaaaaaaatgaagaaaaataatggaaaatggaagtaattactccagctaaaaaaagcttggacttagatttctttttatgataccaaatgagaaataaaccaggcaaatcagaaggaagttaaagaagcaaatataaattcaacaagtgtcctaattatcctggatattggaatatttgattttccttacaatcccgttctagaatgcctgccgcctttcaacactttcaagagaatttcaacacttacagagtatttatattgttaacagtaattttgctaccaaaaccttcagaataactttaataataaaatgacactgaaataatagactatacaaactctatattttttcagttggtgttaaaataagtcacattttgataccagtacaagatgtcttttaaataaggatgtcatcagtctgatttttatagcattaatgttttatgaagaaaaagttcaaaatgaaagcattaattgctgtgattattagaattctatcatgactgtattgtagtttttgctctatttcagataagcaagatctaagaagttatcaaaactattctttaaaatgctaaagcaggtaactttttcttccattattttttcctcctaccactgagttttgtaatgaattccttgtgtatacaagcaatacaggtgaatactaaactgttatttttagcttcttcaaaagctattttagaaagcttcctggaaataaatgtcttctgtcatttaatttaaataaaaggagtgttaattgttcccaaatttgattacctagctgaaacagatattggattcagcatagtaatagtaaaataaaattggcagagaaaataactgtagactaggataaagcatgactcctccatagcattgttgcttgtatgtacatctgtcactccactgaaagggacctagtcactttaaagaggccttttatctcagcacgagatatccaagcgtgaatgctaaggcttgatgtttccattaggatttagcattcgagatttcagattttatttatagtcattgatgtgttttgctgtattataacacatttaagggaaattttattatggtttttacatgtagtcatttcataaaaatatccagataggtaaatggaagaaaatagtagattttagtcatggtaccaaatgcaagaggctgttgaacagttgcttgtttgtttacagtaagttccttgagattttcagtactgtagttgccctggacattgagtacagttcagccttactctgtttttaagtagttgtgttgtcaatttcatgcttttaagtcctgatgatccttggagatgggagaaaaagataccagggataattaaaatccacagccagtttcatcagtttcctcatccatcctgcaaataaaaatgttaacaaggagccaaacttattcgttctggttttacaatttattttgaccgttttttgggtgaaaattgcaaacagccaagcaagtggctggaatgccccagtctaagaaattcaaaaacaatcactgagtaagccctaattacattaattacattttactcttgactccaggaaaagaaagcaagcttttatctaatctagagggaagtattcgtgagcaataaaaatcacttttttgagttgaataataatcagttaagaatatttaccgcatagcaacacaacatataaagatttgttacaagttgtttacggatgtttgactatttttgctgaagtattttagagtattgaatgtcttctctcttcaagtttctttcatgttcctaatttcagctcctgtagccagagatcacaggtcttccctgtgaaactttggtttctttctataaatgtgtgtggttttcagcgctcaactcctgtcttcaaatggtagtaagttctacttctacttctgtcattcagaacattttatgtcaaatgatgtaatgcagaaattcttgtgcatatttgtaactgaaggaagctttttagatttatttttgtttttaataaaattcagattcctattctaaactggta

SEQ ID NO: 135988 - DNA, 783 bp, Artificial Sequence
  derived and/or modified sequence
atggacatcgccagcaccaacaccagcaacaagagcgacaccaacatggagcaggtgcctgccaccaacgatactatcaaaagactggaatctaagctgttaaagaaccaggcaaagcaacagagtgaatccgggcgcctgagtttgggcgctagcaggggttcttccgttgagtctctcccccccacatccgaggggaaacgaatgtctgccgatatgtcagaaatcgaggccagaattgctgcaaccacagggaatggccagccacgccggagatcaattcaagatttaaccgtcaccggtaccgagcccgggcaggtctcgagtcgtagctcctcgcctagtgttaggatgatcaccacctccggacccaccagcgagaaaccaacccgctcacacccttggacccccgacgactccaccgacaccaatggctcagacaactcgatccctatggcctacctgacactggaccatcaattacagcccctggctccttgccctaactccaaggaatctatggccgttttcgagcagcactgcaaaatggcgcaggagtatatgaaggtacagactgaaatcgctctgctcctacagagaaagcaggaactggtagctgagttggaccaggatgagaaagaccagcagaatacctcccgccttgtgcaagaacataagaagctactcgacgaaaacaagtccctgagtacatattatcaacagtgcaagaagcagctggaggtcatacgctctcagcaacagaagcgccaaggaaccagttag

SEQ ID NO: 135989 - DNA, 1740 bp, Artificial Sequence
  derived and/or modified sequence
atgagcaccgccagcgccgccagcagcagcagcagcagcagcgccggagagatgattgaggctcccagtcaggtgctgaacttcgaggaaatcgattataaagagattgaagtggaggaggttgtgggtagaggtgcctttggcgttgtgtgcaaggcgaaatggcgcgctaaggatgtggcaattaaacagatcgaatctgaaagcgagagaaaagccttcatcgtggaacttagacagttgagcagagtgaaccacccaaatattgtgaaattgtatggggcctgcctcaatcctgtgtgcctcgtgatggagtatgccgagggaggctcgctctacaatgtgctgcatggggccgaaccactgccctactataccgcagcccatgcgatgagctggtgcctgcagtgtagtcaaggcgttgcctacctgcactcgatgcaacctaaagctcttatccaccgcgatctgaagcctccaaacctcttactagtagcaggcggcactgtgttaaagatatgtgacttcggcaccgcctgcgacatccagactcatatgacaaacaataaggggtcagctgcatggatggcgccagaggttttcgaaggatctaattacagtgagaagtgtgacgtttttagctggggaattatcttgtgggaagtcatcaccaggaggaaacctttcgacgaaatcggggggccagcttttaggattatgtgggctgtgcataatgggacgcgtcccccactgataaaaaaccttccaaaaccaatcgaatcactcatgacaagatgttggtcaaaggatcccagtcaaagaccatctatggaagaaatcgtgaagataatgacgcatttgatgcgatacttccccggagctgatgagccccttcaatatccttgccaatactccgacgagggccagtccaactccgcaacatccaccggttcgttcatggatatcgctagcaccaatacctccaataaaagtgacaccaatatggagcaggttcctgcaacgaacgatacgattaagaggctggagagcaagctccttaagaatcaggcaaagcaacagtcggagtctggtcgcctgtctttgggggccagccgagggagctccgtggaaagcctcccacccacctctgagggaaagaggatgtctgccgacatgagcgaaattgaggcgagaatcgccgcaaccaccggtaacggccagcctcggcgacgcagcatacaggatctgaccgtaacgggcaccgagcccggccaggtgtcctctaggtcctcctcacctagcgtacgtatgataaccacctcaggccctacctccgaaaagccaactagatcccacccttggacaccggatgatagcacggatactaatgggtccgataacagtatccccatggcctatcttacccttgaccatcagctacagcctcttgccccctgtcccaacagcaaagaaagtatggctgttttcgagcagcactgcaaaatggcacaggaatatatgaaggtgcagactgaaatcgcgctgttgctgcagaggaagcaggaactggtggcagaactcgaccaggacgaaaaagaccagcagaatacctcaaggctagttcaggaacacaagaagctactcgatgagaataagtctctatcaacttattatcagcagtgtaaaaagcaactggaagtcatccgaagtcaacagcagaaacgacagggtacttcctag

SEQ ID NO: 135990 - DNA, 783 bp, Artificial Sequence
  derived and/or modified sequence
atggatatcgccagcactaacaccagcaataagtcggacaccaatatggagcaagtgcccgctactaatgataccattaaaagacttgagagcaagctgcttaaaaaccaagcaaagcagcaatcggagtcgggtaggctctccctaggcgcatctcgagggtcaagtgtggagagcctgccacctactagcgagggaaagcgaatgagcgcagacatgtctgaaattgaggccagaatcgctgccacaacggggaatggtcagcctagacgcaggagcatccaggatctgaccgtgacaggaaccgaacctggccaggtgtcctctcgaagttctagcccatccgtgcggatgattactacatcaggccctaccagtgagaagcctactcgctctcacccttggaccccggacgattccaccgatactaatggcagcgataacagtatacctatggcctaccttacactcgaccaccagctccagccactggcgccatgcccgaattcaaaagaatccatggccgtatttgagcaacattgtaaaatggctcaagaatatatgaaggttcaaacggagattgctctgctgttgcagaggaagcaagaactcgtcgctgaactcgaccaggatgagaaagatcagcaaaatacaagtcggctggtacaggagcataagaagctgttggacgagaacaaatctttgagtacatactatcagcagtgtaagaaacaactggaggtaattcggtcacagcagcagaaaaggcaggggacctcctag

SEQ ID NO: 135991 - DNA, 1740 bp, Artificial Sequence
  derived and/or modified sequence
atgtccaccgcttccgcagcttcttcctctagttcctccagtgccggagaaatgatcgaagccccatcccaggtgctgaatttcgaggagattgattacaaagagattgaggtcgaagaagtggtgggcaggggggcttttggcgtggtttgcaaagcaaaatggagggctaaggacgtagcaattaaacaaattgagagtgaaagtgagaggaaggccttcatagtcgaactgaggcaattgagccgcgtgaatcatcctaatatcgtaaagttgtatggagcctgcctaaatcctgtgtgtttagtgatggaatatgccgaaggtggttccctatacaacgttctgcatggagcagagcccctgccatattatacagcagcacatgcaatgtcttggtgcttacagtgcagtcagggcgtcgcatatctgcactcaatgcagcctaaagctcttattcacagagacctgaaaccacccaatctccttctcgtggccggagggactgtattaaaaatttgcgactttggcaccgcttgcgacattcagacgcatatgactaacaacaagggaagtgccgcatggatggcacctgaagtgtttgagggttcaaattattccgagaagtgcgatgttttttcatggggcattatcctgtgggaggttataaccaggaggaaaccattcgacgagatcggcggacccgcatttcgaatcatgtgggctgtgcacaacgggacacgcccaccactcataaagaacctgcctaagcccatcgaatctctaatgaccaggtgctggtcaaaggatccaagccagcggccatccatggaggaaatagtgaagatcatgacacatctgatgcgttacttccctggcgctgatgaacctctgcagtacccttgtcagtacagcgacgaggggcagtccaactccgcaaccagcacaggaagctttatggacatcgccagcacaaatacatccaataaatccgacaccaacatggagcaggtccccgcaacaaacgatacgatcaagcgcttggagtccaagttacttaagaaccaggctaagcagcaatcagagtctgggagacttagtctgggagcgagccgcggttcctccgttgagtctctgcctccaactagcgaaggaaagaggatgtctgctgatatgagcgagatagaggctaggatcgctgctactactggcaatggccagcctcgcaggcgctctattcaagacctgacagtgaccggaacagaacccggacaggtttcgagtcggagttccagcccctccgtgcgaatgattaccacatctggccctacatccgaaaagcccacaagatcccacccatggacgcctgatgatagtactgacactaacggctctgataacagcatccctatggcatacctgaccctggatcatcagttacaacccctggccccttgcccaaattctaaggaaagcatggctgtgttcgagcagcactgcaagatggcccaggagtatatgaaagtccagacagagatcgctcttctgctccaaagaaagcaagaactggtagctgagctggatcaggatgagaaggaccagcagaatacaagcaggttagtgcaagagcacaaaaaattactggacgagaacaagagcttgtcaacgtattatcagcagtgtaagaagcaactggaggtgataagatctcagcagcagaaacgccagggcaccagttag

SEQ ID NO: 135992 - DNA, 783 bp, Artificial Sequence
  derived and/or modified sequence
atggacatcgccagcaccaacaccagcaacaagagcgacaccaacatggagcaggtgcccgccaccaacgacaccatcaagagactggagagcaagctgctgaagaaccaggccaagcagcagagcgagagcggcagactgagcctgggcgccagcagaggcagcagcgtggagagcctgccccccaccagcgagggcaagagaatgagcgccgacatgagcgagatcgaggccagaatcgccgccaccaccggcaacggccagcccagaagaagaagcatccaggacctgaccgtgaccggcaccgagcccggccaggtgagcagcagaagcagcagccccagcgtgagaatgatcaccaccagcggccccaccagcgagaagcccaccagaagccacccctggacccccgacgacagcaccgacaccaacggcagcgacaacagcatccccatggcctacctgaccctggaccaccagctgcagcccctggccccctgccccaacagcaaggagagcatggccgtgttcgagcagcactgcaagatggcccaggagtacatgaaggtgcagaccgagatcgccctgctgctgcagagaaagcaggagctggtggccgagctggaccaggacgagaaggaccagcagaacaccagcagactggtgcaggagcacaagaagctgctggacgagaacaagagcctgagcacctactaccagcagtgcaagaagcagctggaggtgatcagaagccagcagcagaagagacagggcaccagctag

SEQ ID NO: 135993 - DNA, 1740 bp, Artificial Sequence
  derived and/or modified sequence
atgagcaccgccagcgccgccagcagcagcagcagcagcagcgccggcgagatgatcgaggcccccagccaggtgctgaacttcgaggagatcgactacaaggagatcgaggtggaggaggtggtgggcagaggcgccttcggcgtggtgtgcaaggccaagtggagagccaaggacgtggccatcaagcagatcgagagcgagagcgagagaaaggccttcatcgtggagctgagacagctgagcagagtgaaccaccccaacatcgtgaagctgtacggcgcctgcctgaaccccgtgtgcctggtgatggagtacgccgagggcggcagcctgtacaacgtgctgcacggcgccgagcccctgccctactacaccgccgcccacgccatgagctggtgcctgcagtgcagccagggcgtggcctacctgcacagcatgcagcccaaggccctgatccacagagacctgaagccccccaacctgctgctggtggccggcggcaccgtgctgaagatctgcgacttcggcaccgcctgcgacatccagacccacatgaccaacaacaagggcagcgccgcctggatggcccccgaggtgttcgagggcagcaactacagcgagaagtgcgacgtgttcagctggggcatcatcctgtgggaggtgatcaccagaagaaagcccttcgacgagatcggcggccccgccttcagaatcatgtgggccgtgcacaacggcaccagaccccccctgatcaagaacctgcccaagcccatcgagagcctgatgaccagatgctggagcaaggaccccagccagagacccagcatggaggagatcgtgaagatcatgacccacctgatgagatacttccccggcgccgacgagcccctgcagtacccctgccagtacagcgacgagggccagagcaacagcgccaccagcaccggcagcttcatggacatcgccagcaccaacaccagcaacaagagcgacaccaacatggagcaggtgcccgccaccaacgacaccatcaagagactggagagcaagctgctgaagaaccaggccaagcagcagagcgagagcggcagactgagcctgggcgccagcagaggcagcagcgtggagagcctgccccccaccagcgagggcaagagaatgagcgccgacatgagcgagatcgaggccagaatcgccgccaccaccggcaacggccagcccagaagaagaagcatccaggacctgaccgtgaccggcaccgagcccggccaggtgagcagcagaagcagcagccccagcgtgagaatgatcaccaccagcggccccaccagcgagaagcccaccagaagccacccctggacccccgacgacagcaccgacaccaacggcagcgacaacagcatccccatggcctacctgaccctggaccaccagctgcagcccctggccccctgccccaacagcaaggagagcatggccgtgttcgagcagcactgcaagatggcccaggagtacatgaaggtgcagaccgagatcgccctgctgctgcagagaaagcaggagctggtggccgagctggaccaggacgagaaggaccagcagaacaccagcagactggtgcaggagcacaagaagctgctggacgagaacaagagcctgagcacctactaccagcagtgcaagaagcagctggaggtgatcagaagccagcagcagaagagacagggcaccagctag

SEQ ID NO: 135994 - protein, 466 aa, Artificial Sequence
  derived and/or modified sequence
MKSLSLLLAVALGLATAVSAGPAVIECWFVEDASGKGLAKRPGALLLRQGPGEPPPRPDLDPELYLSVHDPAGALQAAFRRYPRGAPAPHCEMSRFVPLPASAKWASGLTPAQNCPRALDGAWLMVSISSPVLSLSSLLRPQPEPQQEPVLITMATVEMGFHHVGQAALELLTSVVLTVLTHTPAPRVRLGQDALLDLSFAYMPPTSEAASSLAPGPPPFGLEWRRQHLGKGHLLLAATPGLNGQMPAAQEGAVAFAAWDDDEPWGPWTGNGTFWLPRVQPFQEGTYLATIHLPYLQGQVTLELAVYKPPKVSLMPATLARAAPGEAPPELLCLVSHFYPSGGLEVEWELRGGPGGRSQKAEGQRWLSALRHHSDGSVSLSGHLQPPPVTTEQHGARYACRIHHPSLPASGRSAEVTLEVAGLSGPSLEDSVGLFLSAFLLLGLFKALGWAAVYLSTCKDSKKKAE

SEQ ID NO: 135995 - protein, 448 aa, Artificial Sequence
  derived and/or modified sequence
MKSLSLLLAVALGLATAVSAGPAVIECWFVEDASGKGLAKRPGALLLRQGPGEPPPRPDLDPELYLSVHDPAGALQAAFRRYPRGAPAPHCEMSRFVPLPASAKWASGLTPAQNCPRALDGAWLMVSISSPVLSLSSLLRPQPEPQQEPVLITMATVVLTVLTHTPAPRVRLGQDALLDLSFAYMPPTSEAASSLAPGPPPFGLEWRRQHLGKGHLLLAATPGLNGQMPAAQEGAVAFAAWDDDEPWGPWTGNGTFWLPRVQPFQEGTYLATIHLPYLQGQVTLELAVYKPPKVSLMPATLARAAPGEAPPELLCLVSHFYPSGGLEVEWELRGGPGGRSQKAEGQRWLSALRHHSDGSVSLSGHLQPPPVTTEQHGARYACRIHHPSLPASGRSAEVTLEVAGLSGPSLEDSVGLFLSAFLLLGLFKALGWAAVYLSTCKDSKKKAE

SEQ ID NO: 135996 - protein, 448 aa, Artificial Sequence
  derived and/or modified sequence
MKSLSLLLAVALGLATAVSAGPAVIECWFVEDASGKGLAKRPGALLLRQGPGEPPPRPDLDPELYLSVHDPAGALQAAFRRYPRGAPAPHCEMSRFVPLPASAKWASGLTPAQNCPRALDGAWLMVSISSPVLSLSSLLRPQPEPQQEPVLITMATVVLTVLTHTPAPRVRLGQDALLDLSFAYMPPTSEAASSLAPGPPPFGLEWRRQHLGKGHLLLAATPGLNGQMPAAQEGAVAFAAWDDDEPWGPWTGNGTFWLPTVQPFQEGTYLATIHLPYLQGQVTLELAVYKPPKVSLMPATLARAAPGEAPPELLCLVSHFYPSGGLEVEWELRGGPGGRSQKAEGQRWLSALRHHSDGSVSLSGHLQPPPVTTEQHGARYACRIHHPSLPASGRSAEVTLEVAGLSGPSLEDSVGLFLSAFLLLGLFKALGWAAVYLSTCKDSKKKAE

SEQ ID NO: 135997 - protein, 466 aa, Artificial Sequence
  derived and/or modified sequence
MKSLSLLLAVALGLATAVSAGPAVIECWFVEDASGKGLAKRPGALLLRQGPGEPPPRPDLDPELYLSVHDPAGALQAAFRRYPRGAPAPHCEMSRFVPLPASAKWASGLTPAQNCPRALDGAWLMVSISSPVLSLSSLLRPQPEPQQEPVLITMATVEMGFHHVGQAALELLTSVVLTVLTHTPAPRVRLGQDALLDLSFAYMPPTSEAASSLAPGPPPFGLEWRRQHLGKGHLLLAATPGLNGQMPAAQEGAVAFAAWDDDEPWGPWTGNGTFWLPTVQPFQEGTYLATIHLPYLQGQVTLELAVYKPPKVSLMPATLARAAPGEAPPELLCLVSHFYPSGGLEVEWELRGGPGGRSQKAEGQRWLSALRHHSDGSVSLSGHLQPPPVTTEQHGARYACRIHHPSLPASGRSAEVTLEVAGLSGPSLEDSVGLFLSAFLLLGLFKALGWAAVYLSTCKDSKKKAE

SEQ ID NO: 135998 - protein, 448 aa, Artificial Sequence
  derived and/or modified sequence
MKSLSLLLAVALGLATAVSAGPAVIECWFVEDASGKGLAKRPGALLLRQGPGEPPPRPDLDPELYLSVHDPAGALQAAFRRYPRGAPAPHCEMSRFVPLPASAKWASGLTPAQNCPRALDGAWLMVSISSPVLSLSSLLRPQPEPQQEPVLITMATVVLTVLTHTPAPRVRLGQDALLDLSFAYMPPTSEAASSLAPGPPPFGLEWRRQHLGKGHLLLAATPGLNGQMPAAQEGAVAFAAWDDDEPWGPWTGNGTFWLPTVQPFQEGTYLATIHLPYLQGQVTLELAVYKPPKVSLMPATLARAAPGEAPPELLCLVSHFYPSGGLEVEWELRGGPGGRSQKAEGQRWLSALRHHSDGSVSLSGHLQPPPVTTEQHGARYACRIHHPSLPASGRSAEVTLEVAGLSGPSLEDSVGLFLSAFLLLGLFKALGWAAVYLSTCKDSKKHAT

SEQ ID NO: 135999 - protein, 448 aa, Artificial Sequence
  derived and/or modified sequence
MKSLSLLLAVALGLATAVSAGPAVIECWFVEDASGKGLAKRPGALLLRQGPGEPPPRPDLDPELYLSVHDPAGALQAAFRRYPRGAPAPHCEMSRFVPLPASAKWASGLTPAQNCPRALDGAWLMVSISSPVLSLSSLLRPQPEPQQEPVLITMATVVLTVLTHTPAPRVRLGQDALLDLSFAYMPPTSEAASSLAPGPPPFGLEWRRQHLGKGHLLLAATPGLNGQMPAAQEGAVAFAAWDDDEPWGPWTGNGTFWLPRVQPFQEGTYLATIHLPYLQGQVTLELAVYKPPKVSLMPATLARAAPGEAPPELLCLVSHFYPSGGLEVEWELRGGPGGRSQKAEGQRWLSALRHHSDGSVSLSGHLQPPPVTTEQHGARYACRIHHPSLPASGRSAEVTLEVAGLSGPSLEDSVGLFLSAFLLLGLFKALGWAAVYLSTCKDSKKHAT

SEQ ID NO: 136000 - DNA, 1401 bp, Artificial Sequence
  derived and/or modified sequence
atgaagagcctgagcctgctgctggccgtggccctgggcctggccaccgccgtgagcgccggccccgccgtgatcgagtgctggttcgtggaggacgccagcggcaagggcctggccaagagacccggcgccctgctgctgagacagggccccggcgagcccccccccagacccgacctggaccccgagctgtacctgagcgtgcacgaccccgccggcgccctgcaggccgccttcagaagataccccagaggcgcccccgccccccactgcgagatgagcagattcgtgcccctgcccgccagcgccaagtgggccagcggcctgacccccgcccagaactgccccagagccctggacggcgcctggctgatggtgagcatcagcagccccgtgctgagcctgagcagcctgctgagaccccagcccgagccccagcaggagcccgtgctgatcaccatggccaccgtggagatgggcttccaccacgtgggccaggccgccctggagctgctgaccagcgtggtgctgaccgtgctgacccacacccccgcccccagagtgagactgggccaggacgccctgctggacctgagcttcgcctacatgccccccaccagcgaggccgccagcagcctggcccccggccccccccccttcggcctggagtggagaagacagcacctgggcaagggccacctgctgctggccgccacccccggcctgaacggccagatgcccgccgcccaggagggcgccgtggccttcgccgcctgggacgacgacgagccctggggcccctggaccggcaacggcaccttctggctgcccagagtgcagcccttccaggagggcacctacctggccaccatccacctgccctacctgcagggccaggtgaccctggagctggccgtgtacaagccccccaaggtgagcctgatgcccgccaccctggccagagccgcccccggcgaggccccccccgagctgctgtgcctggtgagccacttctaccccagcggcggcctggaggtggagtgggagctgagaggcggccccggcggcagaagccagaaggccgagggccagagatggctgagcgccctgagacaccacagcgacggcagcgtgagcctgagcggccacctgcagcccccccccgtgaccaccgagcagcacggcgccagatacgcctgcagaatccaccaccccagcctgcccgccagcggcagaagcgccgaggtgaccctggaggtggccggcctgagcggccccagcctggaggacagcgtgggcctgttcctgagcgccttcctgctgctgggcctgttcaaggccctgggctgggccgccgtgtacctgagcacctgcaaggacagcaagaagaaggccgagtag

SEQ ID NO: 136001 - DNA, 1347 bp, Artificial Sequence
  derived and/or modified sequence
atgaagagcctgagcctgctgctggccgtggccctgggcctggccaccgccgtgagcgccggccccgccgtgatcgagtgctggttcgtggaggacgccagcggcaagggcctggccaagagacccggcgccctgctgctgagacagggccccggcgagcccccccccagacccgacctggaccccgagctgtacctgagcgtgcacgaccccgccggcgccctgcaggccgccttcagaagataccccagaggcgcccccgccccccactgcgagatgagcagattcgtgcccctgcccgccagcgccaagtgggccagcggcctgacccccgcccagaactgccccagagccctggacggcgcctggctgatggtgagcatcagcagccccgtgctgagcctgagcagcctgctgagaccccagcccgagccccagcaggagcccgtgctgatcaccatggccaccgtggtgctgaccgtgctgacccacacccccgcccccagagtgagactgggccaggacgccctgctggacctgagcttcgcctacatgccccccaccagcgaggccgccagcagcctggcccccggccccccccccttcggcctggagtggagaagacagcacctgggcaagggccacctgctgctggccgccacccccggcctgaacggccagatgcccgccgcccaggagggcgccgtggccttcgccgcctgggacgacgacgagccctggggcccctggaccggcaacggcaccttctggctgcccagagtgcagcccttccaggagggcacctacctggccaccatccacctgccctacctgcagggccaggtgaccctggagctggccgtgtacaagccccccaaggtgagcctgatgcccgccaccctggccagagccgcccccggcgaggccccccccgagctgctgtgcctggtgagccacttctaccccagcggcggcctggaggtggagtgggagctgagaggcggccccggcggcagaagccagaaggccgagggccagagatggctgagcgccctgagacaccacagcgacggcagcgtgagcctgagcggccacctgcagcccccccccgtgaccaccgagcagcacggcgccagatacgcctgcagaatccaccaccccagcctgcccgccagcggcagaagcgccgaggtgaccctggaggtggccggcctgagcggccccagcctggaggacagcgtgggcctgttcctgagcgccttcctgctgctgggcctgttcaaggccctgggctgggccgccgtgtacctgagcacctgcaaggacagcaagaagaaggccgagtag

SEQ ID NO: 136002 - DNA, 1347 bp, Artificial Sequence
  derived and/or modified sequence
atgaagagcctgagcctgctgctggccgtggccctgggcctggccaccgccgtgagcgccggccccgccgtgatcgagtgctggttcgtggaggacgccagcggcaagggcctggccaagagacccggcgccctgctgctgagacagggccccggcgagcccccccccagacccgacctggaccccgagctgtacctgagcgtgcacgaccccgccggcgccctgcaggccgccttcagaagataccccagaggcgcccccgccccccactgcgagatgagcagattcgtgcccctgcccgccagcgccaagtgggccagcggcctgacccccgcccagaactgccccagagccctggacggcgcctggctgatggtgagcatcagcagccccgtgctgagcctgagcagcctgctgagaccccagcccgagccccagcaggagcccgtgctgatcaccatggccaccgtggtgctgaccgtgctgacccacacccccgcccccagagtgagactgggccaggacgccctgctggacctgagcttcgcctacatgccccccaccagcgaggccgccagcagcctggcccccggccccccccccttcggcctggagtggagaagacagcacctgggcaagggccacctgctgctggccgccacccccggcctgaacggccagatgcccgccgcccaggagggcgccgtggccttcgccgcctgggacgacgacgagccctggggcccctggaccggcaacggcaccttctggctgcccaccgtgcagcccttccaggagggcacctacctggccaccatccacctgccctacctgcagggccaggtgaccctggagctggccgtgtacaagccccccaaggtgagcctgatgcccgccaccctggccagagccgcccccggcgaggccccccccgagctgctgtgcctggtgagccacttctaccccagcggcggcctggaggtggagtgggagctgagaggcggccccggcggcagaagccagaaggccgagggccagagatggctgagcgccctgagacaccacagcgacggcagcgtgagcctgagcggccacctgcagcccccccccgtgaccaccgagcagcacggcgccagatacgcctgcagaatccaccaccccagcctgcccgccagcggcagaagcgccgaggtgaccctggaggtggccggcctgagcggccccagcctggaggacagcgtgggcctgttcctgagcgccttcctgctgctgggcctgttcaaggccctgggctgggccgccgtgtacctgagcacctgcaaggacagcaagaagaaggccgagtag

SEQ ID NO: 136003 - DNA, 1401 bp, Artificial Sequence
  derived and/or modified sequence
atgaagagcctgagcctgctgctggccgtggccctgggcctggccaccgccgtgagcgccggccccgccgtgatcgagtgctggttcgtggaggacgccagcggcaagggcctggccaagagacccggcgccctgctgctgagacagggccccggcgagcccccccccagacccgacctggaccccgagctgtacctgagcgtgcacgaccccgccggcgccctgcaggccgccttcagaagataccccagaggcgcccccgccccccactgcgagatgagcagattcgtgcccctgcccgccagcgccaagtgggccagcggcctgacccccgcccagaactgccccagagccctggacggcgcctggctgatggtgagcatcagcagccccgtgctgagcctgagcagcctgctgagaccccagcccgagccccagcaggagcccgtgctgatcaccatggccaccgtggagatgggcttccaccacgtgggccaggccgccctggagctgctgaccagcgtggtgctgaccgtgctgacccacacccccgcccccagagtgagactgggccaggacgccctgctggacctgagcttcgcctacatgccccccaccagcgaggccgccagcagcctggcccccggccccccccccttcggcctggagtggagaagacagcacctgggcaagggccacctgctgctggccgccacccccggcctgaacggccagatgcccgccgcccaggagggcgccgtggccttcgccgcctgggacgacgacgagccctggggcccctggaccggcaacggcaccttctggctgcccaccgtgcagcccttccaggagggcacctacctggccaccatccacctgccctacctgcagggccaggtgaccctggagctggccgtgtacaagccccccaaggtgagcctgatgcccgccaccctggccagagccgcccccggcgaggccccccccgagctgctgtgcctggtgagccacttctaccccagcggcggcctggaggtggagtgggagctgagaggcggccccggcggcagaagccagaaggccgagggccagagatggctgagcgccctgagacaccacagcgacggcagcgtgagcctgagcggccacctgcagcccccccccgtgaccaccgagcagcacggcgccagatacgcctgcagaatccaccaccccagcctgcccgccagcggcagaagcgccgaggtgaccctggaggtggccggcctgagcggccccagcctggaggacagcgtgggcctgttcctgagcgccttcctgctgctgggcctgttcaaggccctgggctgggccgccgtgtacctgagcacctgcaaggacagcaagaagaaggccgagtag

SEQ ID NO: 136004 - DNA, 1347 bp, Artificial Sequence
  derived and/or modified sequence
atgaagagcctgagcctgctgctggccgtggccctgggcctggccaccgccgtgagcgccggccccgccgtgatcgagtgctggttcgtggaggacgccagcggcaagggcctggccaagagacccggcgccctgctgctgagacagggccccggcgagcccccccccagacccgacctggaccccgagctgtacctgagcgtgcacgaccccgccggcgccctgcaggccgccttcagaagataccccagaggcgcccccgccccccactgcgagatgagcagattcgtgcccctgcccgccagcgccaagtgggccagcggcctgacccccgcccagaactgccccagagccctggacggcgcctggctgatggtgagcatcagcagccccgtgctgagcctgagcagcctgctgagaccccagcccgagccccagcaggagcccgtgctgatcaccatggccaccgtggtgctgaccgtgctgacccacacccccgcccccagagtgagactgggccaggacgccctgctggacctgagcttcgcctacatgccccccaccagcgaggccgccagcagcctggcccccggccccccccccttcggcctggagtggagaagacagcacctgggcaagggccacctgctgctggccgccacccccggcctgaacggccagatgcccgccgcccaggagggcgccgtggccttcgccgcctgggacgacgacgagccctggggcccctggaccggcaacggcaccttctggctgcccaccgtgcagcccttccaggagggcacctacctggccaccatccacctgccctacctgcagggccaggtgaccctggagctggccgtgtacaagccccccaaggtgagcctgatgcccgccaccctggccagagccgcccccggcgaggccccccccgagctgctgtgcctggtgagccacttctaccccagcggcggcctggaggtggagtgggagctgagaggcggccccggcggcagaagccagaaggccgagggccagagatggctgagcgccctgagacaccacagcgacggcagcgtgagcctgagcggccacctgcagcccccccccgtgaccaccgagcagcacggcgccagatacgcctgcagaatccaccaccccagcctgcccgccagcggcagaagcgccgaggtgaccctggaggtggccggcctgagcggccccagcctggaggacagcgtgggcctgttcctgagcgccttcctgctgctgggcctgttcaaggccctgggctgggccgccgtgtacctgagcacctgcaaggacagcaagaagcacgccacctag

SEQ ID NO: 136005 - DNA, 1347 bp, Artificial Sequence
  derived and/or modified sequence
atgaagagcctgagcctgctgctggccgtggccctgggcctggccaccgccgtgagcgccggccccgccgtgatcgagtgctggttcgtggaggacgccagcggcaagggcctggccaagagacccggcgccctgctgctgagacagggccccggcgagcccccccccagacccgacctggaccccgagctgtacctgagcgtgcacgaccccgccggcgccctgcaggccgccttcagaagataccccagaggcgcccccgccccccactgcgagatgagcagattcgtgcccctgcccgccagcgccaagtgggccagcggcctgacccccgcccagaactgccccagagccctggacggcgcctggctgatggtgagcatcagcagccccgtgctgagcctgagcagcctgctgagaccccagcccgagccccagcaggagcccgtgctgatcaccatggccaccgtggtgctgaccgtgctgacccacacccccgcccccagagtgagactgggccaggacgccctgctggacctgagcttcgcctacatgccccccaccagcgaggccgccagcagcctggcccccggccccccccccttcggcctggagtggagaagacagcacctgggcaagggccacctgctgctggccgccacccccggcctgaacggccagatgcccgccgcccaggagggcgccgtggccttcgccgcctgggacgacgacgagccctggggcccctggaccggcaacggcaccttctggctgcccagagtgcagcccttccaggagggcacctacctggccaccatccacctgccctacctgcagggccaggtgaccctggagctggccgtgtacaagccccccaaggtgagcctgatgcccgccaccctggccagagccgcccccggcgaggccccccccgagctgctgtgcctggtgagccacttctaccccagcggcggcctggaggtggagtgggagctgagaggcggccccggcggcagaagccagaaggccgagggccagagatggctgagcgccctgagacaccacagcgacggcagcgtgagcctgagcggccacctgcagcccccccccgtgaccaccgagcagcacggcgccagatacgcctgcagaatccaccaccccagcctgcccgccagcggcagaagcgccgaggtgaccctggaggtggccggcctgagcggccccagcctggaggacagcgtgggcctgttcctgagcgccttcctgctgctgggcctgttcaaggccctgggctgggccgccgtgtacctgagcacctgcaaggacagcaagaagcacgccacctag

SEQ ID NO: 136006 - DNA, 1401 bp, Artificial Sequence
  derived and/or modified sequence
atgaagagcctgagcttactgttagctgtggctctgggcctagctacggccgttagcgcgggacctgcagtgatcgagtgttggttcgtcgaggatgcatccggcaaggggctcgcaaagcggcctggagctctcctcctgagacagggacccggagagcccccaccaaggccagacctcgatccagagctgtatctgtccgtgcacgatcctgctggggctctgcaagccgcgttccgcaggtaccctagaggagcccctgcccctcactgtgagatgtctaggttcgttccgctgccagctagcgctaaatgggctagcgggctgacccctgctcagaattgcccgcgcgcccttgatggcgcctggctcatggtgtccatatcttcgcccgtactttcactgagttcccttctcaggcctcagccagagccacagcaggaaccagtgttaatcaccatggcaaccgtggaaatgggctttcatcacgtcggacaggcagccctcgaactgctgacatccgttgtgttaactgtgctgactcacacccctgcacctcgggtacgcctgggccaggacgctttattagatctcagcttcgcatatatgccgccaacttcagaagccgcctcttctctggcaccaggcccccccccttttggcctggaatggcgtcggcaacacttgggcaaggggcacctgcttcttgccgcaactccggggctcaacgggcagatgcccgcagctcaagagggcgctgttgcttttgccgcctgggatgacgacgagccatggggaccatggacgggcaacggaacattctggctgccacgggtgcagccattccaggagggcacctatctggctactatccacctcccgtacttgcagggccaggtgaccttggagctggctgtatataaacctcctaaagtgtcgctgatgccagctacacttgcgagagccgcaccaggcgaggctcctccagagttactctgcctggtatctcatttctacccaagtggagggttggaagtcgagtgggagcttaggggcggcccgggcggccggtcgcaaaaggcagaaggacagagatggctgagcgccctgagacatcactccgatggatcggtttcactgagcgggcacctgcagccccctcctgttaccacagaacagcacggggcacggtatgcatgtcgaatccaccacccatctcttccggccagcggaagaagcgccgaagtgacgctggaggtggccggcctgtctgggcctagccttgaggacagcgttggtttgttcttgtccgcctttctgctgttaggactctttaaagccctgggctgggctgctgtctacctgagtacatgtaaagatagcaaaaagaaggcagaatag

SEQ ID NO: 136007 - DNA, 1347 bp, Artificial Sequence
  derived and/or modified sequence
atgaaatccctgagtctcctcctggccgtcgccctcgggttagccaccgcagtgtctgcaggtccagccgttatagagtgctggttcgttgaagatgcaagtgggaaaggtctggccaaacgaccaggcgctttgttgctgcgccagggtcctggcgaacctccacctaggcctgacctcgatcccgaactgtatctctctgtgcacgatcccgcaggcgcattgcaggctgcattccgcagatatccacggggcgctcccgctcctcattgtgagatgagtaggttcgtgccccttcctgccagcgccaaatgggcatctgggctcacacccgcacagaattgcccaagggccctggacggggcctggctaatggttagcatttcatcccctgtattgagtttgtcctcattactgcggccccagccagaaccccaacaggagcccgtgctgattaccatggctaccgttgtcctgacagtcttaacacacactcctgcaccgagagtacgtttggggcaggacgctctgctggatctctcctttgcgtatatgcctccaaccagcgaggctgcctcctcacttgccccaggtccaccgcctttcggcctggagtggagaaggcagcacctcggcaaaggccacctgctcttggctgctactccaggcctaaatggccagatgcctgctgctcaggagggggctgtggcgtttgcagcctgggatgacgacgagccatgggggccatggactgggaacggaacattctggctgccaagggtacagccctttcaggaaggtacttatctagcgacgatacaccttccttatctgcagggtcaggtcacactagaactagccgtgtataaaccccctaaggtgtctctcatgccagctactctcgccagggccgctccaggagaggcccctcctgagttgttatgtctcgtgtctcacttctatccaagcggcggccttgaggtggaatgggaactcaggggagggcccggaggaagatcccagaaggcggagggtcagcgctggttatcagccctcagacaccattctgacggttccgtgagtctgtctgggcatctgcaacccccccctgttacaacggaacaacatggagcacgctatgcttgccggatccaccaccctagcctacccgcctccggccgctctgccgaagtgacactggaagttgcaggactgtccggtccctccctcgaggacagcgtgggcttgttcctgtcggcgtttctgcttctaggtcttttcaaagccttaggatgggccgcagtgtacttatcaacgtgcaaggactccaaaaagaaagctgaatag

SEQ ID NO: 136008 - DNA, 1347 bp, Artificial Sequence
  derived and/or modified sequence
atgaagtcccttagtttgctactagccgtggcactcgggcttgcgacagccgtgtccgccggacccgcagtaattgagtgctggttcgtcgaagacgcttctggcaaagggttggccaaacgacccggggccctgttgctcagacagggaccgggagagcctccgccccgccccgaccttgaccccgaactctatctatcggtgcatgatccggccggagctctgcaggccgcctttcgccgatacccacgcggagcaccagcaccgcactgtgaaatgagccgatttgttcctctgcccgctagtgccaagtgggcctcaggacttacacctgcccaaaactgtccacgagctcttgatggtgcgtggttaatggtgagcatcagtagtccagttcttagcctgtcttccctgttacgtccgcagcctgaacctcagcaggagccagtgctcataactatggctacggttgtgttgactgtcctcacacacacacctgctccacgagtcagactgggacaagatgctctattggacctgtccttcgcatacatgccgccgacatcagaagccgccagctctcttgcaccaggacccccacccttcggactcgaatggaggcgccagcacctgggtaagggccacttgctcctggcagcgacccccgggctaaacggccagatgcctgccgctcaagagggcgctgtggcattcgccgcatgggacgatgatgagccttggggaccttggaccggcaacggaaccttttggctgcctacagtgcaacccttccaggagggcacatatctggccaccattcacctgccctacctccaagggcaagtgacactcgagttagctgtctataaacctcctaaggtctcactgatgccggctactttggcaagggcagcccccggtgaggcccctcccgagctgttatgcctggtgtcgcacttttatccctctggaggactggaagtggagtgggaactgagaggtggacctggtggcagaagtcagaaggccgaaggccagcgctggctttcagctcttcgtcaccactctgatgggtctgtgtccttatctgggcacctccagcccccccccgtgacgacggagcagcatggcgccagatatgcctgcagaatacaccatccaagcctcccagccagcggaaggagtgctgaggtgaccctcgaggtggcaggtctgagcggtcctagtctagaggactcagtgggcctgtttctgagcgcttttctgctgctcggcctgtttaaggctttaggctgggccgccgtctacctgagcacttgcaaggattccaagaagaaagctgagtag

SEQ ID NO: 136009 - DNA, 1401 bp, Artificial Sequence
  derived and/or modified sequence
atgaaatctctttccttactgcttgcagttgcccttggtttagccacagctgtcagtgcggggcccgctgtgatcgaatgctggtttgtggaggacgcctcaggcaagggcctggccaagagacctggcgccttactattgcgacaaggccctggggagccgcccccgcgtcccgacctggatcccgagctctacttgtcagtgcacgatcccgctggcgcactccaggccgccttcaggcggtaccccagaggagcccccgccccacattgtgagatgtctagatttgttccactgcccgcttccgccaaatgggcctctggcctaacaccagcccagaactgcccacgcgccctggacggagcttggcttatggtgagcatatctagcccggtgctgagcctctcctccctgctgaggccccagcctgaaccacagcaagaacccgtcctcatcactatggcaacagtggaaatgggattccatcatgtgggccaggcagctctggagctgttaacctctgtggtgctcacagtgctgacccatacaccggccccacgggttaggcttgggcaggacgccctgctggacttgtcctttgcctatatgccccctacctctgaggcagccagctcgctagcacctggaccacctccctttggcctcgagtggcgcagacagcatcttggcaaggggcatcttctgctcgctgctactcccggactgaacgggcagatgcctgcagctcaagaaggagccgtggccttcgccgcttgggatgatgacgaaccctggggcccctggaccggaaatgggacattctggctgcctaccgtgcagccttttcaggagggcacgtacctggccacgatacatttgccatacctccagggacaagtgaccttggaattggcggtgtataagcctcccaaggtgtccctcatgcccgcaaccctggctcgcgctgctccgggagaagctccccccgagctgctgtgtctggtctctcatttctaccccagcgggggcctggaagtcgaatgggagttgaggggcggaccgggggggagaagtcagaaggccgagggccagaggtggcttagtgctctgcgccatcattctgacgggtccgttagcttgagtggccacctacaacccccccctgtcactacggaacaacacggggcccgatatgcttgtcggatccaccatccatcgcttcccgcctccggtaggagcgccgaggtcacactggaggtggccggtctgtctgggccatctttggaggactccgtggggctgtttctctcggcatttctcttgctgggcctattcaaagctttgggatgggccgcagtctacctcagtacctgcaaagatagtaaaaagaaagccgaatag

SEQ ID NO: 136010 - DNA, 1347 bp, Artificial Sequence
  derived and/or modified sequence
atgaagtctcttagcctcctgctcgcggtcgcactcggcctggccactgctgttagcgccgggcccgctgtcattgagtgctggtttgtggaagacgctagcggaaaggggctggcaaaacgcccaggggccttgctgctccgccagggtcctggagaacctccaccccggccggacctcgatccagaactttacctgagtgtgcatgatcctgccggcgccctgcaggctgcttttcggcgatacccgagaggagcgcccgccccccattgcgagatgtcaagattcgtacctctccccgccagcgccaagtgggcctcagggttaaccccggctcagaattgtccgagggccctagacggagcttggctgatggtgtctatctcttccccagtcctcagtttatcctctttgctgcgcccacaacccgaacctcagcaagaacccgtgcttatcacaatggctactgtggtgctgacggttctgactcatactcccgctcctcgggtccgactgggtcaagatgccctgttggacttgtccttcgcctacatgcctcctacctcagaggccgccagtagcctggcgccaggccctccgccattcggcctggagtggagaagacagcacctgggtaaggggcatctgcttttagctgcgacacccgggctgaatggtcaaatgccagccgctcaggagggagcagtggccttcgcggcatgggatgacgatgagccatgggggccctggactggaaacggtacgttttggctccctagggttcagccgttccaggaaggtacatacctggccactattcatcttccttatttacaggggcaggtcaccttagaactggccgtgtacaagccccctaaggtttccctgatgcccgctaccttggctagagctgcccctggtgaggcccctcccgaactgctctgtcttgtatctcacttctaccctagtggcggcctcgaagttgaatgggaattgagaggaggcccaggcggcagatcccagaaggcggagggtcaaagatggctgagcgcattacgtcatcattcagatggctccgtctcactctcaggtcacttacagcccccaccggttacaaccgaacaacatggggctcggtacgcctgtcgtattcaccacccttccctgcccgcgagcggccgctcagccgaggtgacgttagaggtcgccggtctatctggccccagcctggaggatagtgttggcctgttcctgtccgcttttttgctgctcgggctcttcaaagccttgggctgggctgcagtttatctctctacctgcaaagacagtaagaaaaaggcagaatag

SEQ ID NO: 136011 - DNA, 1401 bp, Artificial Sequence
  derived and/or modified sequence
atgaaaagcctgagcctcctgctggctgtagccctgggcctcgctaccgccgtgtctgcagggccagcagtcattgagtgctggtttgtggaggacgcatcgggaaagggcttagccaagcggcccggcgcactgctgctacgacagggacccggcgagccccctcctcgtccagacctcgatccagagttgtacctttccgtgcatgaccctgcaggcgcactgcaggctgcttttaggcgataccccaggggcgcaccagctccccactgtgagatgagtagatttgtacccttgcctgcttctgccaagtgggccagcgggctgacgccagcacagaactgtccccgggccctggacggcgcctggcttatggtctctatatcatcaccagttctctcattgtcgagcctgctccgaccccagcccgagccccagcaggaacccgtgctgatcacaatggcaacggtggaaatggggttccaccacgtgggacaagccgctttagagctactgacatcagtggttctcacagtactaacacacacgcctgctccccgtgttcggctcggccaggacgccttgctggacctgtccttcgcctatatgccccctacgagtgaggccgcttcttcactggcgcccgggccaccaccctttggattagagtggcgcaggcagcacttaggaaaggggcacttactcctggccgccacccctggtttgaatggacagatgcctgccgctcaggagggagccgtggccttcgccgcttgggatgacgacgaaccctggggtccttggacggggaatggcactttctggctgccccgcgtacagccattccaggagggcacctacttggccactattcacttgccctatttacaaggtcaagtcaccttagagctcgcagtgtacaagccgccaaaagtgtccctcatgcctgctacactggcacgtgctgctcctggggaggcacccccagagctcctttgtctagtatcgcatttctacccctccggcggattggaggtcgagtgggagcttcgcggcggccctggaggcagatctcagaaagcagaggggcaaagatggctgtctgcactgcgccaccactctgatggatctgtcagcctttcaggacatctccagcctcctcctgtaacgactgagcaacacggcgcccggtatgcctgccggattcaccacccatctcttcctgccagtgggcgcagcgccgaggtgacgctcgaggtggcgggcctaagcggcccgagcctggaagattcagtgggcttgttcctgagcgcctttctcctcctcggcttatttaaggctctgggctgggccgcagtatatctgagcacttgtaaagacagcaaaaaaaaggcggaatag

SEQ ID NO: 136012 - DNA, 1347 bp, Artificial Sequence
  derived and/or modified sequence
atgaagagcttgagccttctgcttgccgtggccctcggattagccacggcagtttcagcagggccggctgtgatcgaatgttggttcgtcgaggacgcgagcggcaaggggctggcaaaacggcccggagccttgctgctgagacaaggaccgggggaacccccgcctaggccagatctcgacccggagctgtatctctctgtgcacgatcccgcgggcgcactgcaagccgcattcaggaggtatcccagaggagctccagctccccactgcgaaatgagtcgcttcgtacctctcccagcctctgcaaagtgggcctcaggtctgaccccagcccagaattgtcctcgagccctggatggggcctggcttatggtgtctatcagttccccagtgctgtccctgtcctcattgctgcggccccagcctgaaccccagcaggagcctgtgctgatcacaatggccaccgtggtcttaaccgtgctgacacacacacctgctcctagggtacggcttggacaggacgctttgctggatctatccttcgcttacatgccaccaacctccgaagctgcgagttctttagcgccgggccccccaccctttggactggagtggaggcgtcagcaccttgggaaagggcacttactgctggccgccacgccgggactcaacggccagatgccagctgctcaggagggagccgtggcctttgcagcctgggacgatgatgaaccatggggtccgtggaccggtaatggcactttttggttgccccgtgttcagccatttcaggagggtacttatttagctaccattcacctcccctatttgcagggccaagttactttggagctggccgtctataagccaccaaaagtctccctcatgcccgccacattggcccgagccgctcctggtgaggctccgcctgagctactatgcctcgtgagtcacttctatcctagcggcggcctggaggtcgaatgggaacttcgcggcggccccggcggcagatcccagaaggcagaaggccagagatggctgagcgctttgaggcaccactctgacggctccgtgtccctgagcgggcacctccaacctcctccagtgactacagagcagcatggcgctcggtacgcttgccgaatccaccacccctcccttcctgcttctggcaggtcagccgaagtcactctcgaagtcgctgggctgtcagggcccagtttggaggactcagtgggattgttcttgtctgcctttctgctactaggcttattcaaggcgctgggatgggccgcagtttatttaagcacgtgtaaggactcaaagaagaaggcagagtag

SEQ ID NO: 136013 - DNA, 1347 bp, Artificial Sequence
  derived and/or modified sequence
atgaaaagcctgtcccttcttctcgcggtggcccttgggctggctaccgctgtatcggcgggtccagctgtgatagaatgctggtttgtcgaggacgcttccggaaaggggctggccaagcgaccaggcgccctgctccttcgacaaggacccggagagcctcccccccgacccgatttggaccccgaattgtatttgtcagtgcacgatcccgccggggccctacaagcagctttccgcaggtaccctcggggagcacccgcaccacactgcgagatgtccaggtttgtccctttgcctgctagtgccaagtgggcctcgggcctaacgccagcccaaaactgcccacgcgctctggatggcgcctggctcatggtttcaatttcttctcccgtcttatctctgtcctcactcctgagaccccagccagagccccagcaggagccggtcctgatcaccatggcaacagtcgtcttgaccgtgctgacccacacccctgctcctcgagtgcgcctgggccaggacgccctgctggatttatcctttgcgtatatgcctcctacatccgaagcagcgagctctttagcccccggcccccccccttttgggctggaatggcggcgccagcatttaggtaaaggtcacctgcttctcgctgccacccctggcctgaacggccagatgccagccgcccaagagggtgcggttgcttttgctgcctgggacgacgacgagccatgggggccctggactggcaacggtaccttctggctcccgacagttcagccattccaggaaggtacgtatctggccactatccacttaccttacttgcagggccaggtgactttggagttggccgtatacaagccacctaaagtgagcttaatgcctgctacattagccagggcggccccgggcgaggccccccctgaactgctctgtcttgtgagccatttctacccgtcaggcggcctcgaggtggagtgggagctacggggcggacccggaggccggagtcaaaaggcagaggggcagagatggctttcagcccttcgccaccactcggacggcagtgtcagtttgtctgggcacctccagcctccgccagtaacaacagagcaacacggcgccaggtacgcctgtagaattcatcaccctagcctgcccgctagcggccgctccgctgaggtgacactcgaggtggccggcttaagtgggccatccctggaagacagcgtgggcctgtttctgagcgccttcctacttctcggtctgttcaaagcgctgggctgggcagccgtctacctgagtacatgtaaagattctaagaaaaaagccgagtag

SEQ ID NO: 136014 - DNA, 1401 bp, Artificial Sequence
  derived and/or modified sequence
atgaagtccctctccctgctcctggcggtagctctgggacttgcaacagctgtaagtgctggccctgctgtgatagagtgctggttcgtcgaggacgccagcgggaaaggtcttgctaaacggcccggtgcgctcctactgcgccagggcccaggggagcctccaccaaggccggacttggacccagagctctatctgtcagttcacgatcctgcaggggcactacaggcagcgttcagaagatatcctcgcggagcccccgcccctcattgcgagatgtcccgctttgtgcccctacctgcctcagccaaatgggcctctgggctcactcctgctcagaattgtccacgcgcgctggatggagcatggctcatggtgagcatcagctcccctgtgctgagcctgtcatctctcctgcgtcctcagccagagccacagcaggaacccgtactgataacaatggctacggtagaaatgggttttcaccacgtcggacaggccgccctggagctcctcacaagcgtcgttctgacagtgctgacacatacaccagcaccccgggtcaggctcggacaagatgctctgctggacctgtccttcgcttacatgcctcctacttccgaggccgcttcctcattggcaccaggtccaccgccgtttggcttagagtggcgtcggcagcatctgggcaaaggccatctgttactcgccgcaacccccggattgaacgggcagatgccagcagcgcaggaaggcgccgtagcttttgccgcatgggacgacgacgaaccttggggtccatggaccggcaacggcaccttctggcttccccgggtccaacccttccaggaaggcacttacctcgcgacaattcatcttccttatctgcagggccaggtgactctggagttggcagtgtataaacctccaaaggtcagtctgatgcctgccacactcgcccgggccgcccctggggaggccccacctgaattgttgtgccttgtcagtcacttctatcctagtggcgggctggaggtagagtgggagttgagaggaggtcccggaggacggagtcagaaagccgagggacagagatggctgtcagccctgcggcaccattctgatgggagtgtgtcccttagtggtcacctccagccacctccagtcacaaccgaacagcatggcgcccgctatgcatgccgaatacaccaccccagccttcctgcctcgggtcgctcagctgaggttacgctcgaagtggcaggcctgagcgggccctctttggaggattcggtgggtctgttcctgtccgccttcttgctgctcgggctctttaaggcgctcgggtgggccgccgtgtatctgtcaacatgtaaggattctaagaagaaggcagagtag

SEQ ID NO: 136015 - DNA, 1347 bp, Artificial Sequence
  derived and/or modified sequence
atgaagtcactgtccctgctgctggcagtggcgctgggcctggcgacagctgtctcagctggccctgcagtgattgaatgttggtttgttgaggatgcttccgggaagggtctggctaagcggcccggagcattgctcttacgacagggacccggagagccaccccctaggccagatttagacccagagctgtatctgtcggttcatgacccagccggggccttgcaggctgcctttcggcgatacccacggggcgcccccgccccacactgcgaaatgagccggtttgttcctttgcccgcgtcagccaaatgggcgtctgggcttacccctgcacagaattgtccaagggccctggacggcgcatggctgatggtgtcaattagtagtccagttctgagtctcagctcactgctgagaccccagcccgagcctcagcaggaaccagtcctcatcacgatggcgaccgtggtgctcacagtcctgacgcataccccagcccctagggtaagactgggacaagatgccctgcttgacctttcattcgcctacatgcctcccacaagtgaggctgcatcatccctggcaccaggccccccgccttttgggttagagtggcgaaggcaacacctgggtaaaggccatttattacttgctgccacaccggggctgaacggacaaatgccagccgctcaggaaggtgccgtggcattcgcagcgtgggatgacgacgagccttggggtccctggaccggtaacggcacgttctggctgcccaccgtgcaaccattccaggagggaacctacctcgcgacgatacacttgccatatttgcagggccaggtcaccctggagctggctgtttacaagccccctaaggtttcactgatgcccgccaccctcgctagggccgcccctggggaggcacctcctgaactgttgtgcctcgtgtctcatttctacccctccggcggtttagaagtggagtgggaactgagaggaggccctgggggccgcagtcagaaagctgaaggacagaggtggctgtccgcccttcggcaccacagtgatggctctgtcagtctctcagggcacctgcaaccaccacccgttaccacagagcaacacggtgctcgatacgcctgcaggatccaccaccccagcttgccagcgagcggccgaagcgccgaggtgactctagaggtagcaggactatccgggcccagcctggaggatagcgtggggctttttctgtctgcctttctgcttttgggtttgtttaaagcactcggttgggcagcagtatatctgtctacgtgcaaggacagcaaaaaacatgctacctag

SEQ ID NO: 136016 - DNA, 1401 bp, Artificial Sequence
  derived and/or modified sequence
atgaaatcactaagcctcctgcttgctgttgctcttgggttggccacagctgtgagcgccggtccagcagttatcgagtgctggtttgtggaagatgcatcagggaaaggcctggctaaaagaccaggcgctcttctactgagacagggtccaggcgagccccctcccaggcccgatctcgatcccgagctgtatctgtcagtccatgatcccgctggtgctctccaggccgcatttcgacgttatccgagaggtgcccctgccccccactgtgaaatgtcccggtttgtgcccctccccgcatctgccaagtgggcctcaggcttaacccctgcacagaactgccctcgggccctggacggagcttggctcatggtatccatctcttcccccgtattgtctctgtccagtctcttgcgcccacaaccagaaccccagcaggaaccagttctgattaccatggcaacagtcgaaatgggatttcatcacgtcggacaggcggccctagaactgctgaccagcgttgtgttgaccgttctgacgcatacccctgccccaagggtccgcctggggcaggatgctctgctggacttgtcctttgcttatatgcccccgacttccgaagcggccagttctctggcccctggtcccccaccgtttggactggaatggaggcgccaacatctgggcaagggacatcttctcctggctgccacacccggactgaacggccagatgcccgccgcccaagagggggccgtcgcttttgctgcctgggacgacgatgaaccatgggggccttggacagggaacggtaccttttggctgcccaccgtccagcccttccaggagggaacctatcttgccaccattcacctcccttatctgcagggccaggtcacattggaacttgcagtctacaagcctcccaaagtgtccctgatgccagctaccctagcacgcgctgctccgggggaggctccccctgagttactctgtctcgtttctcatttctacccatcaggcgggcttgaggtggaatgggagctcagaggaggtccggggggacgctcccagaaagctgaagggcagagatggctttccgcactcagacaccactctgatggcagtgtgagcttatctggccacctccagccccctccggttacaacagagcaacatggtgcccggtatgcttgtcgcatacatcatccatctctgcctgcctcagggcgatctgcagaggtgaccttggaggtcgctggattgagcggtccgtctctggaggattccgtgggcctcttcctcagtgctttcctgctgcttggcctgtttaaagcgctgggttgggccgccgtctacctgtcaacatgcaaggattctaagaagaaagcggaatag

SEQ ID NO: 136017 - DNA, 1347 bp, Artificial Sequence
  derived and/or modified sequence
atgaagtctctcagtttgctcttggcagtagccctcggcctggccacagccgtgagcgcaggacccgccgtgatcgagtgctggtttgttgaagatgcatcaggtaaggggctggctaagcgccctggtgctctcctgctgcgccagggcccaggagagccaccccctcgcccagatctcgaccccgagctgtatctgtccgtgcacgatcccgccggtgctctgcaagctgctttcaggaggtacccaaggggcgcacccgcaccacactgcgaaatgtcaaggttcgtcccattgcctgctagcgctaaatgggctagtggccttactcccgcgcagaactgtcctcgggctttagacggagcctggttaatggtttccatttctagtccagtattatctctgagttctctccttcggccccaaccagaaccccaacaggagcctgtcctcataaccatggccacagtggtcttaactgtgctgacccataccccagcaccccgcgtccgcctagggcaggatgccctgctggatttgtccttcgcttatatgcctcccacttcagaggcagcctcaagtctggctccaggtccacctccttttgggctcgagtggcggcgtcaacacctgggcaaaggccaccttctgctggccgcaacccctggattgaatggccaaatgccagctgcgcaagagggcgctgtcgctttcgcagcttgggatgacgatgagccctggggtccctggaccgggaatggtactttctggctgcccaccgttcagccgtttcaagagggcacataccttgccactatacaccttccgtatctgcagggtcaagtaactttggaactggcagtgtacaagcctcctaaggtctccttgatgccagccactctggccagagccgcacccggagaggcccccccagaattgctctgcctggtttcccatttttacccttcagggggtctcgaagtggaatgggaactccggggcggacccggggggagaagccaaaaagcagagggacagcggtggctgagcgccctgcgccatcactcagatggatccgtttctctgagtggccatttgcagcctccaccagtcaccacggagcagcacggagctaggtacgcctgtcgtatccaccacccgtctcttcctgccagtggccgcagcgcagaggtgaccctcgaggtggccggcttatccggacccagcctcgaggattcagtgggactgttcctgagtgcctttttattactgggtctgtttaaggcactgggctgggccgcagtctacctgtcaacttgtaaggacagcaagaagcacgcgacttag

SEQ ID NO: 136018 - DNA, 1347 bp, Artificial Sequence
  derived and/or modified sequence
atgaagagtttaagtcttctgcttgctgttgcgcttggcctggcaacagccgtgtccgccgggcccgcagtcatcgagtgctggtttgttgaggacgcctcgggtaagggcctcgcgaagcgccccggcgcactgctccttcgacagggacccggagagccgccaccaagacccgacctggatccagaactttatttgtcagtgcatgatcctgccggtgcactccaggcggcttttcggaggtatccaaggggggcccctgccccacactgtgaaatgagcaggttcgtccctttgcctgcctctgctaagtgggcaagcggactcacccctgcacagaactgcccgagagctctggacggggcctggctgatggtgtctatatccagtccagtgctgtcgctctccagcctcctgagacctcagccggaacctcagcaggagccagttttaattaccatggcaaccgtcgtcctgactgtattgactcacacacctgccccccgggtgcggctcggccaggatgccctgctagatttgagttttgcttacatgccaccaactagtgaggccgcttcttcactggcccccggcccgccgccttttggtttggaatggaggagacagcacttgggcaagggacatctgcttctggccgctacccccggcctcaatggtcaaatgcccgccgcccaggaaggcgccgtggcctttgcggcgtgggatgacgacgaaccatggggcccctggacgggtaacggcaccttctggttacctagggtgcaaccttttcaggagggaacctaccttgcgaccatccacctcccatatctgcagggtcaggtaaccctggagctagccgtgtataagccacctaaggtcagcttaatgcccgcgaccctggcaagagctgctcctggagaggcgcctcccgagctgctgtgtctggttagtcatttctatccgagcggcggattggaagttgagtgggagctccgggggggccccgggggtagaagtcaaaaggcagaggggcagagatggctttccgcacttcggcatcattccgatggctcggtctcactaagtgggcacctgcaacctccccctgtcacgactgagcagcacggtgctcgctatgcttgcaggatacaccatccttctctgcctgcttccggcaggagcgcagaggtgaccttggaagttgccggactgtccgggcccagcctggaagacagcgtcgggctgttcctgtccgcgtttctgctgctggggcttttcaaggcgctgggctgggcggccgtgtacctctctacatgtaaagactccaaaaagcacgcaacttag

SEQ ID NO: 136019 - DNA, 1347 bp, Artificial Sequence
  derived and/or modified sequence
atgaaatcacttagtctcctgctcgccgtggctttgggactggcgacggccgtttccgctggccccgctgtgatagaatgctggtttgtggaagacgcaagcgggaaaggcctcgcgaagagacctggcgcgttgctactccgccagggtccgggggaaccccccccaaggcccgatctggatccagaactataccttagtgtacacgacccagcaggcgccctgcaggcggcttttaggcgctatccacggggggctccagccccgcactgtgagatgtcccgattcgtgccattacccgccagtgccaagtgggcatcaggactgacaccagcacagaactgtcctcgagccttggatggagcatggctgatggtatcgatatcgtcaccagtcttgagtctctcttcactgctgaggccacagcccgagcctcaacaggagcctgtgctcatcaccatggccaccgttgtcctaactgtcctgacacacacaccagcacctagagtgaggctaggacaggatgccctgctcgatctctcatttgcctacatgccaccaacaagcgaagcagccagctcactggcaccagggccaccccccttcgggcttgaatggcggcgacagcatttaggaaaaggtcatcttctcctggcagctacgccgggcctgaacggccaaatgcctgcagcccaagagggcgcagtggcttttgccgcctgggacgacgacgagccttggggaccatggaccggtaatggcactttttggcttcctcgagtgcaaccttttcaagagggtacgtatttagctaccatacatctaccctacctccagggacaggtcacgttagaactggctgtgtataaacctccaaaagtgtctctcatgcccgctaccctggcccgggccgcgcccggggaggctccccccgagcttctatgtctggtgtctcacttctatccatcaggcggcctggaggtagagtgggagctccgcggagggcctgggggacgatcacagaaggccgaagggcagcggtggctttcagctctccgccatcactcggatgggtctgtcagtctctcaggccacctgcagcctccgcctgtcacaacggagcagcatggtgcgagatatgcttgtagaatccatcaccctagtctccccgcctccggtcggagtgctgaagttactttggaggtggcaggacttagcggtccctcactcgaagacagcgtcggcttgtttctatccgcatttctgctcttgggactgttcaaagcactcggatgggctgccgtctacctctctacctgcaaagactctaagaagcatgccacttag

SEQ ID NO: 136020 - DNA, 1347 bp, Artificial Sequence
  derived and/or modified sequence
atgaaaagcctaagtctgttgctagccgtcgcactgggcctggcaactgcagtgagcgctgggcctgctgtcattgagtgctggttcgtcgaggacgcaagtggaaaaggactcgccaagcgccctggcgcgctcctccttcggcagggacccggggagccacctccaaggcccgacctggaccccgagctctatctgtccgtccacgaccccgcaggcgcacttcaggctgcttttcgccgctacccccgtggagctcccgccccgcattgcgaaatgagtcgcttcgtgccactccccgctagcgcaaagtgggcttctggcctcacccctgctcaaaattgtccaagggcccttgatggagcgtggcttatggtcagcatatcctccccggtgctctccctatcctccctcttaaggccacagccggagccgcagcaggaaccagtcctgataaccatggcgacagtggtactgactgtcctcacccacacaccagctcctagggtgagactcggacaggatgccctgttggacctgagcttcgcctatatgcctccaacttcagaagcagcatccagtcttgcccccggcccacccccgttcggcttggagtggcgccggcaacatctgggaaagggtcatcttctgctcgccgccacacccggattaaacgggcaaatgcccgccgcccaggagggcgccgttgccttcgcagcatgggatgacgatgagccttggggcccctggactggaaacggaacattctggttgccccgtgttcaaccatttcaagaggggacctatttagccaccatccacttaccatacttgcaggggcaagtgaccctggaactggcggtttacaagccgcctaaagtcagcctgatgcccgctactttggctcgtgcggccccaggagaggcgccacccgagctgctctgccttgtgtctcatttctatccttccgggggactcgaagtggagtgggagctcagaggcggacccggaggacgcagtcagaaagccgaagggcagcgctggcttagtgctttgaggcaccattccgacggatccgtgtcgctatccggacacttgcaacctccacccgtaacaacagagcagcatggggcccgctatgcctgtcgcatccaccatccttcccttcctgcctcaggtagatccgcggaggttactttagaagtggccggcctgagtggcccctctcttgaggacagtgtgggactgtttctgtcagccttcctcctcctgggactgtttaaagcgcttggatgggccgccgtgtatctgtcgacgtgtaaagattcaaaaaaacatgctacctag

SEQ ID NO: 136021 - DNA, 1401 bp, Artificial Sequence
  derived and/or modified sequence
atgaagagcctgagcctgctgctggccgtggccctgggcctggccacagctgtgtctgctggccctgctgtgattgagtgctggtttgtggaggatgccagcggcaagggcctggccaagaggcctggggccctgctgctgcggcagggccctggagagcccccacccaggccagacctggaccctgagctgtacctgtctgtgcatgaccctgctggggccctgcaggccgccttccgccgctaccccaggggggccccagccccccactgtgagatgagcagatttgtgcccctgcctgccagcgccaagtgggccagcggcctgaccccagcccagaactgcccccgggccctggatggagcctggctgatggtgtccatcagcagccctgtgctgagcctgagcagcctgctgcggccccagcctgagccccagcaggagcctgtgctgatcaccatggccaccgtggagatgggcttccaccacgtgggccaggccgccctggagctgctgacctctgtggtgctgactgtgctgacccacaccccagccccccgggtgcggctgggccaggatgccctgctggacctgagctttgcctacatgccacccaccagcgaggccgccagcagcctggcccctggccccccacccttcggcctggagtggaggcggcagcacctgggcaagggccacctgctgctggccgccaccccaggcctgaatggccagatgcctgctgcccaggagggcgctgtggcctttgctgcctgggatgatgatgagccctggggcccctggacaggaaatggcaccttctggctgccccgggtgcagcccttccaggagggcacctacctggccaccatccacctgccctacctgcagggccaggtgaccctggagctggccgtgtacaagccacccaaggtgtccctgatgcctgccaccctggcccgggccgcccctggagaggcccctcctgagctgctgtgcctggtgagccacttctaccccagcggcggcctggaggtggagtgggagctgcggggcggccctgggggccgcagccagaaggccgagggccagcgctggctgagcgccctgcggcaccacagtgatggctctgtgtccctgagcggccacctgcagcccccacctgtgaccacagagcagcacggggcccgctatgcctgccgcatccaccaccccagcctgcctgccagcggccgctctgctgaggtgaccctggaggtggccggcctgagcggccccagcctggaggacagcgtgggcctcttcctgagcgccttcctgctgctgggcctcttcaaggccctgggctgggccgctgtgtacctgagcacctgcaaggacagcaagaagaaggccgagtag

SEQ ID NO: 136022 - DNA, 1347 bp, Artificial Sequence
  derived and/or modified sequence
atgaagagcctgagcctgctgctggccgtggccctgggcctggccacagctgtgtctgctggccctgctgtgattgagtgctggtttgtggaggatgccagcggcaagggcctggccaagaggcctggggccctgctgctgcggcagggccctggagagcccccacccaggccagacctggaccctgagctgtacctgtctgtgcatgaccctgctggggccctgcaggccgccttccgccgctaccccaggggggccccagccccccactgtgagatgagcagatttgtgcccctgcctgccagcgccaagtgggccagcggcctgaccccagcccagaactgcccccgggccctggatggagcctggctgatggtgtccatcagcagccctgtgctgagcctgagcagcctgctgcggccccagcctgagccccagcaggagcctgtgctgatcaccatggccaccgtggtgctgactgtgctgacccacaccccagccccccgggtgcggctgggccaggatgccctgctggacctgagctttgcctacatgccacccaccagcgaggccgccagcagcctggcccctggccccccacccttcggcctggagtggaggcggcagcacctgggcaagggccacctgctgctggccgccaccccaggcctgaatggccagatgcctgctgcccaggagggcgctgtggcctttgctgcctgggatgatgatgagccctggggcccctggacaggaaatggcaccttctggctgccccgggtgcagcccttccaggagggcacctacctggccaccatccacctgccctacctgcagggccaggtgaccctggagctggccgtgtacaagccacccaaggtgtccctgatgcctgccaccctggcccgggccgcccctggagaggcccctcctgagctgctgtgcctggtgagccacttctaccccagcggcggcctggaggtggagtgggagctgcggggcggccctgggggccgcagccagaaggccgagggccagcgctggctgagcgccctgcggcaccacagtgatggctctgtgtccctgagcggccacctgcagcccccacctgtgaccacagagcagcacggggcccgctatgcctgccgcatccaccaccccagcctgcctgccagcggccgctctgctgaggtgaccctggaggtggccggcctgagcggccccagcctggaggacagcgtgggcctcttcctgagcgccttcctgctgctgggcctcttcaaggccctgggctgggccgctgtgtacctgagcacctgcaaggacagcaagaagaaggccgagtag

SEQ ID NO: 136023 - DNA, 1347 bp, Artificial Sequence
  derived and/or modified sequence
atgaagagcctgagcctgctgctggccgtggccctgggcctggccacagctgtgtctgctggccctgctgtgattgagtgctggtttgtggaggatgccagcggcaagggcctggccaagaggcctggggccctgctgctgcggcagggccctggagagcccccacccaggccagacctggaccctgagctgtacctgtctgtgcatgaccctgctggggccctgcaggccgccttccgccgctaccccaggggggccccagccccccactgtgagatgagcagatttgtgcccctgcctgccagcgccaagtgggccagcggcctgaccccagcccagaactgcccccgggccctggatggagcctggctgatggtgtccatcagcagccctgtgctgagcctgagcagcctgctgcggccccagcctgagccccagcaggagcctgtgctgatcaccatggccaccgtggtgctgactgtgctgacccacaccccagccccccgggtgcggctgggccaggatgccctgctggacctgagctttgcctacatgccacccaccagcgaggccgccagcagcctggcccctggccccccacccttcggcctggagtggaggcggcagcacctgggcaagggccacctgctgctggccgccaccccaggcctgaatggccagatgcctgctgcccaggagggcgctgtggcctttgctgcctgggatgatgatgagccctggggcccctggacaggaaatggcaccttctggctgcccaccgtgcagcccttccaggagggcacctacctggccaccatccacctgccctacctgcagggccaggtgaccctggagctggccgtgtacaagccacccaaggtgtccctgatgcctgccaccctggcccgggccgcccctggagaggcccctcctgagctgctgtgcctggtgagccacttctaccccagcggcggcctggaggtggagtgggagctgcggggcggccctgggggccgcagccagaaggccgagggccagcgctggctgagcgccctgcggcaccacagtgatggctctgtgtccctgagcggccacctgcagcccccacctgtgaccacagagcagcacggggcccgctatgcctgccgcatccaccaccccagcctgcctgccagcggccgctctgctgaggtgaccctggaggtggccggcctgagcggccccagcctggaggacagcgtgggcctcttcctgagcgccttcctgctgctgggcctcttcaaggccctgggctgggccgctgtgtacctgagcacctgcaaggacagcaagaagaaggccgagtag

SEQ ID NO: 136024 - DNA, 1401 bp, Artificial Sequence
  derived and/or modified sequence
atgaagagcctgagcctgctgctggccgtggccctgggcctggccacagctgtgtctgctggccctgctgtgattgagtgctggtttgtggaggatgccagcggcaagggcctggccaagaggcctggggccctgctgctgcggcagggccctggagagcccccacccaggccagacctggaccctgagctgtacctgtctgtgcatgaccctgctggggccctgcaggccgccttccgccgctaccccaggggggccccagccccccactgtgagatgagcagatttgtgcccctgcctgccagcgccaagtgggccagcggcctgaccccagcccagaactgcccccgggccctggatggagcctggctgatggtgtccatcagcagccctgtgctgagcctgagcagcctgctgcggccccagcctgagccccagcaggagcctgtgctgatcaccatggccaccgtggagatgggcttccaccacgtgggccaggccgccctggagctgctgacctctgtggtgctgactgtgctgacccacaccccagccccccgggtgcggctgggccaggatgccctgctggacctgagctttgcctacatgccacccaccagcgaggccgccagcagcctggcccctggccccccacccttcggcctggagtggaggcggcagcacctgggcaagggccacctgctgctggccgccaccccaggcctgaatggccagatgcctgctgcccaggagggcgctgtggcctttgctgcctgggatgatgatgagccctggggcccctggacaggaaatggcaccttctggctgcccaccgtgcagcccttccaggagggcacctacctggccaccatccacctgccctacctgcagggccaggtgaccctggagctggccgtgtacaagccacccaaggtgtccctgatgcctgccaccctggcccgggccgcccctggagaggcccctcctgagctgctgtgcctggtgagccacttctaccccagcggcggcctggaggtggagtgggagctgcggggcggccctgggggccgcagccagaaggccgagggccagcgctggctgagcgccctgcggcaccacagtgatggctctgtgtccctgagcggccacctgcagcccccacctgtgaccacagagcagcacggggcccgctatgcctgccgcatccaccaccccagcctgcctgccagcggccgctctgctgaggtgaccctggaggtggccggcctgagcggccccagcctggaggacagcgtgggcctcttcctgagcgccttcctgctgctgggcctcttcaaggccctgggctgggccgctgtgtacctgagcacctgcaaggacagcaagaagaaggccgagtag

SEQ ID NO: 136025 - DNA, 1347 bp, Artificial Sequence
  derived and/or modified sequence
atgaagagcctgagcctgctgctggccgtggccctgggcctggccacagctgtgtctgctggccctgctgtgattgagtgctggtttgtggaggatgccagcggcaagggcctggccaagaggcctggggccctgctgctgcggcagggccctggagagcccccacccaggccagacctggaccctgagctgtacctgtctgtgcatgaccctgctggggccctgcaggccgccttccgccgctaccccaggggggccccagccccccactgtgagatgagcagatttgtgcccctgcctgccagcgccaagtgggccagcggcctgaccccagcccagaactgcccccgggccctggatggagcctggctgatggtgtccatcagcagccctgtgctgagcctgagcagcctgctgcggccccagcctgagccccagcaggagcctgtgctgatcaccatggccaccgtggtgctgactgtgctgacccacaccccagccccccgggtgcggctgggccaggatgccctgctggacctgagctttgcctacatgccacccaccagcgaggccgccagcagcctggcccctggccccccacccttcggcctggagtggaggcggcagcacctgggcaagggccacctgctgctggccgccaccccaggcctgaatggccagatgcctgctgcccaggagggcgctgtggcctttgctgcctgggatgatgatgagccctggggcccctggacaggaaatggcaccttctggctgcccaccgtgcagcccttccaggagggcacctacctggccaccatccacctgccctacctgcagggccaggtgaccctggagctggccgtgtacaagccacccaaggtgtccctgatgcctgccaccctggcccgggccgcccctggagaggcccctcctgagctgctgtgcctggtgagccacttctaccccagcggcggcctggaggtggagtgggagctgcggggcggccctgggggccgcagccagaaggccgagggccagcgctggctgagcgccctgcggcaccacagtgatggctctgtgtccctgagcggccacctgcagcccccacctgtgaccacagagcagcacggggcccgctatgcctgccgcatccaccaccccagcctgcctgccagcggccgctctgctgaggtgaccctggaggtggccggcctgagcggccccagcctggaggacagcgtgggcctcttcctgagcgccttcctgctgctgggcctcttcaaggccctgggctgggccgctgtgtacctgagcacctgcaaggacagcaagaagcacgccacctag

SEQ ID NO: 136026 - DNA, 1347 bp, Artificial Sequence
  derived and/or modified sequence
atgaagagcctgagcctgctgctggccgtggccctgggcctggccacagctgtgtctgctggccctgctgtgattgagtgctggtttgtggaggatgccagcggcaagggcctggccaagaggcctggggccctgctgctgcggcagggccctggagagcccccacccaggccagacctggaccctgagctgtacctgtctgtgcatgaccctgctggggccctgcaggccgccttccgccgctaccccaggggggccccagccccccactgtgagatgagcagatttgtgcccctgcctgccagcgccaagtgggccagcggcctgaccccagcccagaactgcccccgggccctggatggagcctggctgatggtgtccatcagcagccctgtgctgagcctgagcagcctgctgcggccccagcctgagccccagcaggagcctgtgctgatcaccatggccaccgtggtgctgactgtgctgacccacaccccagccccccgggtgcggctgggccaggatgccctgctggacctgagctttgcctacatgccacccaccagcgaggccgccagcagcctggcccctggccccccacccttcggcctggagtggaggcggcagcacctgggcaagggccacctgctgctggccgccaccccaggcctgaatggccagatgcctgctgcccaggagggcgctgtggcctttgctgcctgggatgatgatgagccctggggcccctggacaggaaatggcaccttctggctgccccgggtgcagcccttccaggagggcacctacctggccaccatccacctgccctacctgcagggccaggtgaccctggagctggccgtgtacaagccacccaaggtgtccctgatgcctgccaccctggcccgggccgcccctggagaggcccctcctgagctgctgtgcctggtgagccacttctaccccagcggcggcctggaggtggagtgggagctgcggggcggccctgggggccgcagccagaaggccgagggccagcgctggctgagcgccctgcggcaccacagtgatggctctgtgtccctgagcggccacctgcagcccccacctgtgaccacagagcagcacggggcccgctatgcctgccgcatccaccaccccagcctgcctgccagcggccgctctgctgaggtgaccctggaggtggccggcctgagcggccccagcctggaggacagcgtgggcctcttcctgagcgccttcctgctgctgggcctcttcaaggccctgggctgggccgctgtgtacctgagcacctgcaaggacagcaagaagcacgccacctag

SEQ ID NO: 136027 - DNA, 1401 bp, Artificial Sequence
  derived and/or modified sequence
atgaagagcctgagcctgctgctggccgtggccctgggcctggccacggcggtgagcgccggacctgccgtgatcgaatgttggtttgtggaggacgcaagcgggaaaggactcgcaaagaggccgggggccctgctcctgcgccaggggccgggcgaaccaccaccaagacccgatctggaccctgagctttatctttctgtacacgaccctgcaggcgcactgcaggccgcttttagacggtaccctagaggagccccagccccgcactgcgaaatgtcgagattcgtcccactgccagcttcagccaagtgggcgagtgggctcacacccgcccaaaattgcccgcgtgccctggatggggcctggctgatggtgagcattagtagtcccgttttatctctgtcctctttgctccgcccgcaacctgagccccaacaggagcccgtgttaatcaccatggcaaccgtggagatgggattccaccacgttgggcaggccgcgttggagcttcttactagcgttgtgctgactgtcctaacccacacgcccgctccaagggtccgcctgggacaggatgccctgcttgatctgagctttgcgtacatgccgcccacttcagaagcagcaagctcactggcccccgggcctcctcctttcggactggaatggagaagacagcacctggggaaggggcacctgcttctggccgctacacctgggcttaatggacagatgcccgccgcacaagagggggccgtcgccttcgcggcatgggatgacgacgagccctggggcccctggactggaaacggcactttttggctgcctcgagttcagccctttcaggaaggaacctacctggcaacgatccaccttccttacctccagggccaggtgactttggagctggccgtctacaagccacccaaagtctctttaatgcccgccacactagccagggccgcccctggggaagcaccacccgaactattgtgtctggtcagtcacttctacccaagcggcggtcttgaggtggaatgggaactcaggggggggccgggaggtagaagccagaaagccgaaggacaacggtggctgagcgctcttcgccaccatagcgatgggtccgtctccctgtccggccatctgcagcctccgcccgtgacaactgaacagcatggagcccgctatgcctgcagaatccatcatccctctctgcctgccagtggaaggtcagcagaagtgacgcttgaagtcgccggcctttctgggccttcgttggaagattccgtgggcttgttccttagcgcctttctgcttctggggctgttcaaggctctgggatgggctgcagtgtacctttccacatgcaaggattctaagaaaaaagccgaatag

SEQ ID NO: 136028 - DNA, 1347 bp, Artificial Sequence
  derived and/or modified sequence
atgaagagcctgagcctgctgctggccgtggccctgggcctggccacagctgtctctgccggaccagccgtgatcgagtgctggtttgtggaggatgccagtggaaaagggctggcgaagaggcctggggccctcctgctgcgtcagggcccgggtgagccccctccccgacctgatctggatccagaattgtacctctcagtgcacgaccccgcaggtgctctgcaggctgccttccgccgataccctcgcggagcaccagctccacattgcgagatgtcaaggtttgttcccctgcctgcctcagccaaatgggcatccggccttacaccagcgcaaaactgtcctagggctctcgacggcgcgtggttaatggtgagcatcagctcaccagttctctctctcagctcactgctgcgcccacagcccgagcctcaacaagaacctgtgctgattaccatggccaccgtagtactcaccgtgctgacccacacccccgccccccgcgtgcgattgggacaggacgccttactggatttaagctttgcctatatgcctccgacctctgaggctgcttcttcattggctcccggaccacctcccttcgggctcgagtggcgccgacagcatctcggcaagggtcacctccttctggccgccacacccggactcaacggtcagatgccagccgcccaggagggtgcagtggcctttgccgcatgggacgacgatgagccttggggtccgtggacaggcaatggaacattttggctgcctcgggtgcagcccttccaggagggtacgtatcttgctaccatccacctgccatatctacaggggcaggtgacgctggagctagcggtttataagcccccgaaggtgtctctcatgcctgctacactggcccgtgccgcgcctggggaagcccctcccgaattgctgtgtcttgtatcccatttctaccctagtggaggtctcgaagtggagtgggaactgcgaggaggtcccggaggccgcagtcagaaagcggaaggccaacgctggctcagcgctctcagacaccactccgacggttccgtctctttgagcgggcacttgcaacccccgccagtgacaacggaacagcatggcgccagatatgcgtgcaggattcaccatccgagtctgccggcctccggtcgcagcgctgaggtgacactggaagtagcaggcctctcgggcccaagtctcgaagactcagtcgggttgttcctatccgcttttctgctactggggctgtttaaggccttaggatgggctgcggtatatctcagtacctgtaaggactcaaaaaaaaaggcagagtag

SEQ ID NO: 136029 - DNA, 1347 bp, Artificial Sequence
  derived and/or modified sequence
atgaagagcctgagcctgctgctggccgtggccctgggcctggccacagcagtctccgctggccctgccgtaatagagtgttggttcgtggaagacgcatccggtaagggattagcaaaacgaccaggggcactcttgctgagacagggtccaggtgagcctcctccaagacctgacctggatcctgagctgtatctgagcgtgcatgacccagctggcgctctgcaggccgcatttagaaggtatcccagaggagcaccagcaccccattgtgaaatgtctcgctttgtgccactgcctgctagtgcaaagtgggcctctgggctgactcctgcccagaactgtccccgagccctagatggagcctggctgatggtttccatcagctctccagtcttgtctttgtcctcgcttctgaggcctcaaccggaaccacagcaggagcccgtcctgattacaatggcaaccgtggtgttgacagtgttgacacacacccctgctcctcgcgttcgactgggacaggacgctcttctcgatctgagttttgcctatatgccaccgacatcagaagctgctagctcactcgccccaggtccccccccattcgggctggaatggagaaggcagcaccttggaaagggccatctcctgcttgcagctactccaggattgaacggccagatgccagcggcgcaagagggggccgtggctttcgccgcgtgggacgacgacgaaccctggggaccatggactggaaacgggacattttggttgcccaccgtgcagccattccaagaagggacgtatttggctacaatacatctgccatatctgcagggacaagtaacacttgagctggccgtatacaagccaccgaaggtgtccttgatgcccgccacattggccagagccgctccaggagaagcaccgccagagctgctgtgtttggtgtcacacttctatccctctgggggactcgaggtggagtgggagctccgaggagggccaggaggccgaagccaaaaggctgaggggcagaggtggctcagtgccctaagacaccactctgacggtagcgtgagtctgtcgggccaccttcagcccccccctgtcacaacagagcagcacggagcacgttatgcctgccgcattcaccatccttccctacctgccagcgggcgcagtgccgaggtgacgctcgaggtggccggactttctggcccatccctggaagacagtgtgggcctgtttctgagtgctttccttcttttagggcttttcaaagccctgggatgggcagcagtgtacttatcgacctgcaaggattcaaagaagaaagccgaatag

SEQ ID NO: 136030 - DNA, 1401 bp, Artificial Sequence
  derived and/or modified sequence
atgaagagcctgagcctgctgctggccgtggccctgggcctggccaccgctgtgtccgctggtcccgccgtaatcgaatgctggttcgtggaagacgcctccgggaagggccttgcaaagaggccaggagcattattgctgaggcaaggaccaggagagcctcctccaaggcctgacttggacccagaactttacctctctgtccacgaccccgcaggagcattgcaggctgcttttagaaggtacccacgcggggctccggctccacactgtgaaatgtctaggtttgtccccctccccgcatctgccaaatgggccagtgggctgaccccagcacagaactgtccccgcgccctggacggggcctggcttatggtatctatttcctctcccgttctgagcctctcaagtctgcttaggccccagccggagccacagcaggaaccagtcttgattacaatggccaccgttgaaatggggttccatcacgtgggccaggctgcccttgaactgctgacgagcgtagttctgactgttcttactcacacaccagcgcccagggtgaggctgggccaggacgccctcctggacctgagttttgcctatatgccccccacctccgaagccgcctcttccctagctcccggaccccccccattcggtctggaatggcgcagacagcacctgggaaaaggacacttgctgcttgctgccactccaggtttaaatggtcagatgccagctgcccaggagggagccgtagcttttgccgcttgggacgatgatgaaccttggggaccttggactgggaatggaactttctggttgccaaccgttcaaccatttcaggagggcacctacctggcaactattcacctcccatacctccagggtcaggtcaccctcgagcttgcagtctacaaacctcccaaggtgagccttatgcccgccactctggcaagggccgcccccggggaggccccaccggagctattgtgtctggtcagccatttttacccctcaggagggctggaggtggagtgggaactgaggggtggccctggtggacggtctcagaaggcagaagggcagcgctggctatccgctctgcgccatcacagcgacggatcagtgtcactgagcgggcacctgcagccccctccagtgacaaccgagcagcacggggcccgttacgcctgtcgcatacatcacccaagcctacctgctagcggacggtccgctgaggtaacacttgaagttgccggcttgtctggccccagcctggaggattccgtggggctgtttctcagcgccttcctcttactgggtctgtttaaggcgctcggctgggcagcagtttatctgtcgacttgtaaggatagcaagaagaaggccgaatag

SEQ ID NO: 136031 - DNA, 1347 bp, Artificial Sequence
  derived and/or modified sequence
atgaagagcctgagcctgctgctggccgtggccctgggcctggccacagctgtgtctgccggacccgcggtgatcgaatgttggtttgtagaagatgcgtctgggaagggcttggccaaacgccccggcgcactgttgctgcgtcagggacctggagagcccccccccaggcctgaccttgacccagagctgtatctctctgtacacgatcctgcaggagccctacaggccgctttccggaggtaccctagaggcgcgcctgccccccattgtgagatgagtcgctttgttccactgcccgcctcagcgaagtgggcatccggtttgacgcctgctcaaaactgtcctagagctctggacggtgcctggctaatggtttccatttctagccctgtcctttcattgtcctccctcttgcgcccccagccagagccacagcaggagcccgtgctgatcacaatggcaactgtggttctgaccgtcctcacacacacccccgctccccgggtccgtctcggccaggacgccctgctggacctgtcattcgcttacatgcccccaacctctgaggctgcctcctctctggcccctggcccaccaccgttcgggttagaatggcgacgccagcacctcggcaaaggccacttgctgttggcggccacccctggactgaacggccagatgccagccgcacaagagggagccgtggcttttgccgcatgggatgatgatgaaccatgggggccatggaccgggaacggaacattttggctgcctcgagtgcaaccgttccaagagggcacttatcttgccacaatacacctcccctacttgcaggggcaggtgacgctggagctggcagtatacaaacctccgaaagtttctttgatgcctgcaacactggctagggctgccccaggagaagcgccccctgagctcctgtgcctggtgtctcatttctatccaagcggtggtctggaagtggagtgggagctgagaggcggcccaggtggccgcagccagaaagcagaaggccagcggtggctgagtgcattaagacatcacagtgacggctcagtttctctgagcgggcatctccagcctccccccgtcacaactgagcagcatggggctcgatatgcttgccgtatacaccacccctctcttcctgccagcggtaggtctgctgaagtgaccttagaggttgccggattgagcgggccttcactggaggactctgtggggcttttcctgtccgcattcttgctcctgggccttttcaaggctttggggtgggcagctgtttacctctctacctgtaaggatagtaaaaaaaaagccgaatag

SEQ ID NO: 136032 - DNA, 1401 bp, Artificial Sequence
  derived and/or modified sequence
atgaagagcctgagcctgctgctggccgtggccctgggcctggccaccgcagtgagcgccggccccgctgtgatcgaatgttggttcgtggaggacgcaagtggtaaaggacttgccaaaagaccaggagcgttgctgctgcgccaggggcctggcgagcctcccccccggcccgatctcgaccccgagttatacctgtccgttcacgaccccgccggagccctgcaagccgcgttcaggcgctatccccgcggcgcaccagctccccactgtgaaatgagcaggtttgttccgctcccggccagcgctaagtgggcctccggactgactccagctcaaaattgcccccgggcacttgatggagcatggttgatggtttcaatatcatcccccgtcctgagcctgagctcactcttgagaccacaacccgagccgcagcaggaacctgtgttgataacaatggcaactgtggaaatgggattccaccatgttggacaggcagcactggaactgcttacctctgttgttttgacggttctcacccacacgccagctcccagggtacggctgggccaggatgcgctgttggatctgtcattcgcgtatatgcctccgacctccgaagcagcttccagcctcgcccctggcccacctccattcgggctggaatggcgtagacagcatctgggtaagggtcaccttttactcgcggctacgcctgggttgaatggccaaatgcccgccgcacaggagggcgccgtcgccttcgcagcatgggacgacgatgagccatggggtccttggaccggaaacgggaccttctggctgcctcgcgtgcaacccttccaggagggtacataccttgccactatccacttaccatacctgcaggggcaggtgaccctggaactcgctgtatacaagcctcctaaggtgtctctgatgcctgcaaccctggcgcgcgccgctccaggagaggccccacctgaactgttgtgcctggtttcacatttttaccctagcgggggacttgaggtggaatgggaactacggggagggcccggaggcagatcccagaaggccgaagggcagcgctggctgtccgctttgagacaccatagcgatggctccgtgtccctgtcaggtcacctccaaccccctcctgtaactactgaacagcacggtgcccgctacgcatgtagaatacaccatccatccctgccggcttccggtcgctctgcggaagtgactctagaggtggccggcctgtccggaccgtccctggaagatagcgtgggcctattcctttcagcctttttattgctggggctgtttaaggctctgggatgggccgccgtgtacctctctacctgcaaggactccaagaagaaggctgaatag

SEQ ID NO: 136033 - DNA, 1347 bp, Artificial Sequence
  derived and/or modified sequence
atgaagagcctgagcctgctgctggccgtggccctgggcctggccacagccgtaagcgcaggtccggcagttattgaatgctggttcgtagaggatgcatccgggaagggcctggccaaacggccaggcgcacttctccttagacagggccccggtgagcctccaccaaggcccgacctggacccagaactgtacctgagcgttcacgatccagccggcgctctgcaggccgccttcagacggtatcctagaggagccccagctccccactgcgagatgtctcggttcgtaccactcccggctagcgctaagtgggctagcggcctgacccccgcgcaaaattgtcctagggccctggacggggcctggttaatggtgagtatctctagccccgtcctgtctctctcttctctcttgcgacctcagccagagcctcagcaggaacccgtgctcatcacaatggcgactgtcgtactgaccgtactgacacacaccccggccccccgggtgagacttggccaggatgctctcttggatctgtctttcgcttacatgcccccgacaagcgaagctgcgtcctcgctcgcgcccggcccacctccctttggtctcgagtggagacggcagcatctcggtaaggggcatcttctgctggctgcaacaccgggactcaacgggcagatgcccgctgcacaagaaggcgcagtcgctttcgccgcctgggatgatgacgaaccctggggcccctggacaggaaatgggacattttggcttcctagagtgcaaccctttcaagagggcacctacctcgccacaattcatttaccttatttgcaaggccaagttacattggagttagccgtatataaacctccgaaagtgtctctgatgccagcaacccttgcccgcgctgccccgggcgaggctcctccagagttactttgcctggtgtcccatttctatccttcaggcgggctcgaggtggagtgggagcttcgtggaggacccggcggccggtctcagaaggctgagggtcagagatggcttagcgccctgcgtcaccatagtgatggctctgtcagtttgagcggacatttacaacctccacccgtaactactgagcagcacggggccaggtatgcttgtcgcatccatcaccctagcttacccgcctctgggagatcagcagaagtgaccttggaagtagcggggctttccgggccgtcactggaggattctgtcgggctgtttttgagtgccttcttgctgctcggcctctttaaagccctgggatgggctgcagtctatttgtcaacttgtaaagattccaaaaagaaagcagagtag

SEQ ID NO: 136034 - DNA, 1347 bp, Artificial Sequence
  derived and/or modified sequence
atgaagagcctgagcctgctgctggccgtggccctgggcctggccactgctgtatccgccggaccagccgtcatcgaatgctggttcgtggaggacgctagcggcaaaggcctcgctaaacgaccaggagccctgctgctcagacagggacccggcgagccaccacctcgccccgatctggaccctgagttatacttatccgtgcacgatcccgcaggggcactgcaagcagctttccggcggtaccctcgaggagcacctgccccccactgtgagatgagccgattcgtgccactgcccgcctccgctaaatgggcatctggattgactccagcgcagaattgcccacgagctctggacggcgcttggctgatggtgtcaattagctctcccgtcttgtccctcagcagtctgctgcggccacaaccagagccccagcaggaacccgtgctcatcacaatggccaccgtcgttcttaccgtcttgacgcacacgccagcccctagggtcagactaggacaagacgcattgctggacctgagtttcgcctacatgccacccacttcagaagctgcttcttcactagctcctgggccaccgcctttcggtctggaatggagaaggcagcacttagggaaaggccatcttctgttggctgctacgccgggccttaacggccaaatgcccgcggcgcaagagggagccgtcgcattcgcagcttgggatgacgatgagccatgggggccttggaccggaaatggcactttttggctccctacagtgcaaccttttcaggaaggtacataccttgctacaattcacctgccctatctccagggacaggtgaccctcgagctggctgtttataaacctcccaaggtttccctaatgcctgcaactttagctagggcggccccaggggaggctccacccgagttgctctgtcttgtatcacatttttatccatcgggaggactcgaggttgaatgggaattgcggggcggtccaggaggcagatcccaaaaagctgaaggccaaaggtggttgagtgctctgagacaccattccgatggctcggtctcactaagcggccatttgcagccaccgcctgtgacaactgagcaacacggagctcgttacgcctgccgcatccaccaccctagtttgcccgcgagcggtcggtccgccgaggtgactctcgaagtggctggcctgagtggacccagcctggaagattccgtaggactgttcctcagtgcattcctgctgctaggacttttcaaagccctaggctgggcagctgtgtatctgtctacttgcaaggactccaagaaaaaagccgaatag

SEQ ID NO: 136035 - DNA, 1401 bp, Artificial Sequence
  derived and/or modified sequence
atgaagagcctgagcctgctgctggccgtggccctgggcctggccactgccgtgtcagccggaccagctgtaatcgagtgctggtttgtggaggacgcttcaggaaagggcctcgctaaacggcctggtgcactgctgctgcggcaggggcctggagaaccccctcccaggccggacctcgacccagaactgtatctatctgtccacgatcccgccggggcgttgcaggccgcgttcaggcgctaccccaggggcgcgccagctccacactgcgagatgtctcggttcgtgcctctccccgccagcgcgaagtgggcctcaggtcttacacctgcccagaattgccctcgggcccttgatggcgcctggctcatggtgagtatctcaagtcctgtcttgagtctttcttccctgctgagaccacaacccgagccgcagcaggaacctgtactgattacaatggctacggtcgagatgggcttccaccacgtgggtcaggctgcgttggaactcttaacctccgtcgtgctcaccgtgttaacgcatacaccagcccctcgagttcggctcgggcaggatgccctgcttgacctgtcattcgcgtatatgccacctacctctgaggcggcatccagcttggcgcctggacctccaccgtttggcctggagtggcggagacagcatttaggaaagggacacctgctcttggctgcgacccctggccttaacggacagatgcctgcagcccaagagggtgccgtcgcatttgccgcatgggacgacgacgagccttgggggccatggaccggcaacgggactttttggctgccgagagttcaacccttccaggagggcacatacctggctacaattcacctgccttatcttcagggacaggtcactctagaactggcggtgtacaagccccccaaggtgtccttaatgccagctacattggctcgggctgcccccggcgaagcgcctcccgagcttctgtgcctggtcagtcacttctacccttcaggcggtcttgaggtagaatgggagctgagaggtggaccaggagggagatcccaaaaggcagaggggcagcgctggctgagcgccttaagacaccactctgatgggtccgtctccctgtccggacacctgcagccaccacccgttaccacggagcaacacggcgccagatacgcttgccggatccaccacccaagcctgccagcatccggccgtagtgccgaggttactctcgaggtcgcggggctatctggaccaagcctggaggattctgtcgggctctttctctccgccttcctcctgctgggactcttcaaggccctcggctgggccgccgtgtacctgagcacttgtaaggatagtaaaaagaaggccgaatag

SEQ ID NO: 136036 - DNA, 1347 bp, Artificial Sequence
  derived and/or modified sequence
atgaagagcctgagcctgctgctggccgtggccctgggcctggccactgcagtgagcgccggtcctgccgtaattgaatgttggtttgtggaagacgcaagtgggaagggcctggccaaaaggccaggagccctgctcctgcggcaggggcctggcgagcctcccccaaggcctgatttggaccctgagctgtatctgagcgtccacgaccccgccggcgctttacaggcagccttcagaagataccccagaggcgctcccgcaccccattgtgaaatgtctcggtttgtacctctgccggcttcagctaaatgggcaagcggtcttacaccggcgcagaattgtccccgggccttagatggcgcatggttgatggtttctatatcctccccagttttgtccctctcatccctgctgagaccccagccagagccgcagcaagagccagttctgatcactatggccactgtggttcttaccgtgctaacacatactccagcacctcgggtgcgcctgggccaggatgctcttctggatctgtcctttgcatacatgccacctacgagcgaagctgctagtagcctggcccccggcccacctccctttggcctggaatggagaagacaacacctgggcaaagggcatctcctgctggcggccactccagggctgaatggacagatgcccgcggcccaggagggcgcagtcgcctttgctgcttgggatgacgacgagccttggggtccctggacaggcaatggaacattctggcttcccaccgtccagccgttccaggaaggaacatacctggcaacaattcacctaccctacctccaaggtcaggtcacattggagctggcggtctataagcccccaaaagtgagcctcatgcccgccacgttggcacgggccgcccccggcgaggctccacccgagctgctgtgcttagtaagccacttctatcctagtgggggacttgaggtggagtgggagttaagaggcggaccggggggccgatcccagaaagccgaaggtcaacgctggctgagtgcgctgagacaccatagcgacggctctgtttcactcagtggccatctgcagccccctccagtaacaaccgaacagcacggggccaggtatgcttgcagaatccaccacccatctctgcccgcctccggacgctctgcagaggtcacgcttgaggtggctgggctttccggcccttccctcgaggattccgttggactgttcctgtccgcttttttactactgggcttgttcaaagcacttggttgggccgctgtttacctgagtacttgtaaggattctaaaaaacatgcgacctag

SEQ ID NO: 136037 - DNA, 1401 bp, Artificial Sequence
  derived and/or modified sequence
atgaagagcctgagcctgctgctggccgtggccctgggcctggccactgcggtgtctgccggaccagccgttatagaatgctggtttgtagaagacgcttcagggaagggccttgcaaagcgtcccggggccctcctgcttcgccagggtccaggagagccgcccccccgacccgacttggaccctgaactctatctttcagtccatgatcccgctggggctcttcaggctgcttttagaaggtatcctcggggggcgccggcgccacattgtgagatgtcaaggttcgtgccgcttcccgcaagcgctaaatgggcgtccgggttaacgcccgcccagaactgtccacgcgctttggatggtgcttggctgatggtgtccatatcttcgccagtactctctctgtcctctcttctacggcctcaacctgaaccgcaacaggagccagttcttatcaccatggccaccgtggaaatgggtttccatcatgtaggccaggccgctcttgagctgctgactagcgtggtcctgactgtgttgacgcacacaccagcaccacgggtgagactggggcaggacgccttgctggacctgtcatttgcatacatgcctcccacctctgaagccgccagcagcttggcccctggaccgcccccttttggactggaatggaggaggcagcacctgggtaaggggcatctgcttctggccgccacccccggtctgaacggtcagatgccagccgcccaggagggcgctgtggcctttgcagcctgggatgacgatgagccttggggcccgtggaccggaaatggaactttttggctacctacagtgcagccctttcaggagggaacctacctggcaaccatccacctcccttacctgcaaggtcaagttaccttagaattggctgtgtacaagccccctaaggtctcactgatgcccgccacccttgcacgcgccgcgccgggtgaagcaccccccgaattactgtgtctcgtcagccacttctatccctcaggcgggctggaagtcgagtgggagctcagaggcggacctggaggacgctcacagaaagctgaagggcagcgatggctctccgccttgaggcatcactctgacggcagcgtgtccttaagtggtcacctccaacctcctcctgtaacgacggagcaacacggagcccggtatgcttgccgaatccaccatccttctctgccagcctcagggcggagcgccgaggtcacgctggaggttgcaggcttatcaggccctagtttggaggacagtgtgggactgtttctgagtgcgttcctcctgctgggcctttttaaagcccttgggtgggcggcagtgtacttgagcacatgcaaagattccaagaagaaggccgagtag

SEQ ID NO: 136038 - DNA, 1347 bp, Artificial Sequence
  derived and/or modified sequence
atgaagagcctgagcctgctgctggccgtggccctgggcctggccaccgcggtgagcgctggtcccgcagtgatcgaatgttggttcgtcgaagatgcctctggcaagggtctagccaaacgaccaggcgcgcttctcttgaggcagggcccgggtgagcccccgcccaggcctgacctggatcccgagctgtatctgtccgtgcacgaccctgccggggccctgcaggcagccttcaggcggtatcccagaggggctcccgcaccccactgtgaaatgtcacgcttcgtcccacttcccgcctccgctaaatgggccagcgggctgactcccgcgcagaactgcccacgggcacttgacggagcctggctgatggtctcaatcagctcaccagtgctgtcactctcttcgctcttgcggccacagcccgagccccagcaggaacctgtgctcattacgatggccacagtcgtgctcaccgtcttgacacacacccctgcaccaagggtccgcctaggacaggacgcactgctggacctgtctttcgcttacatgccaccaacctcggaagccgcctcatcattggcacctggacccccgcccttcggattagagtggaggaggcagcacttaggtaaggggcatcttttacttgctgccactccagggctgaatggccagatgcctgctgcccaggagggggcagttgcttttgcagcttgggacgacgacgagccttggggcccttggactggaaatggaactttctggctaccaactgtccagccgtttcaagagggtacgtatctggctactattcatctgccatacctgcaaggccaggtgaccctcgagctcgcagtgtacaagccacccaaggttagtctgatgcccgcgacattggctcgcgccgcccccggtgaggcacctcccgaattactatgtctcgtgtctcatttttatccctcaggcggcctggaggttgagtgggagttgagaggaggcccgggagggcgctctcaaaaagccgaaggccagcggtggctaagtgcactgagacatcacagcgacggttccgtgtcattatcaggacacctgcaaccccctccagtgacaactgagcagcatggagcccgctacgcgtgcagaatccaccatcccagcctgcccgcatccggacggagtgcagaagttaccctcgaggtggcaggcttaagtggcccttccttagaggactcagtcgggctgtttctctcagctttcctgctgctgggcctctttaaggccttggggtgggccgctgtgtacctaagtacttgcaaggattcaaaaaaacacgccacctag

SEQ ID NO: 136039 - DNA, 1347 bp, Artificial Sequence
  derived and/or modified sequence
atgaagagcctgagcctgctgctggccgtggccctgggcctggccacggctgtgtccgctgggccagccgtaattgaatgctggtttgtggaagatgcgtctgggaagggccttgcaaagcgtcccggggctctcctgctgcgtcagggaccaggcgagcctcctccgagacctgatctcgatcctgagctgtacctgagcgtgcacgacccagctggtgccttacaagccgcattcaggaggtacccaaggggagcaccggccccccattgtgagatgagcagattcgtccctcttccagcatccgcaaagtgggcctcgggactcacaccggcccagaattgtccccgggctctggatggcgcttggttgatggtgtctatttcctctcccgttttatcactgagcagcttactcagaccgcaaccggagccgcaacaggagcctgtgctgatcactatggcaactgtggtactcaccgtgctcacacatacgcctgcaccacgcgtgaggttgggccaagacgcactgctcgacctctccttcgcatatatgcccccgacgagcgaagcagcttcctctttagctcctggacctccccctttcgggctcgagtggcgcagacaacacctagggaaagggcacctgctcctggcagcgacacctgggcttaacgggcagatgcccgcagctcaggaaggagccgtggccttcgcagcatgggatgacgatgaaccttggggtccctggacaggtaacggtactttctggctgcctcgggtccagccgttccaggaaggaacatatctggccactatacatctgccatatctgcagggtcaggtgactcttgaactggccgtttataagcctccaaaagtgtcgttaatgccagctaccctggcgcgcgctgcccctggtgaagccccacccgaacttctgtgcttggttagccacttttatccctccggcggactcgaggtcgagtgggaattaaggggcggccctggcggaagatctcagaaggctgagggacagcggtggctgtctgcactgcgccatcacagcgacggatctgtctccctctccgggcatcttcagccgccccctgtcaccacagagcagcacggggcgaggtacgcttgcagaattcatcacccatccctaccggccagtggacgctcagctgaagtaacccttgaggtcgctggtctctccggaccatcactcgaagactccgtcggcctctttttaagcgcattcttattactgggactctttaaggcccttggctgggccgctgtgtatctcagcacctgtaaagactccaagaagcatgccacatag

SEQ ID NO: 136040 - DNA, 1347 bp, Artificial Sequence
  derived and/or modified sequence
atgaagagcctgagcctgctgctggccgtggccctgggcctggccacagctgtctccgctggccccgcagtcatcgaatgttggttcgttgaggatgcttctggcaaaggtcttgctaagcgaccaggagccctgcttctccgtcagggacccggcgaaccgcctccgagaccagacctggacccagagctttacttgtctgtacatgaccctgctggtgccctacaagccgctttccggcgctatccgcggggggcacccgcccctcactgtgagatgtctcgatttgtgcctctgcctgcctctgcaaagtgggcctccgggttaacacctgcgcagaactgtccacgagctctcgacggcgcttggctgatggtatcaatctccagccccgtgctcagtctgagttcccttctgcgaccacagcctgagccccagcaggagcccgtcctaatcactatggcaacagtggtcctgaccgtcttgacacatacaccagcaccccgcgtgcgtttgggacaagacgccttactggacctctcttttgcatacatgcctcctaccagtgaggcagcgtcttcgctagcaccaggaccaccgccattcggcctcgaatggcggaggcaacaccttggtaaagggcatctcttgcttgctgccaccccgggtctgaatggccagatgcccgccgcgcaggaaggcgctgtggccttcgcagcctgggacgacgatgagccttggggtccctggactggaaacggtactttctggctcccgagggtccagccatttcaggagggtacctacctggctacaatccatctgccttacttacagggccaggtaacacttgaacttgctgtgtacaagccacccaaagtatctcttatgcctgcaactctggcacgcgccgctcccggggaagcacccccagagctcttgtgtttggtgtcacacttctacccctccggcggccttgaggtagagtgggaactgaggggtggacctggagggaggtcccagaaggccgagggacagcgatggctatctgcattgcgtcatcacagtgacgggtctgttagcctgagcggccatctccagccaccccccgtgacgactgagcagcacggggcccgctacgcctgcaggatccaccatccctcgttacccgcaagtggaagaagcgccgaggtgacactggaagtggcagggttgagtgggcctagcttggaagattcagtgggcctgtttctatccgcgttcctgctcctgggtctctttaaggctctaggatgggccgccgtctacctgtcaacctgcaaggactctaagaagcatgctacttag

SEQ ID NO: 136041 - DNA, 1347 bp, Artificial Sequence
  derived and/or modified sequence
atgaagagcctgagcctgctgctggccgtggccctgggcctggccacagccgtaagtgcgggtcccgcagttattgaatgctggttcgtcgaggacgcttctggcaaaggattggccaaacggccaggcgccctcctgctacgccaaggcccaggggagccacctccgcggcccgacctggacccggagctgtatctgtctgtgcatgaccccgctggcgctctgcaagccgcattccggcggtacccccgaggagcaccagccccacactgtgaaatgtctagattcgtgccattacctgcctccgctaagtgggcaagtgggttaacacctgcgcaaaactgcccccgcgccctggacggcgcttggctgatggtgagcatcagctcacccgtgctctctctctcgtcacttcttaggccacagccggagccacagcaggagccagtgctcattacgatggcaaccgtggtgttgaccgttctcactcacacacccgctccaagagttaggctaggccaggacgctctgctggacctgtcatttgcctacatgcctcccacctccgaagccgccagctcactggctccaggacccccccctttcggcttagaatggcgaagacagcacttaggtaaggggcacctgctgcttgcggcaacccccggactgaatggccaaatgccagctgctcaggagggtgccgttgccttcgccgcatgggatgatgacgagccctggggcccttggacgggaaacggcactttttggctgcctcgggtacagccgttccaagaagggacctacctcgccaccattcaccttccgtatctgcagggacaggtgactctcgaactggccgtctacaagcctcctaaagtgtccttgatgccagccactcttgcccgggccgcaccgggtgaggctcctcctgagctcctgtgcctggtgagccacttctacccttcgggcggactcgaagttgagtgggagctcaggggcggtcccggagggaggagccagaaggccgaaggccagcgatggttgtcagcactccgacaccatagtgatgggagcgtgtccttgtccggccatctccagcccccaccagtaacaactgaacagcacggcgcacggtacgcatgcagaattcatcacccgtcacttcccgcttctggtcgaagcgctgaggtgacactggaagtggctggtttgagcgggccatccctggaggacagcgtcggtcttttcctatctgcatttcttctgctcggcttgttcaaagctttgggatgggccgccgtctacctgtcgacttgcaaagattccaagaagcacgccacctag

SEQ ID NO: 136042 - DNA, 1401 bp, Artificial Sequence
  derived and/or modified sequence
atgaagtcactcagtctgcttctggcagtcgcgcttggactcgcaaccgccgtttcagcaggcccagctgtgattgaatgctggtttgtggaagatgcctctgggaagggtctggccaagagaccaggcgcactgctgctgcgccagggcccaggggagcccccacctcggccagatctggaccctgaactatatctgagtgtacacgatccagcgggtgccctccaggccgcattccggagatatcctcggggtgcccctgcccctcattgcgagatgagccggttcgttccactccctgcgtccgcgaaatgggcatcgggactgacccccgctcagaattgccccagagctttggacggtgcctggttaatggttagcatcagtagcccagtcctgagtttatcttcccttttgagaccacagcctgaaccgcagcaggagcccgtattaatcactatggccaccgtggaaatgggctttcatcatgtgggtcaggccgcattagagcttttgacaagcgtggtgctcaccgtgctcacgcacacaccagcgcctagggtaagactgggccaggacgctctgctcgacttaagcttcgcctatatgccacccacttcagaggcggctagctcgttggcacccggtccacctcccttcggtctcgaatggcggaggcagcatctgggaaaaggccatttgcttctcgctgcaaccccaggattgaacggacagatgcctgccgcacaagagggagccgtggctttcgcagcctgggacgatgacgagccatggggaccctggactgggaatggaactttttggctgcccagagtccaaccatttcaggagggcacctatctggccactatccacttgccatacctccaaggccaggtcaccctggaattagcagtatataagcctccgaaagtttccctcatgcctgctacactcgcacgtgccgctcctggtgaggcaccccctgagcttctctgcttagtgtcgcacttttatccatccgggggactcgaggtagagtgggagctgaggggaggacccggtggaagatcccaaaaggctgaaggtcagagatggctgtctgccctgcgccatcacagcgacggctcagtcagcctgtctggtcacctccagccacccccagtgactacagagcagcatggcgctagatacgcctgtcggatacaccatccaagcctgcccgctagtggcaggtctgcggaagtgacccttgaagtggccggacttagcggtcccagtcttgaagattctgtcggactgtttctaagcgcctttctgcttctgggcttatttaaggcgctgggctgggctgcagtatatctgagcacgtgcaaggattctaagaagaaggcagaatag

SEQ ID NO: 136043 - DNA, 1347 bp, Artificial Sequence
  derived and/or modified sequence
atgaaaagcctgtctttgctattggccgtggcattaggcctggcaaccgccgtgtcggctgggcctgccgtcattgaatgctggttcgttgaggacgccagcggcaaaggtctggcaaaaagacccggagccttgctgcttagacaaggaccaggggaacccccacccaggccagaccttgaccccgagctatacttgtctgtgcatgaccccgcaggggcactgcaggctgctttcaggaggtaccccaggggagcaccagcccctcattgcgagatgtcaagattcgtcccactccctgcctccgcaaagtgggcctctggcctgacgccagcccaaaactgcccacgggctctggatggcgcatggctcatggtgtctatctcttcaccggttctcagcctgagctccctcttaaggccacagccagagccacagcaagaaccagtgctgatcactatggccactgtcgtcctgaccgtgctgacccacactccggctcctagagtgaggctagggcaggatgctctgctggatctatcctttgcctacatgccacccacatccgaagcagcctctagtctggccccaggtccaccaccattcggcctagagtggaggagacaacacctgggaaaaggacatctattgcttgctgcaaccccaggcctgaacggtcagatgcctgccgcacaggaaggtgcagtagcctttgctgcctgggacgacgatgaaccatgggggccatggactgggaacgggaccttctggttgcctagggtgcagccctttcaggaggggacatacctggcaaccatccatttgccctaccttcagggacaggtcacgttagaactggccgtatacaaacctcctaaggtgtcacttatgcctgctacacttgcaagggcggcacctggcgaggctccccctgagctcctctgtctcgtctctcacttttacccatcggggggattggaggtcgaatgggaactgcgaggtggaccgggaggtagaagccagaaggccgaggggcaacggtggctgagcgccctgcggcatcacagcgatggctccgtttctttgtccgggcacctccagcccccacctgtcaccacagagcagcatggagccaggtacgcctgtcggatccatcaccccagtttaccggcatcaggccgatccgcagaagtgacattagaggtggccggattatccggcccatctctcgaggacagtgtcgggctgttcctgtcagcttttcttctgcttggactgtttaaggccctggggtgggctgcagtgtacctgagcacgtgcaaggactctaaaaagaaagctgagtag

SEQ ID NO: 136044 - DNA, 1347 bp, Artificial Sequence
  derived and/or modified sequence
atgaagtctctgagccttttgctcgctgtcgctcttggtctggctactgccgtatcagccggtccggcagtcatcgagtgttggtttgttgaggacgcttccggtaagggactcgccaaacgtccaggcgctcttctgctgcgacagggccctggggaacctcctccacgcccagatctggaccccgagttgtacctgtctgtccacgaccctgcaggagccttgcaggccgcttttagacgttatccgaggggagctcccgcaccacactgcgaaatgtctcgcttcgtgccgctccccgcttcagctaaatgggcgtcagggctgactcctgctcagaattgccctagggcccttgatggtgcttggttgatggtctccatttcctcaccagtcctgtcactcagcagtctgctcaggccgcagcctgaaccccagcaagagccggttctcatcaccatggccacggtcgtgttgaccgtgttgacccacacgcctgcacctcgagtgagactggggcaggacgctcttttggacctgtctttcgcatatatgccccctaccagcgaggctgcctcctcccttgccccaggccctcctccgttcggactggaatggcgacgacaacaccttggcaaggggcatctgctgctggctgccactccaggacttaacggccagatgccagcggctcaagagggtgcagtggctttcgctgcgtgggatgatgatgaaccatggggtccctggaccggaaacggtactttttggctgcctactgttcagccattccaggagggaacttacctcgcgactatccatttaccttaccttcagggtcaggttacgcttgagctggctgtctacaaaccaccaaaggtgtccttgatgcctgccacgctggcaagggccgcacctggagaagcccctccagagctgctttgcctcgtgtcacacttttacccttccggcggtttggaggtagaatgggagttgagaggtgggccagggggtcgctcccaaaaagccgagggccaacggtggttatcagccttacgtcatcatagcgacgggagcgtttccctgagcggccatctgcagccacctcccgtgacaaccgaacagcatggagcacgctacgcttgtaggatccaccacccctcgctcccagcctcggggaggagtgctgaagtaaccttggaggtcgcgggtctttccgggcctagcctcgaagactcagtgggattattcctgagtgcttttctgctgttaggcttgtttaaagcacttggctgggccgcagtgtatctgtccacctgcaaggatagcaagaagaaggcggaatag

SEQ ID NO: 136045 - DNA, 1401 bp, Artificial Sequence
  derived and/or modified sequence
atgaaaagtctcagcctgttactagcggtcgcccttggactggcgaccgctgtaagcgccggaccggcagtgatcgagtgttggttcgtagaggatgcttcagggaagggactcgccaagcggcctggtgccctattgttacgccagggacccggagagcctcctcctcggcctgatctcgaccctgagctgtacctcagtgtccatgaccccgctggcgcactgcaggcagcttttagacggtacccacgaggtgctcctgcccctcactgcgaaatgagtcgctttgtgcccctgcctgcaagcgccaaatgggcatcggggcttacaccagcgcagaactgcccaagggcactggacggcgcatggctaatggtcagcattagctcgcccgtactgagtcttagtagtttactgcgcccacagcctgagccccagcaagagcccgttctcattaccatggccacagtggagatgggcttccatcacgtgggacaggctgcactggaacttctcacatccgtggtcctgacagtgttaacccacaccccggcacctcgggtgcggttgggccaggatgcgctgttggacctgagcttcgcatacatgccccctacctcggaggcggctagttcactggcccctgggccacctccctttggcctagagtggcggagacagcatttaggcaaaggacacctgctgttagctgccacccctggcctgaatggtcagatgcccgctgctcaggagggagcagtagccttcgctgcatgggatgatgatgaaccatggggcccatggacaggtaatgggaccttctggcttcccactgtacagcccttccaagagggcacatatctggctactatccatctgccatacctgcagggtcaggtgacgctggaactcgccgtctacaaaccccctaaggtgtccctgatgccggctaccttggccagagcagcgccaggggaggcgcctcctgagctgctgtgcctggtcagtcacttctatcccagcgggggactggaagttgagtgggagcttcgtgggggtcccggtggtcggtcacagaaggcagaaggtcagaggtggctcagtgcactgaggcaccatagcgacggctccgtatccctatcaggccacctccagcccccaccagtaacaaccgagcagcatggcgcacgttacgcgtgcagaatccaccacccttctttgccagcctcgggcagatccgctgaagtgacattagaggttgcgggactctccggccctagcctggaggactccgtggggctcttcctttccgccttccttctgttgggtttgtttaaagcactgggttgggctgccgtctacctgtccacatgtaaagacagcaaaaagaaagccgagtag

SEQ ID NO: 136046 - DNA, 1347 bp, Artificial Sequence
  derived and/or modified sequence
atgaagtccctgtcactgcttctagccgtggccttgggcttggccacagcagtgtctgctggcccagctgtgattgagtgttggtttgtggaggatgcaagcggaaaaggcttagctaaacggcctggagctctgctgctacgtcagggtccaggcgagccaccaccacggccagacttggacccggaactttatctgagcgtccacgacccagctggagcccttcaggctgcctttcgcagatatccgcgaggcgcaccagctccacactgcgaaatgagtcgttttgtgccactcccagcctctgcaaagtgggcatctggactcacccccgctcagaattgtccacgcgctttggatggggcttggctgatggtctccatctcaagtcccgtgctgtctctgagcagcctcctacggccacagcccgaacctcagcaggagccggttttgataactatggccactgtggtgctgacagtgctgacacacactccagctcccagagttcgtttaggtcaggatgcccttcttgacctgtcctttgcttacatgccaccaacaagcgaggctgcgagcagcctcgctccaggaccgcctccattcggtctcgagtggcgtcgccagcacctgggtaaggggcacctactgctcgcagcaacgccgggtttaaatggccagatgcctgctgctcaagaaggggcagtcgcttttgctgcctgggatgatgatgaaccctggggaccgtggaccgggaatggtaccttctggcttcctcgagtgcagcccttccaggaaggtacatacctggcaaccattcatctgccctacttacaagggcaggttactctggaactggccgtatataagcctccgaaggtgtcgctgatgcctgcgactttagccagagctgcccctggcgaagcccctccggaactgctgtgcctggtatcccacttttacccttccgggggattggaagtagagtgggaactgcgtgggggacctggtggcaggagtcagaaagctgagggacaacgatggctgtctgctctgcgacatcatagcgacggatctgtgtcactgagtggccacctacagccccctccagtgaccactgagcagcatggagcacgctatgcctgtcgaatacatcacccctccttgccagccagcggccgaagcgcagaggtgaccctcgaagtcgcagggttatcgggtccttccttagaagatagtgtaggcctctttctgagtgcgttcttgctgctaggtctgtttaaagcactaggctgggccgcagtatacctgtcaacctgcaaggacagcaagaaaaaagcagaatag

SEQ ID NO: 136047 - DNA, 1401 bp, Artificial Sequence
  derived and/or modified sequence
atgaagagtttgagcctgctattggcagtggcgctcgggttagccaccgcagtcagcgctggcccagctgtaatcgaatgctggttcgttgaggacgcgagtggcaagggattggccaagcgtcctggagccctcctgcttagacagggcccaggcgaacccccaccgagacctgatctggacccggagttgtatttaagcgtccatgaccccgctggagccctgcaggctgctttcagaagatatcccagaggcgctcctgctccccattgcgagatgagtcggttcgtgcctttgcctgccagcgctaaatgggcctccgggctgacgcccgcacaaaattgtcctcgcgctctggatggcgcatggctgatggtttcaatcagctctcccgtcctgtccttgagctcactgctgagaccgcagcctgaaccacagcaggagccggtgctaattacgatggcgactgtggaaatgggcttccaccatgtgggtcaggccgcactggagctacttacctcggtggtgttgactgtgctcactcatacacctgcccctagggtccgccttggccaggatgctctgcttgacttatcctttgcctatatgcctcccacatcagaggccgcatcttccttggcccctggccctcctcccttcggtctagagtggcgcagacaacacctggggaagggccacctcctgctggcagccacccccggtctgaatgggcagatgccagcagctcaggagggcgctgttgctttcgcagcatgggacgacgacgaaccctgggggccttggactggcaacgggacattctggttgcctcgggttcagcccttccaggagggaacctaccttgcgacgattcatcttccgtatttacagggtcaagtgacgctcgaacttgctgtatacaagcccccaaaggtgtctctgatgcctgcaaccctggccagagctgctccaggtgaggcaccacccgaactgttgtgcttagtgtcccatttttatcctagtgggggtctggaagtggagtgggaattacgaggagggcctggaggccgatcccagaaggcagagggccaaaggtggctgagtgctcttagacaccattccgacggatctgtgagtctgagcggacacctgcagcctccgcctgtgacaactgaacaacatggggcaaggtacgcttgtcgcatccaccaccccagtctcccagcatccgggaggagtgccgaggtgactcttgaggtggctgggctgtctggcccaagcctggaggattcagttggcctgtttctgtcagccttcctgctcctgggattattcaaagctttaggctgggcagccgtttatctcagcacttgtaaagactcaaagaagaaggctgagtag

SEQ ID NO: 136048 - DNA, 1347 bp, Artificial Sequence
  derived and/or modified sequence
atgaagagtttatcgctgttgctcgctgtggctctggggttggccaccgccgtgtccgcgggacccgctgtgattgagtgctggttcgtggaagacgcatctggcaaaggcttagccaaacgcccaggagcactcctgcttcgccagggacccggtgagcccccacccaggcccgacttagatcccgagctgtatctgagcgtgcacgatcctgccggagccctacaggctgcattcagacgttacccccgaggagcgcctgcgccacactgtgagatgtcgaggtttgtgcccctgccagcttcagccaagtgggctagcggtctcactccagcccagaactgcccacgcgctttagacggagcctggctcatggtgagtatctcttcccctgtgttgagtctatcaagtctgctgaggccccagcctgaaccccaacaggagccagttctgattacaatggctacggtggtcctgactgtactcactcatacacccgctcctcgtgtcaggctgggccaggacgccctcctggacctttcattcgcgtatatgccccctacgagcgaagccgcttcgtcactggccccaggtcctcctccttttggactggagtggagaagacaacatttaggcaagggccatctgctgctcgccgctactcccggtcttaatgggcagatgccagcggctcaggagggggcagtagccttcgctgcgtgggacgacgacgagccctgggggccatggacagggaatggcactttctggctgccaagggtacagcccttccaagaaggcacatacttggccacaatccatctgccttacctgcagggccaggtaactcttgaactcgctgtatacaagcccccaaaagtgagcctgatgccagccacccttgccagggccgcacctggagaggcccctccggaattgttgtgtttggtatcccacttttacccaagcgggggactggaagtcgaatgggagctgagaggcggacccggtggacggagtcagaaagccgaaggccagcggtggctgagcgcactgcgccatcactcagacggctctgtctcactgtctggacatttgcagccccctcccgtaactacagaacaacacggtgccaggtatgcttgtcgcatacaccatccgtccctgcctgctagtggaaggtctgccgaagtgacattggaggtcgctggactgagcgggccatctctggaagatagcgtgggactttttctttcagccttcttgctgctcggcctttttaaggctttgggctgggcagctgtgtatctgtccacctgcaaggactcaaagaaaaaggcagaatag

SEQ ID NO: 136049 - DNA, 1347 bp, Artificial Sequence
  derived and/or modified sequence
atgaaatcactgtcactgctactggccgtcgctctgggcctcgccacggctgtttccgctggcccagccgtgatcgagtgttggttcgtggaggatgcgtccgggaaaggcctggcgaaacgcccaggcgctctgctccttcggcagggcccaggagaaccacctccaaggcctgatctcgatcctgagctgtatctgagcgtgcatgaccccgcaggtgcgctgcaggctgcctttcgcaggtaccctcgcggagcccctgctccgcattgcgagatgtcgagatttgtgcctttgccagccagcgcaaagtgggcttccgggctgacacccgctcaaaactgtccgagggccctagatggggcttggttaatggtgtcaataagctcacctgttctttcattgtcctccctgctgaggccacagcccgagccacaacaagaaccggtgctgattactatggctactgtggtgttgacagtgctcacacataccccagctccccgagtccgcctgggacaggacgccctgctggatctgagcttcgcatatatgccgccaacttcggaggcagcctcttccttagcaccaggccctccgccatttgggcttgaatggcgcagacagcatctgggtaagggacacctgctgcttgcggcaacgcctggtctgaacggccagatgccagccgctcaggagggcgctgtagccttcgctgcttgggacgacgatgagccatgggggccatggaccggcaatgggaccttctggttacccaccgtccagccatttcaagagggaacgtacctagccactattcaccttccttatctccagggccaggtgacacttgagttggcagtctataaaccaccgaaggtgagtctgatgccggctaccctcgctcgggcagcaccaggagaagcaccgcctgagctgttgtgcctggtatcacacttctaccccagtgggggtttagaagtcgagtgggaacttaggggtggcccagggggtaggtcccaaaaggctgaggggcagcgctggcttagcgcccttaggcaccacagcgatggaagcgttagcttaagcggacatctccagccaccccctgttacaacagagcagcacggggctagatacgcgtgccgcattcatcatccctccctgcccgcttccgggaggtcggcagaggtgacactggaagtggctgggttgtcaggtcctagcctggaggacagtgtcggtctgttcctgtcagccttcctgctcctgggcttatttaaggcactgggttgggcggcagtgtacctgtccacatgtaaggacagcaaaaagaaggcagaatag

SEQ ID NO: 136050 - DNA, 1401 bp, Artificial Sequence
  derived and/or modified sequence
atgaaatctctgagcctgctcctggctgtggcactcggcctcgcgacagcggtaagtgcgggacctgccgtgatcgaatgctggttcgtggaagatgcgtctggaaaaggcctggccaaacgcccaggggcactcctcctgaggcaaggacccggtgagccacctccacgtcctgacctcgatcctgagctctacctgagcgtgcatgaccccgctggcgctctccaggctgcctttagacgttatccgcgaggagccccagctccccactgcgagatgagtcgattcgtccctctgccagcatcggctaaatgggcatctgggctgacccccgcacaaaattgccccagggcactggatggcgcatggctcatggtgagcatttcgtcaccggtgctttcactttcatccttgctgaggcctcagccagaacctcaacaagagccggtacttattacgatggcaaccgtggagatgggattccaccatgtgggccaggccgctttagagctgttgacatctgtagtgctgactgtcctaactcacactccagcccctcgcgttagattgggtcaggacgcccttctcgatctctcattcgcttatatgccacctacctcagaggccgcaagcagcctggcaccaggacctccgccattcggcctggaatggcggaggcagcatcttggaaaaggccatctgttgttggctgccacacccggactgaacggccagatgcccgctgcacaagaaggagcagtcgcatttgccgcttgggacgacgacgaaccctggggaccttggaccggcaatggcactttctggctgccacgggttcagccgtttcaagagggcacctatctggcgactatccatctgccttacctacaaggacaggtgaccctcgagttagctgtttataaaccacctaaagtgtctttgatgcccgcaactctggcccgagcggctccaggggaggcccctcctgagctcctgtgcctggtgagccacttctaccctagcggcggtcttgaggtagagtgggaactccgcggtggcccagggggaagaagccagaaggccgagggtcagagatggttatccgcactaaggcaccactcggatggatccgtgtccttgtcgggacacctgcagcctccccctgtgaccacagaacagcacggggctaggtacgcttgcagaatccaccatccttccctccctgccagcgggagatccgccgaagtcacattagaggtggctggactgagtggtcccagccttgaggactcagtgggcctgttcctaagcgcgtttctgttgctgggcctctttaaagcgcttggatgggctgccgtttacctgagcacgtgtaaggacagcaaaaagaaagccgagtag

SEQ ID NO: 136051 - DNA, 1347 bp, Artificial Sequence
  derived and/or modified sequence
atgaagtccctgagtttactgctggctgtcgctctgggactggcgaccgcagtatcagctggaccagctgtcatagagtgttggttcgttgaggatgcttctggcaaggggctcgcaaaacgcccaggggctctactcctcaggcaaggccctggggagccccctccccgtccagacctggatccagagctgtacctcagcgtgcacgatcccgctggggctctccaggcagcttttaggcgatacccaagaggggctcctgccccacactgtgaaatgagtagatttgtgccattgcccgctagcgccaagtgggctagcggtcttacccccgcacagaactgcccacgggcattagatggcgcatggctgatggtatcaatttcgtcgccagtgctaagtttgagttcactgttgagacctcagccagaacctcagcaggaacctgtgctcatcaccatggctaccgttgttttgaccgtgctcactcacacacccgctccaagagtgagactagggcaagatgccttgctcgatctcagcttcgcatacatgcccccaacgtcggaggccgcaagctctctagctccgggaccacctccattcggactggagtggagacggcagcatctcggaaaaggccatctgctcttagctgctactcctggtctgaatggccaaatgccggctgcccaggaaggcgcagtggcgtttgctgcttgggatgatgacgaaccctggggaccctggacagggaatggcacattttggctgccgaccgtgcagccttttcaggaaggcacatacctcgcgacgattcacctgccctaccttcagggccaggtgacactcgaactggctgtgtataagccgccaaaggtgtctttgatgccagctacacttgctcgagctgcacccggagaagcacctccggagctactgtgccttgtttcacatttttaccctagcggaggcttggaagtggagtgggagctgaggggcggtcccggaggccgatcccaaaaggcggaaggacagaggtggctttccgcactgcgccatcattcagatggttcagtttccctgtcaggccatctacaacctcccccagtcacgaccgaacaacatggtgcacgctacgcctgcaggatccatcacccatcccttccggcatccggacgctccgcggaagtgacgttggaggtggcaggtctgagtggcccttcactggaagactctgtgggtctgtttctatcagccttcctgctgctcgggcttttcaaagcccttggttgggccgctgtctatctttccacatgcaaagacagtaaaaagcatgcaacatag

SEQ ID NO: 136052 - DNA, 1401 bp, Artificial Sequence
  derived and/or modified sequence
atgaagtccctcagcctgcttctggcagtggccctggggcttgctaccgcagttagtgcgggaccggcagtgatcgagtgctggttcgtggaagatgcctcagggaagggtctggcaaagaggccaggagccttactgctaaggcaaggccctggcgagccccctccaagacctgatctggaccccgagctgtatttgagcgtccacgatcccgcaggcgctctccaagcggcatttcgccgttacccgagaggcgcacctgcccctcactgcgaaatgtccaggttcgttccacttcccgcttccgccaagtgggcctctggactgaccccagcccagaactgtcctagggcactcgacggggcatggctgatggtgagcataagctccccagtgctgtcactttcctccctgctcaggccacaaccggaacctcaacaggagcccgtcctgatcactatggccacagttgagatgggcttccatcatgtgggccaggccgctctggaactgctcactagcgtcgtgctcactgtgctcactcataccccagcccctcgggttaggttagggcaggatgcccttctggatctgtcattcgcctacatgcccccaacatccgaagccgcaagtagcctggcgccagggccaccgccttttggactagaatggcggcgtcagcacctgggtaagggacacctgttactcgccgctacacccggtcttaacggacagatgcctgctgcccaggagggggctgttgcttttgccgcatgggacgacgacgagccctggggaccctggaccggcaacggaactttttggctcccaaccgtgcagcctttccaggagggcacatatctagccaccattcacctaccctatctacagggacaagttacactcgagctcgctgtctataaaccccctaaggtgtcactaatgccagccaccctggctcgtgcagcccctggtgaagctcctccagaactgctttgcctagtcagccacttctaccccagcggtgggctggaggttgaatgggagctgcggggaggaccaggagggaggagccagaaggctgaagggcaacgctggctgtccgccttgagacaccacagtgacggctcggtctctctgtccggccacctgcagccaccccctgtcactacagaacaacacggggcacggtatgcctgccgaatacatcaccctagtctccccgcttctggtcgatccgctgaggtgaccctagaagtagccggtctttctggacctagtcttgaagatagcgtcggtctatttctgtcagcttttctgctcctggggctcttcaaggcactcggttgggccgctgtgtatctctcaacctgtaaggactcaaagaagaaggccgagtag

SEQ ID NO: 136053 - DNA, 1347 bp, Artificial Sequence
  derived and/or modified sequence
atgaagagcctatctctgctcttagcggtggcactcggactcgccacggcagtgtcagctggacctgcagtgatcgagtgctggttcgttgaggacgcctcaggaaaaggccttgcaaaaaggcctggtgccctactcctccgacagggtcctggtgagccccctcctcggcctgatcttgatcctgagctttacctgtctgtccacgacccggctggcgcacttcaggcagcctttcggcgatatccacgaggtgcaccagcaccacattgtgagatgagtagattcgtcccgttacccgcaagcgcaaagtgggccagtgggctcacccctgcgcagaattgcccaagggccctggacggtgcgtggttaatggttagtatttctagccctgtgctgtctctgagctcgctgctgcgaccccaacccgagccccagcaggaaccggtcctgattaccatggctacagtagtgcttactgtgcttacccacacacctgcaccaagagtacgtttgggccaagacgctctacttgatttgtcctttgcttacatgccaccaacatccgaggccgcatcatcactggcaccaggcccaccaccttttggcctggagtggcgcagacagcacctcgggaagggccatctcttactggctgccacccccggactgaacggacagatgcccgctgcccaggagggcgcagtggccttcgccgcttgggacgacgatgagccatggggtccttggacaggaaatgggacgttttggcttccaacagtgcagccctttcaggaggggacctacctggcaacaatccaccttccatatctgcagggccaagtgacccttgagctggccgtttataagccaccgaaggtcagcctgatgcccgctactctggcgcgagcagcccctggagaggcacccccagagctgctctgcctggtttctcacttttaccctagtggcggactcgaggtcgagtgggaactccgcggaggcccaggtgggaggtcgcagaaggcagagggacagcgatggctctcagccttgaggcatcatagtgatggcagcgtgtcgctaagtggccacctgcagccccctcctgttacgactgaacagcacggcgctcggtacgcctgtaggatccaccaccccagcctaccggcttcaggtagaagcgctgaggtgaccttagaggtagctggcttaagcggccctagcctggaagactcggtggggctgtttttgagtgcttttctgctcctcggtctgtttaaggctctgggatgggctgctgtctacctttctacgtgcaaagattcaaaaaagcatgccacttag

SEQ ID NO: 136054 - DNA, 1347 bp, Artificial Sequence
  derived and/or modified sequence
atgaagtcactgtctttgctgctagctgtggccctgggcctagctacggcagtgtcagcagggcctgcggtgatcgagtgttggtttgtcgaggacgctagtggcaaaggactcgctaagaggcccggagctcttttgctcaggcagggaccaggcgaaccccctcccagacctgacctagatccagagctctatctgtccgtgcacgaccccgctggcgctcttcaggccgctttcagaagataccctcgaggagcacctgccccacactgcgagatgtctcgctttgtacccctgcctgcttccgccaagtgggcaagtggcctgaccccagctcagaattgtccacgcgcactggacggtgcatggctaatggtatcgatatcatcaccagtgctgagtctgagtagtttgctcagacctcaaccagagcctcagcaggaaccagtgctgatcacaatggccaccgtcgtcctgacagtcctaacccacactcccgctccccgagtacgactgggacaggatgcgttgctcgacctcagcttcgcatatatgcctcccacaagtgaggccgcatccagcttagccccaggccctcccccatttggtttggaatggcgaagacaacatctcggcaagggccacttgctccttgcagcaacccccggacttaatggccaaatgcccgctgcacaggaaggggcagtcgcctttgctgcctgggacgatgatgagccatggggaccgtggactggcaatgggaccttttggctccctagagtacagccatttcaagagggcacgtatctggctactatccacctcccatacctccaggggcaagtgacactcgagctggcggtttataagccgcctaaagtttcactgatgcccgcaacgctggcaagagctgccccaggagaggctccgcctgaactgttgtgccttgtgtcgcacttttacccctcaggcggacttgaggttgagtgggagctgcgcggtggccctggcggacgttcccagaaggcagagggacagaggtggcttagtgccctgaggcatcattctgatggatcggtgagcctgtccggtcacctgcagcctccacccgtgaccaccgagcagcatggagccaggtatgcatgtcgaatacatcaccccagtctgccagccagcggtagaagtgctgaagtgacgctcgaagttgctggtctgagcggtccgtctctcgaagacagtgtgggtctcttcctgagcgcctttctgcttctgggactctttaaggcactcgggtgggcagcagtgtacctaagtacctgtaaggatagtaagaagcacgccacatag

SEQ ID NO: 136055 - DNA, 1347 bp, Artificial Sequence
  derived and/or modified sequence
atgaaatcactatccctgcttctggctgtggctttgggactggctactgccgtgagtgcgggtccagctgtgatcgaatgttggtttgtagaagatgcctcaggtaaagggcttgcgaagagacccggagctctcctgctgcggcaagggccaggcgagcccccacctcggccagatctggacccagaactttacttatctgtgcacgaccccgctggagctcttcaggcggctttccgtaggtatccaagaggcgcaccggcaccccattgcgagatgtcccgttttgtgcccttgccagctagcgccaagtgggcctcaggtctcaccccagcacagaactgccctagggccttggacggagcctggctgatggtctccatctcaagcccggtgctgtctctttcatccttactacgccctcaacctgagccccagcaggaacctgtcctaatcacgatggctaccgtggtcttgactgttttaactcatacgccagccccacgcgtgcggctgggtcaggacgctttgttagatctgtcgttcgcttatatgccccctacaagcgaagccgcatcatccttagctccaggcccacctcccttcggtcttgaatggcgaagacagcacctgggcaaaggacacctgcttttggcggctactcccggtctgaatgggcaaatgcctgcagctcaggaaggcgctgtggccttcgccgcatgggatgatgatgagccatggggcccttggaccggcaatgggaccttttggttacctcgggtgcagccttttcaggagggaacatatctggccacgatccatttgccatatctgcagggccaggttacgttagaactggccgtatacaaacccccaaaggtgtctctaatgccagccacgctggccagggccgcaccgggtgaagcgcctccagaactattatgtctggtatcgcatttttatcctagcggcggtttagaagtggagtgggaacttagaggaggcccagggggtcgctcacagaaggccgaaggccagcggtggctaagtgcgctgagacaccactcagatggcagcgtgtctctgagcggacatctccagccgcctccggttaccactgagcaacacggagcgagatacgcctgccgcatacaccacccgtccctgcctgctagtggtagaagtgctgaagtgacactggaagttgccggattgagtgggccttcccttgaggatagcgttggattattcctctctgcctttctgctgctgggcctttttaaggctctcggatgggctgctgtctacttgtctacctgcaaggattctaaaaagcacgcaacgtag

SEQ ID NO: 136056 - DNA, 1347 bp, Artificial Sequence
  derived and/or modified sequence
atgaagtccctgtccctgctgcttgccgtggccttgggtttggctactgctgtgtcggcaggccctgcagttatcgagtgctggttcgtcgaggatgcctcgggcaaaggccttgctaaacgtccgggtgctttgctgctgcgccagggaccaggtgagcctccacccaggccagacctcgaccccgagctgtatctgtcagttcatgatcccgctggcgcactacaggctgcttttcgccgataccccagaggcgctcccgctccacattgcgagatgagtcgattcgtgccattgccagcttctgccaagtgggcctctggacttacgcctgctcagaactgcccacgtgcacttgacggagcctggttgatggtaagcattagctcccccgtcctctccctttccagcctgctgcgacctcagccagagccccagcaggaaccggtgctgattacaatggctactgttgtcctgactgttcttacgcacacacccgcacccagagtaaggctagggcaggatgccctgctagatcttagctttgcctacatgccgcctacctccgaggccgcatcgtcattagctccaggacccccaccgttcggcctggaatggcgaaggcaacaccttgggaaaggccacctgctgcttgctgcgacacctggtcttaatggacagatgccggctgcacaagagggcgctgtcgcttttgcggcttgggacgatgatgagccctggggaccgtggaccgggaatgggacattttggctgccaagggtgcagccgttccaagagggaacatatctcgctactattcacttgccgtatctgcagggacaggtaacgctggagcttgccgtgtataagcctccaaaagtctcccttatgcctgccactctggcaagagccgcacccggagaggcgcctccagagctgttgtgtcttgtcagccacttttatcctagcggaggcttagaagtcgaatgggagctaaggggtggtccgggtgggaggagtcaaaaagccgaaggtcagagatggctctccgccctgcgtcaccacagcgacggttcagttagtcttagcggtcatctgcaaccccctccggtcactaccgaacagcacggtgcacgctacgcttgcagaatacatcacccttctctgcccgcatcaggccgttccgccgaagtcactctggaagtggcaggtctgtctggcccttctctcgaagatagcgtcgggttgtttttatccgcattcctgcttctcggtctgttcaaagcactgggctgggcggcagtgtacctgagcacttgtaaggactcgaagaagcacgcaacttag

SEQ ID NO: 136057 - DNA, 3684 bp, Artificial Sequence
  derived and/or modified sequence
ccaggagggcgcggtaaggctggggtatcctggtgagaactggagaggatctacccgggtccctgcctggccagtggggaaacaccggtcccccaggcaccttcacctaaccagagcggggatttccaccgcccctcatgccgccctttggaggaaagtgaaagtgaaaggaggaagaggaggctaaatggctgaggaggtcgcagcgccatgaagtccctgtctctgctcctcgctgtggctttgggcctggcgaccgccgtctcagcaggacccgcggtgatcgagtgttggttcgtggaggatgcgagcggaaagggcctggccaagagacccggtgcactgctgttgcgccagggaccgggggaaccgccgccccggccggacctcgaccctgagctctatctcagtgtacacgaccccgcgggcgccctccaggctgccttcaggcggtatccccggggcgcccccgcaccacactgcgagatgagccgcttcgtgcctctccccgcctctgcgaaatgggccagcggcctgacccccgcgcagaactgcccgcgggccctggatggggcttggctgatggtcagcatatccagcccagtcctcagcctctccagcctcttgcgaccacagccagagcctcagcaggagcctgttctcatcaccatggcaacagtagagatggggtttcaccatgttggccaggctgctctcgaactcctgacctcagtggtactgactgtcctcacccacacccctgcccctcgagtgagactgggacaagatgctctgctggacttgagctttgcctacatgccccccacctccgaggccgcctcatctctggctccgggtccccctccctttgggctagagtggcgacgccagcacctgggtaagggacatctgctcctggctgcaactcctgggctgaatggccagatgccagcagcccaagaaggggccgtggcatttgctgcttgggatgatgatgagccatggggcccatggaccggaaatgggaccttctggctgcctagagttcaaccctttcaggagggcacctatctggccaccatacacctgccatacctgcaaggacaggtcaccctggagcttgctgtgtacaaaccccccaaagtgtccctgatgccagcaacccttgcacgggccgccccaggggaggcacccccggaattgctctgccttgtgtcccacttctacccttctgggggcctggaggtggagtgggaactccggggtggcccagggggccgctctcagaaggccgaggggcagaggtggctctcggccctgcgccaccattccgatggctctgtcagcctctctgggcacttgcagccgcccccagtcaccactgagcagcatggggcacgctatgcctgtcgaattcaccatcccagcctgcctgcctcggggcgcagcgctgaggtcaccctggaggtagcaggtctttcagggccctcccttgaggacagcgtaggccttttcctgtctgcctttcttctgcttgggctcttcaaggcactgggctgggctgctgtctacctgtccacctgcaaggattcaaagaagaaagcagagtgagggcactcactgccatcctgtggaagccaccatcatctctggcccaagcttctgtagtagctccctaaaataataccctatcatctgctcctaatccctccaatctctctccactgagtggctggaatgcttttttttttttctttcacttatataagggataatttttcttttttttttttttttgagacggagtctcactcttccgcccaggctgcagtgcagtggcatgatcttggcttactgcaacctccgcctcctgggttcaagcaattctgtggcttcagcctccggagtagctgggattacaggcacatgccaccacacccagtgaatttttgtatttttagtagagacggggtttcaccatgttggccaggctggtcttgaattcctgacctcaggtgatctgcccacctcagcctcccaaagtgctgggattacaggcgtgagccaccacaccaggcccgagaaatgcttttttaaaaaacacacatcttatggcattcaccttcttggagctctaggacagtggttctcaaaatttttttctctcaggacctcttaaaaatcatcaaggaccccaaaaagcttttgggtatgtgggttatagctatcaatatttatggtactagaacttaaaagtgagaaaaatttaaaacacgagaatacataggcacacattctattcatcgtgggaaccatggtgtcaatacatatcatgtagcttctgaaaaactccactgtacacttatagaatgaagaaggcaaaaaactttttttttttttttttgagactgagtctcgctctgtcgcccaggctggagtgcagtggcgcgatctcggctcactgcaagctccgcctctcgggttcacgccattctcctgcctcagcctcccaagtagctcggactacaggcgtcctccaccatgcctggctaatattttgtattttttagtagagacggggtttcaccgtgttagccaggatggtctcgatctcctaacctggtgatccgcccgcctcggcctcccaaagtattgggattacccgcgtgagccaccgcgcccggctgcaaataatctttctttttttctttttttctgagacagagtctcgctctgttgcccaggctggagtgcagtggcacgatctcggctcacggcacgctccgcctcccgggttcacgccattctcctgcctcagcttcccgagtagctgggactacaggggcccgccaccacgcccggctaactttttgtgtttttagtagagacggggtttcaccgtgttagccaggatggtctcgatctcctgaccttgtgatctgcccgcctcggcctcccaaagtgctgggattacaggcgtgagccaccgcgcccggcggcgaaacacgatattgtactaacatcttaattttgttataaaatctcacaaaccccctgacatagtctcagagatctgtagggccgaggttacatttggagaacccgtactctagggccaaatccattcttcttgccctggctcacttgtcccccccaccgccccgcgctggagccactgcctagttcttcagccctagatggtgctcgccagacctcctctcaatgctcatcacacacagggctattcctttcctccaatgaaccaaacgcctcccgcccacctccaggtcccagtcctctgttccctttgcctggtccacccttgccctccctgggtcgcagacgaggtcggcctcgtcattccccgcagaccgccgcgcgtccctcttgtgcggttcaccacagttgtatttaagtgatcgtgtgagtcgtcgttaaatgcctgtctccccgcggatcatgggctcctcgaggacagggaccggcctgtctgtccactgctgtaaccccgcgccggcatagggacctaaggcccactggagggcgctcatcaagtagctgctggatgttgacgaaggaagcggcggcgcagctcagggatctccgagtcaggacggtcggccagacccacggggtaacgggtctaatcgtgtaggaataaagctgtattccagtgcttccaaa

SEQ ID NO: 136058 - DNA, 3766 bp, Artificial Sequence
  derived and/or modified sequence
ggggacgcggcacagatagggggaagccggagtaatggttttcgggcaagtggatgttggagagcacacacaggagttggggggcgggggagggcctggggttggggagggctcgaactcggggctgctgggtagtccaggagggcgcggtaaggctggggtatcctggtgagaactggagaggatctacccgggtccctgcctggccagtggggaaacaccggtcccccaggcaccttcacctaaccagagcggggatttccaccgcccctcatgccgccctttggaggaaagtgaaagtgaaaggaggaagaggaggctaaatggctgaggaggtcgcagcgccatgaagtccctgtctctgctcctcgctgtggctttgggcctggcgaccgccgtctcagcaggacccgcggtgatcgagtgttggttcgtggaggatgcgagcggaaagggcctggccaagagacccggtgcactgctgttgcgccagggaccgggggaaccgccgccccggccggacctcgaccctgagctctatctcagtgtacacgaccccgcgggcgccctccaggctgccttcaggcggtatccccggggcgcccccgcaccacactgcgagatgagccgcttcgtgcctctccccgcctctgcgaaatgggccagcggcctgacccccgcgcagaactgcccgcgggccctggatggggcttggctgatggtcagcatatccagcccagtcctcagcctctccagcctcttgcgaccacagccagagcctcagcaggagcctgttctcatcaccatggcaacagtggtactgactgtcctcacccacacccctgcccctcgagtgagactgggacaagatgctctgctggacttgagctttgcctacatgccccccacctccgaggccgcctcatctctggctccgggtccccctccctttgggctagagtggcgacgccagcacctgggtaagggacatctgctcctggctgcaactcctgggctgaatggccagatgccagcagcccaagaaggggccgtggcatttgctgcttgggatgatgatgagccatggggcccatggaccggaaatgggaccttctggctgcctagagttcaaccctttcaggagggcacctatctggccaccatacacctgccatacctgcaaggacaggtcaccctggagcttgctgtgtacaaaccccccaaagtgtccctgatgccagcaacccttgcacgggccgccccaggggaggcacccccggaattgctctgccttgtgtcccacttctacccttctgggggcctggaggtggagtgggaactccggggtggcccagggggccgctctcagaaggccgaggggcagaggtggctctcggccctgcgccaccattccgatggctctgtcagcctctctgggcacttgcagccgcccccagtcaccactgagcagcatggggcacgctatgcctgtcgaattcaccatcccagcctgcctgcctcggggcgcagcgctgaggtcaccctggaggtagcaggtctttcagggccctcccttgaggacagcgtaggccttttcctgtctgcctttcttctgcttgggctcttcaaggcactgggctgggctgctgtctacctgtccacctgcaaggattcaaagaagaaagcagagtgagggcactcactgccatcctgtggaagccaccatcatctctggcccaagcttctgtagtagctccctaaaataataccctatcatctgctcctaatccctccaatctctctccactgagtggctggaatgcttttttttttttctttcacttatataagggataatttttcttttttttttttttttgagacggagtctcactcttccgcccaggctgcagtgcagtggcatgatcttggcttactgcaacctccgcctcctgggttcaagcaattctgtggcttcagcctccggagtagctgggattacaggcacatgccaccacacccagtgaatttttgtatttttagtagagacggggtttcaccatgttggccaggctggtcttgaattcctgacctcaggtgatctgcccacctcagcctcccaaagtgctgggattacaggcgtgagccaccacaccaggcccgagaaatgcttttttaaaaaacacacatcttatggcattcaccttcttggagctctaggacagtggttctcaaaatttttttctctcaggacctcttaaaaatcatcaaggaccccaaaaagcttttgggtatgtgggttatagctatcaatatttatggtactagaacttaaaagtgagaaaaatttaaaacacgagaatacataggcacacattctattcatcgtgggaaccatggtgtcaatacatatcatgtagcttctgaaaaactccactgtacacttatagaatgaagaaggcaaaaaactttttttttttttttttgagactgagtctcgctctgtcgcccaggctggagtgcagtggcgcgatctcggctcactgcaagctccgcctctcgggttcacgccattctcctgcctcagcctcccaagtagctcggactacaggcgtcctccaccatgcctggctaatattttgtattttttagtagagacggggtttcaccgtgttagccaggatggtctcgatctcctaacctggtgatccgcccgcctcggcctcccaaagtattgggattacccgcgtgagccaccgcgcccggctgcaaataatctttctttttttctttttttctgagacagagtctcgctctgttgcccaggctggagtgcagtggcacgatctcggctcacggcacgctccgcctcccgggttcacgccattctcctgcctcagcttcccgagtagctgggactacaggggcccgccaccacgcccggctaactttttgtgtttttagtagagacggggtttcaccgtgttagccaggatggtctcgatctcctgaccttgtgatctgcccgcctcggcctcccaaagtgctgggattacaggcgtgagccaccgcgcccggcggcgaaacacgatattgtactaacatcttaattttgttataaaatctcacaaaccccctgacatagtctcagagatctgtagggccgaggttacatttggagaacccgtactctagggccaaatccattcttcttgccctggctcacttgtcccccccaccgccccgcgctggagccactgcctagttcttcagccctagatggtgctcgccagacctcctctcaatgctcatcacacacagggctattcctttcctccaatgaaccaaacgcctcccgcccacctccaggtcccagtcctctgttccctttgcctggtccacccttgccctccctgggtcgcagacgaggtcggcctcgtcattccccgcagaccgccgcgcgtccctcttgtgcggttcaccacagttgtatttaagtgatcgtgtgagtcgtcgttaaatgcctgtctccccgcggatcatgggctcctcgaggacagggaccggcctgtctgtccactgctgtaaccccgcgccggcatagggacctaaggcccactggagggcgctcatcaagtagctgctggatgttgacgaaggaagcggcggcgcagctcagggatctccgagtcaggacggtcggccagacccacggggtaacgggtctaatcgtgtaggaataaagctgtattccagtgcttccaaa

SEQ ID NO: 136059 - DNA, 3759 bp, Artificial Sequence
  derived and/or modified sequence
ggggacgcggcacagatagggggaagccggagtaatggttttcgggcaagtggatgttggagagcacacacaggagttggggggcgggggagggcctggggttggggagggctcgaactcggggctgctgggtagtccaggagggcgcggtaaggctggggtgtcctggtgagaactggagaggatctacccgggtccctgcctggccagtggggaaacaccggtcccccaggcaccttcacctaaccagagcggggatttccaccgcccctcatgccgccctttggaggaaagtgaaagtgaaaggaggaagaggaggcttcatggctgaggaggtcgcagcgccatgaagtccctgtctctgctcctcgctgtggctttgggcctggcgaccgccgtctcagcaggacccgcggtgatcgagtgttggttcgtggaggatgcgagcggaaagggcctggccaagagacccggtgcactgctgttgcgccagggaccgggggaaccgccgccccggccggacctcgaccctgagctctatctcagtgtacacgaccccgcgggcgccctccaggctgccttcaggcggtatccccggggcgcccccgcaccacactgcgagatgagccgcttcgtgcctctccccgcctctgcgaaatgggccagcggcctgacccccgcgcagaactgcccgcgggccctggatggggcttggctgatggtcagcatatccagcccagtcctcagcctctccagcctcttgcgaccacagccagagcctcagcaggagcctgttctcatcaccatggcaacagtggtactgactgtcctcacccacacccctgcccctcgagtgagactgggacaagatgctctgctggacttgagctttgcctacatgccccccacctccgaggccgcctcatctctggctccgggtccccctccctttgggctagagtggcgacgccagcacctgggtaagggacatctgctcctggctgcaactcctgggctgaatggccagatgccagcagcccaagaaggggccgtggcatttgctgcttgggatgatgatgagccatggggcccatggaccggaaatgggaccttctggctgcctacagttcaaccctttcaggagggcacctatctggccaccatacacctgccatacctgcaaggacaggtcaccctggagcttgctgtgtacaaaccccccaaagtgtccctgatgccagcaacccttgcacgggccgccccaggggaggcacccccggaattgctctgccttgtgtcccacttctacccttctgggggcctggaggtggagtgggaactccggggtggcccagggggccgctctcagaaggccgaggggcagaggtggctctcggccctgcgccaccattccgatggctctgtcagcctctctgggcacttgcagccgcccccagtcaccactgagcagcatggggcacgctatgcctgtcgaattcaccatcccagcctgcctgcctcggggcgcagcgctgaggtcaccctggaggtagcaggtctttcagggccctcccttgaggacagcgtaggccttttcctgtctgcctttcttctgcttgggctcttcaaggcactgggctgggctgctgtctacctgtccacctgcaaggattcaaagaagaaagcagagtgagggcactcactgccatcctgtggaagccaccatcatctctggcccaagcttctgtagtagctccctaaaataataccctatcatctgctcctaatccctccaatctctctccactgagtggctggaatgcttttttttttttctttcacttatataagggataatttttcttttttttttttttttgagacggagtctcactcttccgcccaggctgcagtgcagtggcatgatcttggcttactgcaacctccgcctcctgggttcaagcaattctgtggcttcagcctccggagtagctgggattacaggcacatgccaccacacccagtgaatttttgtatttttagtagagacggggtttcaccatgttggccaggctggtcttgaattcctgacctcaggtgatctgcccacctcagcctcccaaagtgctgggattacaggcgtgagccaccacaccaggcccgagaaatgcttttttaaaaaacacacatcttatggcattcaccttcttggagctctaggacagtggttctcaaaatttttttctctcaggacctcttaaaaatcatcaaggaccccaaaaagcttttgggtatgtgggttatagctatcaatatttatggtactagaacttaaaagtgagaaaaatttaaaacacgagaatacataggcacacattctattcatcgtgggaaccatggtgtcaatacatatcatgtagcttctgaaaaactccactgtacacttatagaatgaagaaggcaaaaaacttttttttttttttttttgagacggagtctcgctctgtcgcccaggctggagtgcagtggcgcgatctcggctcactgcaagctccgcctctcgggttcacgccattctcctgcctcagcctcccaagtagctcggactacaggcgtcctccaccatgcctggctaatattttgtattttttagtagagacggggtttcaccgtgttagccaggatggtctcgatctcctaacctggtgatccgcccgcctcggcctcccaaagtattgggattacccgcgtgagccaccgcgcccggctgcaaataatctttctttttttctgagacagagtctcgctctgttgcccaggctggagtgcagtggcacgatctcggctcacggcacgctccgcctcccgggttcacgccattctcctgcctcagcttcccgagtagctgggactacaggggcccgccaccacgcccggctaactttttgtgtttttagtagagacggggtttcaccgtgttagccaggatggtctcgatctcctgaccttgtgatctgcccgcctcggcctcccaaagtgctgggattacaggcgtgagccaccgcgcccggcggcgaaacacgatattgtactaacatcttaattttgttataaaatctcacaaaccccctgacatagtctcagagatctgtagggccgaggttacatttggagaacccgtactctagggccaaatccattcttcttgccctggctcacttgtcccccccaccgccccgcgctggagccactgcctagttcttcagccctagatggtgctcgccagacctcctctcaatgctcatcacacacagggctattcctttcctccaatgaaccaaacgcctcccgcccacctccaggtcccagtcctctgttccctttgcctggtccacccttgccctccctgggtcgcagacgaggtcggcctcgtcattccccgcagaccgccgcgcgtccctcttgtgcggttcaccacagttgtatttaagtgatcgtgtgagtcgtcgttaaatgcctgtctccccgcggatcatgggctcctcgaggacagggactggcctgtctgtccactgctgtaaccccgcgccggcatagggacctaaggcccactggagggcgctcatcaagtagctgctggatgttgacgaaggaagcggcggcgcagctcagggatctccgagtcaggacggtcggccagacccacggggtaacgggtctaatcgtgtaggaataaagctgtattccagtgcttccaaa

SEQ ID NO: 136060 - DNA, 3677 bp, Artificial Sequence
  derived and/or modified sequence
ccaggagggcgcggtaaggctggggtgtcctggtgagaactggagaggatctacccgggtccctgcctggccagtggggaaacaccggtcccccaggcaccttcacctaaccagagcggggatttccaccgcccctcatgccgccctttggaggaaagtgaaagtgaaaggaggaagaggaggcttcatggctgaggaggtcgcagcgccatgaagtccctgtctctgctcctcgctgtggctttgggcctggcgaccgccgtctcagcaggacccgcggtgatcgagtgttggttcgtggaggatgcgagcggaaagggcctggccaagagacccggtgcactgctgttgcgccagggaccgggggaaccgccgccccggccggacctcgaccctgagctctatctcagtgtacacgaccccgcgggcgccctccaggctgccttcaggcggtatccccggggcgcccccgcaccacactgcgagatgagccgcttcgtgcctctccccgcctctgcgaaatgggccagcggcctgacccccgcgcagaactgcccgcgggccctggatggggcttggctgatggtcagcatatccagcccagtcctcagcctctccagcctcttgcgaccacagccagagcctcagcaggagcctgttctcatcaccatggcaacagtagagatggggtttcaccatgttggccaggctgctctcgaactcctgacctcagtggtactgactgtcctcacccacacccctgcccctcgagtgagactgggacaagatgctctgctggacttgagctttgcctacatgccccccacctccgaggccgcctcatctctggctccgggtccccctccctttgggctagagtggcgacgccagcacctgggtaagggacatctgctcctggctgcaactcctgggctgaatggccagatgccagcagcccaagaaggggccgtggcatttgctgcttgggatgatgatgagccatggggcccatggaccggaaatgggaccttctggctgcctacagttcaaccctttcaggagggcacctatctggccaccatacacctgccatacctgcaaggacaggtcaccctggagcttgctgtgtacaaaccccccaaagtgtccctgatgccagcaacccttgcacgggccgccccaggggaggcacccccggaattgctctgccttgtgtcccacttctacccttctgggggcctggaggtggagtgggaactccggggtggcccagggggccgctctcagaaggccgaggggcagaggtggctctcggccctgcgccaccattccgatggctctgtcagcctctctgggcacttgcagccgcccccagtcaccactgagcagcatggggcacgctatgcctgtcgaattcaccatcccagcctgcctgcctcggggcgcagcgctgaggtcaccctggaggtagcaggtctttcagggccctcccttgaggacagcgtaggccttttcctgtctgcctttcttctgcttgggctcttcaaggcactgggctgggctgctgtctacctgtccacctgcaaggattcaaagaagaaagcagagtgagggcactcactgccatcctgtggaagccaccatcatctctggcccaagcttctgtagtagctccctaaaataataccctatcatctgctcctaatccctccaatctctctccactgagtggctggaatgcttttttttttttctttcacttatataagggataatttttcttttttttttttttttgagacggagtctcactcttccgcccaggctgcagtgcagtggcatgatcttggcttactgcaacctccgcctcctgggttcaagcaattctgtggcttcagcctccggagtagctgggattacaggcacatgccaccacacccagtgaatttttgtatttttagtagagacggggtttcaccatgttggccaggctggtcttgaattcctgacctcaggtgatctgcccacctcagcctcccaaagtgctgggattacaggcgtgagccaccacaccaggcccgagaaatgcttttttaaaaaacacacatcttatggcattcaccttcttggagctctaggacagtggttctcaaaatttttttctctcaggacctcttaaaaatcatcaaggaccccaaaaagcttttgggtatgtgggttatagctatcaatatttatggtactagaacttaaaagtgagaaaaatttaaaacacgagaatacataggcacacattctattcatcgtgggaaccatggtgtcaatacatatcatgtagcttctgaaaaactccactgtacacttatagaatgaagaaggcaaaaaacttttttttttttttttttgagacggagtctcgctctgtcgcccaggctggagtgcagtggcgcgatctcggctcactgcaagctccgcctctcgggttcacgccattctcctgcctcagcctcccaagtagctcggactacaggcgtcctccaccatgcctggctaatattttgtattttttagtagagacggggtttcaccgtgttagccaggatggtctcgatctcctaacctggtgatccgcccgcctcggcctcccaaagtattgggattacccgcgtgagccaccgcgcccggctgcaaataatctttctttttttctgagacagagtctcgctctgttgcccaggctggagtgcagtggcacgatctcggctcacggcacgctccgcctcccgggttcacgccattctcctgcctcagcttcccgagtagctgggactacaggggcccgccaccacgcccggctaactttttgtgtttttagtagagacggggtttcaccgtgttagccaggatggtctcgatctcctgaccttgtgatctgcccgcctcggcctcccaaagtgctgggattacaggcgtgagccaccgcgcccggcggcgaaacacgatattgtactaacatcttaattttgttataaaatctcacaaaccccctgacatagtctcagagatctgtagggccgaggttacatttggagaacccgtactctagggccaaatccattcttcttgccctggctcacttgtcccccccaccgccccgcgctggagccactgcctagttcttcagccctagatggtgctcgccagacctcctctcaatgctcatcacacacagggctattcctttcctccaatgaaccaaacgcctcccgcccacctccaggtcccagtcctctgttccctttgcctggtccacccttgccctccctgggtcgcagacgaggtcggcctcgtcattccccgcagaccgccgcgcgtccctcttgtgcggttcaccacagttgtatttaagtgatcgtgtgagtcgtcgttaaatgcctgtctccccgcggatcatgggctcctcgaggacagggactggcctgtctgtccactgctgtaaccccgcgccggcatagggacctaaggcccactggagggcgctcatcaagtagctgctggatgttgacgaaggaagcggcggcgcagctcagggatctccgagtcaggacggtcggccagacccacggggtaacgggtctaatcgtgtaggaataaagctgtattccagtgcttccaaa

SEQ ID NO: 136061 - DNA, 3766 bp, Artificial Sequence
  derived and/or modified sequence
ggggacgcggcacagatagggggaagccggagtaatggttttcgggcaagtggatgttggagagcacacacaggagttggggggcgggggagggcctggggttggggagggctcgaactcggggctgctgggtagtccaggagggcgcggtaaggctggggtatcctggtgagaactggagaggatctacccgggtccctgcctggccagtggggaaacaccggtcccccaggcaccttcacctaaccagagcggggatttccaccgcccctcatgccgccctttggaggaaagtgaaagtgaaaggaggaagaggaggcttcatggctgaggaggtcgcagcgccatgaagtccctgtctctgctcctcgctgtggctttgggcctggcgaccgccgtctcagcaggacccgcggtgatcgagtgttggttcgtggaggatgcgagcggaaagggcctggccaagagacccggtgcactgctgttgcgccagggaccgggggaaccgccgccccggccggacctcgaccctgagctctatctcagtgtacacgaccccgcgggcgccctccaggctgccttcaggcggtatccccggggcgcccccgcaccacactgcgagatgagccgcttcgtgcctctccccgcctctgcgaaatgggccagcggcctgacccccgcgcagaactgcccgcgggccctggatggggcttggctgatggtcagcatatccagcccagtcctcagcctctccagcctcttgcgaccacagccagagcctcagcaggagcctgttctcatcaccatggcaacagtggtactgactgtcctcacccacacccctgcccctcgagtgagactgggacaagatgctctgctggacttgagctttgcctacatgccccccacctccgaggccgcctcatctctggctccgggtccccctccctttgggctagagtggcgacgccagcacctgggtaagggacatctgctcctggctgcaactcctgggctgaatggccagatgccagcagcccaagaaggggccgtggcatttgctgcttgggatgatgatgagccatggggcccatggaccggaaatgggaccttctggctgcctagagttcaaccctttcaggagggcacctatctggccaccatacacctgccatacctgcaaggacaggtcaccctggagcttgctgtgtacaaaccccccaaagtgtccctgatgccagcaacccttgcacgggccgccccaggggaggcacccccggaattgctctgccttgtgtcccacttctacccttctgggggcctggaggtggagtgggaactccggggtggcccagggggccgctctcagaaggccgaggggcagaggtggctctcggccctgcgccaccattccgatggctctgtcagcctctctgggcacttgcagccgcccccagtcaccactgagcagcatggggcacgctatgcctgtcgaattcaccatcccagcctgcctgcctcggggcgcagcgctgaggtcaccctggaggtagcaggtctttcagggccctcccttgaggacagcgtaggccttttcctgtctgcctttcttctgcttgggctcttcaaggcactgggctgggctgctgtctacctgtccacctgcaaggattcaaagaagaaagcagagtgagggcactcactgccatcctgtggaagccaccatcatctctggcccaagcttctgtagtagctccctaaaataataccctatcatctgctcctaatccctccaatctctctccactgagtggctggaatgcttttttttttttctttcacttatataagggataatttttctttttttttttttttgagacggagtctcactcttccgcccaggctgcagtgcagtggcatgatcttggcttactgcaacctccgcctcctgggttcaagcaattctgtggcttcagcctccggagtagctgggattacaggcacatgccaccacacccagtgaatttttgtatttttagtagagacggggtttcaccatgttggccaggctggtcttgaattcctgacctcaggtgatctgcccacctcagcctcccaaagtgctgggattacaggcgtgagccaccacaccaggcccgagaaatgcttttttaaaaaacacacatcttatggcattcaccttcttggagctctaggacagtggttctcaaaatttttttctctcaggacctcttaaaaatcatcaaggaccccaaaaagcttttgggtatgtgggttatagctatcaatatttatggtactagaacttaaaagtgagaaaaatttaaaacacgagaatacataggcacacattctattcatcgtgggaaccatggtgtcaatacatatcatgtagcttctgaaaaactccactgtacacttatagaatgaagaaggcaaaaaacttttttttttttttttttgagacggagtctcgctctgtcgcccaggctggagtgcagtggcgcgatctcggctcactgcaagctccgcctctcgggttcacgccattctcctgcctcagcctcccaagtagctcggactacaggcgtcctccaccatgcctggctaatattttgtattttttagtagagacggggtttcaccgtgttagccaggatggtctcgatctcctaacctggtgatccgcccgcctcggcctcccaaagtattgggattacccgcgtgagccaccgcgcccggctgcaaataatctttctttttttctttttttctgagacagagtctcgctctgttgcccaggctggagtgcagtggcacgatctcggctcacggcacgctccgcctcccgggttcacgccattctcctgcctcagcttcccgagtagctgggactacaggggcccgccaccacgcccggctaactttttgtgtttttagtagagacggggtttcaccgtgttagccaggatggtctcgatctcctgaccttgtgatctgcccgcctcggcctcccaaagtgctgggattacaggcgtgagccaccgcgcccggcggcgaaacacgatattgtactaacatcttaattttgttataaaatctcacaaaccccctgacatagtctcagagatctgtagggccgaggttacatttggagaacccgtactctagggccaaatccattcttcttgccctggctcacttgtcccccccaccgccccgcgctggagccactgcctagttcttcagccctagatggtgctcgccagacctcctctcaatgctcatcacacacagggctattcctttcctccaatgaaccaaacgcctcccgcccacctccaggtcccagtcctctgttccctttgcctggtccacccttgccctccctgggtcgcagacgaggtcggcctcgtcattccccgcagaccgccgcgcgtccctcttgtgcggttcaccacagttgtatttaagtgatcgtgtgagtcgtcgttaaatgcctgtctccccgcggatcatgggctcctcgaggacagggaccggcctgtctgtccactgctgtaaccccgcgccggcatagggacctaaggcccactggagggcgctcatcaagtagctgctggatgttgacgaaggaagcggcggcgcagctcagggatctccgagtcaggacggtcggccagacccacggggtaacgggtctaatcgtgtaggaataaagctgtattccagtgcttccaaa

SEQ ID NO: 136062 - DNA, 3684 bp, Artificial Sequence
  derived and/or modified sequence
ccaggagggcgcggtaaggctggggtatcctggtgagaactggagaggatctacccgggtccctgcctggccagtggggaaacaccggtcccccaggcaccttcacctaaccagagcggggatttccaccgcccctcatgccgccctttggaggaaagtgaaagtgaaaggaggaagaggaggcttcatggctgaggaggtcgcagcgccatgaagtccctgtctctgctcctcgctgtggctttgggcctggcgaccgccgtctcagcaggacccgcggtgatcgagtgttggttcgtggaggatgcgagcggaaagggcctggccaagagacccggtgcactgctgttgcgccagggaccgggggaaccgccgccccggccggacctcgaccctgagctctatctcagtgtacacgaccccgcgggcgccctccaggctgccttcaggcggtatccccggggcgcccccgcaccacactgcgagatgagccgcttcgtgcctctccccgcctctgcgaaatgggccagcggcctgacccccgcgcagaactgcccgcgggccctggatggggcttggctgatggtcagcatatccagcccagtcctcagcctctccagcctcttgcgaccacagccagagcctcagcaggagcctgttctcatcaccatggcaacagtagagatggggtttcaccatgttggccaggctgctctcgaactcctgacctcagtggtactgactgtcctcacccacacccctgcccctcgagtgagactgggacaagatgctctgctggacttgagctttgcctacatgccccccacctccgaggccgcctcatctctggctccgggtccccctccctttgggctagagtggcgacgccagcacctgggtaagggacatctgctcctggctgcaactcctgggctgaatggccagatgccagcagcccaagaaggggccgtggcatttgctgcttgggatgatgatgagccatggggcccatggaccggaaatgggaccttctggctgcctagagttcaaccctttcaggagggcacctatctggccaccatacacctgccatacctgcaaggacaggtcaccctggagcttgctgtgtacaaaccccccaaagtgtccctgatgccagcaacccttgcacgggccgccccaggggaggcacccccggaattgctctgccttgtgtcccacttctacccttctgggggcctggaggtggagtgggaactccggggtggcccagggggccgctctcagaaggccgaggggcagaggtggctctcggccctgcgccaccattccgatggctctgtcagcctctctgggcacttgcagccgcccccagtcaccactgagcagcatggggcacgctatgcctgtcgaattcaccatcccagcctgcctgcctcggggcgcagcgctgaggtcaccctggaggtagcaggtctttcagggccctcccttgaggacagcgtaggccttttcctgtctgcctttcttctgcttgggctcttcaaggcactgggctgggctgctgtctacctgtccacctgcaaggattcaaagaagaaagcagagtgagggcactcactgccatcctgtggaagccaccatcatctctggcccaagcttctgtagtagctccctaaaataataccctatcatctgctcctaatccctccaatctctctccactgagtggctggaatgcttttttttttttctttcacttatataagggataatttttctttttttttttttttgagacggagtctcactcttccgcccaggctgcagtgcagtggcatgatcttggcttactgcaacctccgcctcctgggttcaagcaattctgtggcttcagcctccggagtagctgggattacaggcacatgccaccacacccagtgaatttttgtatttttagtagagacggggtttcaccatgttggccaggctggtcttgaattcctgacctcaggtgatctgcccacctcagcctcccaaagtgctgggattacaggcgtgagccaccacaccaggcccgagaaatgcttttttaaaaaacacacatcttatggcattcaccttcttggagctctaggacagtggttctcaaaatttttttctctcaggacctcttaaaaatcatcaaggaccccaaaaagcttttgggtatgtgggttatagctatcaatatttatggtactagaacttaaaagtgagaaaaatttaaaacacgagaatacataggcacacattctattcatcgtgggaaccatggtgtcaatacatatcatgtagcttctgaaaaactccactgtacacttatagaatgaagaaggcaaaaaacttttttttttttttttttgagacggagtctcgctctgtcgcccaggctggagtgcagtggcgcgatctcggctcactgcaagctccgcctctcgggttcacgccattctcctgcctcagcctcccaagtagctcggactacaggcgtcctccaccatgcctggctaatattttgtattttttagtagagacggggtttcaccgtgttagccaggatggtctcgatctcctaacctggtgatccgcccgcctcggcctcccaaagtattgggattacccgcgtgagccaccgcgcccggctgcaaataatctttctttttttctttttttctgagacagagtctcgctctgttgcccaggctggagtgcagtggcacgatctcggctcacggcacgctccgcctcccgggttcacgccattctcctgcctcagcttcccgagtagctgggactacaggggcccgccaccacgcccggctaactttttgtgtttttagtagagacggggtttcaccgtgttagccaggatggtctcgatctcctgaccttgtgatctgcccgcctcggcctcccaaagtgctgggattacaggcgtgagccaccgcgcccggcggcgaaacacgatattgtactaacatcttaattttgttataaaatctcacaaaccccctgacatagtctcagagatctgtagggccgaggttacatttggagaacccgtactctagggccaaatccattcttcttgccctggctcacttgtcccccccaccgccccgcgctggagccactgcctagttcttcagccctagatggtgctcgccagacctcctctcaatgctcatcacacacagggctattcctttcctccaatgaaccaaacgcctcccgcccacctccaggtcccagtcctctgttccctttgcctggtccacccttgccctccctgggtcgcagacgaggtcggcctcgtcattccccgcagaccgccgcgcgtccctcttgtgcggttcaccacagttgtatttaagtgatcgtgtgagtcgtcgttaaatgcctgtctccccgcggatcatgggctcctcgaggacagggaccggcctgtctgtccactgctgtaaccccgcgccggcatagggacctaaggcccactggagggcgctcatcaagtagctgctggatgttgacgaaggaagcggcggcgcagctcagggatctccgagtcaggacggtcggccagacccacggggtaacgggtctaatcgtgtaggaataaagctgtattccagtgcttccaaa

SEQ ID NO: 136063 - DNA, 1693 bp, Artificial Sequence
  derived and/or modified sequence
ggggacgcggcacagatagggggaagccggagtaatggttttcgggcaagtggatgttggagagcacacacaggagttggggggcgggggagggcctggggttggggagggctcgaactcggggctgctgggtagtccaggagggcgcggtaaggctggggtgtcctggtgagaactggagaggatctacccgggtccctgcctggccagtggggaaacaccggtcccccaggcaccttcacctaaccagagcggggatttccaccgcccctcatgccgccctttggaggaaagtgaaagtgaaaggaggaagaggaggcttcatggctgaggaggtcgcagcgccatgaagtccctgtctctgctcctcgctgtggctttgggcctggcgaccgccgtctcagcaggacccgcggtgatcgagtgttggttcgtggaggatgcgagcggaaagggcctggccaagagacccggtgcactgctgttgcgccagggaccgggggaaccgccgccccggccggacctcgaccctgagctctatctcagtgtacacgaccccgcgggcgccctccaggctgccttcaggcggtatccccggggcgcccccgcaccacactgcgagatgagccgcttcgtgcctctccccgcctctgcgaaatgggccagcggcctgacccccgcgcagaactgcccgcgggccctggatggggcttggctgatggtcagcatatccagcccagtcctcagcctctccagcctcttgcgaccacagccagagcctcagcaggagcctgttctcatcaccatggcaacagtggtactgactgtcctcacccacacccctgcccctcgagtgagactgggacaagatgctctgctggacttgagctttgcctacatgccccccacctccgaggccgcctcatctctggctccgggtccccctccctttgggctagagtggcgacgccagcacctgggtaagggacatctgctcctggctgcaactcctgggctgaatggccagatgccagcagcccaagaaggggccgtggcatttgctgcttgggatgatgatgagccatggggcccatggaccggaaatgggaccttctggctgcctacagttcaaccctttcaggagggcacctatctggccaccatacacctgccatacctgcaaggacaggtcaccctggagcttgctgtgtacaaaccccccaaagtgtccctgatgccagcaacccttgcacgggccgccccaggggaggcacccccggaattgctctgccttgtgtcccacttctacccttctgggggcctggaggtggagtgggaactccggggtggcccagggggccgctctcagaaggccgaggggcagaggtggctctcggccctgcgccaccattccgatggctctgtcagcctctctgggcacttgcagccgcccccagtcaccactgagcagcatggggcacgctatgcctgtcgaattcaccatcccagcctgcctgcctcggggcgcagcgctgaggtcaccctggaggtagcaggtctttcagggccctcccttgaggacagcgtaggccttttcctgtctgcctttcttctgcttgggctcttcaaggcactgggctgggctgctgtctacctgtccacctgcaaggattcaaagaagcatgctacttaa

SEQ ID NO: 136064 - DNA, 1686 bp, Artificial Sequence
  derived and/or modified sequence
ccaggagggcgcggtaaggctggggtgtcctggtgagaactggagaggatctacccgggtccctgcctggccagtggggaaacaccggtcccccaggcaccttcacctaaccagagcggggatttccaccgcccctcatgccgccctttggaggaaagtgaaagtgaaaggaggaagaggaggcttcatggctgaggaggtcgcagcgccatgaagtccctgtctctgctcctcgctgtggctttgggcctggcgaccgccgtctcagcaggacccgcggtgatcgagtgttggttcgtggaggatgcgagcggaaagggcctggccaagagacccggtgcactgctgttgcgccagggaccgggggaaccgccgccccggccggacctcgaccctgagctctatctcagtgtacacgaccccgcgggcgccctccaggctgccttcaggcggtatccccggggcgcccccgcaccacactgcgagatgagccgcttcgtgcctctccccgcctctgcgaaatgggccagcggcctgacccccgcgcagaactgcccgcgggccctggatggggcttggctgatggtcagcatatccagcccagtcctcagcctctccagcctcttgcgaccacagccagagcctcagcaggagcctgttctcatcaccatggcaacagtagagatggggtttcaccatgttggccaggctgctctcgaactcctgacctcagtggtactgactgtcctcacccacacccctgcccctcgagtgagactgggacaagatgctctgctggacttgagctttgcctacatgccccccacctccgaggccgcctcatctctggctccgggtccccctccctttgggctagagtggcgacgccagcacctgggtaagggacatctgctcctggctgcaactcctgggctgaatggccagatgccagcagcccaagaaggggccgtggcatttgctgcttgggatgatgatgagccatggggcccatggaccggaaatgggaccttctggctgcctacagttcaaccctttcaggagggcacctatctggccaccatacacctgccatacctgcaaggacaggtcaccctggagcttgctgtgtacaaaccccccaaagtgtccctgatgccagcaacccttgcacgggccgccccaggggaggcacccccggaattgctctgccttgtgtcccacttctacccttctgggggcctggaggtggagtgggaactccggggtggcccagggggccgctctcagaaggccgaggggcagaggtggctctcggccctgcgccaccattccgatggctctgtcagcctctctgggcacttgcagccgcccccagtcaccactgagcagcatggggcacgctatgcctgtcgaattcaccatcccagcctgcctgcctcggggcgcagcgctgaggtcaccctggaggtagcaggtctttcagggccctcccttgaggacagcgtaggccttttcctgtctgcctttcttctgcttgggctcttcaaggcactgggctgggctgctgtctacctgtccacctgcaaggattcaaagaagaaagcagagtgagggcactcactgccatcctgtggaagccaccatcatctctggcccaagcttctgtagtagctccctaaaataata

SEQ ID NO: 136065 - DNA, 1665 bp, Artificial Sequence
  derived and/or modified sequence
ggagtaatggttttcgggcaagtggatgttggagagcacacacaggagttggggggcgggggagggcctggggttggggagggctcgaactcggggctgctgggtagtccaggagggcgcggtaaggctggggtatcctggtgagaactggagaggatctacccgggtccctgcctggccagtggggaaacaccggtcccccaggcaccttcacctaaccagagcggggatttccaccgcccctcatgccgccctttggaggaaagtgaaagtgaaaggaggaagaggaggctaaatggctgaggaggtcgcagcgccatgaagtccctgtctctgctcctcgctgtggctttgggcctggcgaccgccgtctcagcaggacccgcggtgatcgagtgttggttcgtggaggatgcgagcggaaagggcctggccaagagacccggtgcactgctgttgcgccagggaccgggggaaccgccgccccggccggacctcgaccctgagctctatctcagtgtacacgaccccgcgggcgccctccaggctgccttcaggcggtatccccggggcgcccccgcaccacactgcgagatgagccgcttcgtgcctctccccgcctctgcgaaatgggccagcggcctgacccccgcgcagaactgcccgcgggccctggatggggcttggctgatggtcagcatatccagcccagtcctcagcctctccagcctcttgcgaccacagccagagcctcagcaggagcctgttctcatcaccatggcaacagtggtactgactgtcctcacccacacccctgcccctcgagtgagactgggacaagatgctctgctggacttgagctttgcctacatgccccccacctccgaggccgcctcatctctggctccgggtccccctccctttgggctagagtggcgacgccagcacctgggtaagggacatctgctcctggctgcaactcctgggctgaatggccagatgccagcagcccaagaaggggccgtggcatttgctgcttgggatgatgatgagccatggggcccatggaccggaaatgggaccttctggctgcctagagttcaaccctttcaggagggcacctatctggccaccatacacctgccatacctgcaaggacaggtcaccctggagcttgctgtgtacaaaccccccaaagtgtccctgatgccagcaacccttgcacgggccgccccaggggaggcacccccggaattgctctgccttgtgtcccacttctacccttctgggggcctggaggtggagtgggaactccggggtggcccagggggccgctctcagaaggccgaggggcagaggtggctctcggccctgcgccaccattccgatggctctgtcagcctctctgggcacttgcagccgcccccagtcaccactgagcagcatggggcacgctatgcctgtcgaattcaccatcccagcctgcctgcctcggggcgcagcgctgaggtcaccctggaggtagcaggtctttcagggccctcccttgaggacagcgtaggccttttcctgtctgcctttcttctgcttgggctcttcaaggcactgggctgggctgctgtctacctgtccacctgcaaggattcaaagaagcatgctacttaa

SEQ ID NO: 136066 - DNA, 1665 bp, Artificial Sequence
  derived and/or modified sequence
ggagtaatggttttcgggcaagtggatgttggagagcacacacaggagttggggggcgggggagggcctggggttggggagggctcgaactcggggctgctgggtagtccaggagggcgcggtaaggctggggtatcctggtgagaactggagaggatctacccgggtccctgcctggccagtggggaaacaccggtcccccaggcaccttcacctaaccagagcggggatttccaccgcccctcatgccgccctttggaggaaagtgaaagtgaaaggaggaagaggaggcttcatggctgaggaggtcgcagcgccatgaagtccctgtctctgctcctcgctgtggctttgggcctggcgaccgccgtctcagcaggacccgcggtgatcgagtgttggttcgtggaggatgcgagcggaaagggcctggccaagagacccggtgcactgctgttgcgccagggaccgggggaaccgccgccccggccggacctcgaccctgagctctatctcagtgtacacgaccccgcgggcgccctccaggctgccttcaggcggtatccccggggcgcccccgcaccacactgcgagatgagccgcttcgtgcctctccccgcctctgcgaaatgggccagcggcctgacccccgcgcagaactgcccgcgggccctggatggggcttggctgatggtcagcatatccagcccagtcctcagcctctccagcctcttgcgaccacagccagagcctcagcaggagcctgttctcatcaccatggcaacagtggtactgactgtcctcacccacacccctgcccctcgagtgagactgggacaagatgctctgctggacttgagctttgcctacatgccccccacctccgaggccgcctcatctctggctccgggtccccctccctttgggctagagtggcgacgccagcacctgggtaagggacatctgctcctggctgcaactcctgggctgaatggccagatgccagcagcccaagaaggggccgtggcatttgctgcttgggatgatgatgagccatggggcccatggaccggaaatgggaccttctggctgcctagagttcaaccctttcaggagggcacctatctggccaccatacacctgccatacctgcaaggacaggtcaccctggagcttgctgtgtacaaaccccccaaagtgtccctgatgccagcaacccttgcacgggccgccccaggggaggcacccccggaattgctctgccttgtgtcccacttctacccttctgggggcctggaggtggagtgggaactccggggtggcccagggggccgctctcagaaggccgaggggcagaggtggctctcggccctgcgccaccattccgatggctctgtcagcctctctgggcacttgcagccgcccccagtcaccactgagcagcatggggcacgctatgcctgtcgaattcaccatcccagcctgcctgcctcggggcgcagcgctgaggtcaccctggaggtagcaggtctttcagggccctcccttgaggacagcgtaggccttttcctgtctgcctttcttctgcttgggctcttcaaggcactgggctgggctgctgtctacctgtccacctgcaaggattcaaagaagcatgctacttaa

SEQ ID NO: 136067 - protein, 346 aa, Artificial Sequence
  derived and/or modified sequence
MESVSCSAAAVRTGDMESQRDLSLVPERLQRREQERQLEVERRKQKRQNQEVEKENSHFFVATFVRERAAVEELLERAESVERLEEAASRLQGLQKLINDSVFFLAAYDLRQGQEALARLQAALAERRRGLQPKKRFAFKTRGKDAASSTKVDAAPGIPPAVESIQDSPLPKKAEGDLGPSWVCGFSNLESQVLEKRASELHQRDVLLTELSNCTVRLYGNPNTLRLTKAHSCKLLCGPVSTSVFLEDCSDCVLAVACQQLRIHSTKDTRIFLQVTSRAIVEDCSGIQFAPYTWSYPEIDKDFESSGLDRSKNNWNDVDDFNWLARDMASPNWSILPEEERNIQWD

SEQ ID NO: 136068 - DNA, 1041 bp, Artificial Sequence
  derived and/or modified sequence
atggaaagcgtctcttgctccgctgcagcggtccgcacaggtgatatggaaagtcagcgcgacctgtctcttgtcccagagagattacaaaggagagagcaagaacgtcaattggaggtcgagcgcagaaaacagaagagacagaatcaggaagtggaaaaagagaattcccattttttcgtagctactttcgtcagagaacgcgcggctgtcgaggagctccttgagagggccgaatcggtggaaaggctggaagaggccgcaagccggttacaaggcttgcagaagctcatcaacgattcagtgttcttcctggccgcctacgatctacggcaaggacaggaggctctggcgcgcctccaggccgccctggctgagcggcggcggggactgcagccaaagaagaggtttgcatttaaaactcgaggaaaagatgcggcctctagcacaaaggtggacgctgctcctggtattccacctgcggtggaatcaatccaagacagccctctccctaagaaggccgagggcgatcttggacccagctgggtgtgcggcttttccaacctagaaagtcaggtcttggagaaacgggcctcagagttgcatcagcgcgatgtgcttctaaccgagctaagcaactgcaccgttagattgtacggtaacccaaatacactccggttgactaaggcccattcctgtaaactgctgtgcggaccggtctcgacatccgtttttcttgaggactgctctgattgcgttttggctgtggcgtgccagcagctccgaatccactcaacaaaggacacaaggatttttctgcaggtcacttctcgggctatcgtggaggactgcagcggaattcagtttgctccctatacctggtcctacccagagatcgacaaggacttcgaatctagtggattggatcgcagcaaaaacaactggaatgacgtcgatgacttcaattggctggcccgagatatggcctcccccaattggagtattcttcccgaagaagagcggaatattcagtgggattag

SEQ ID NO: 136069 - DNA, 1041 bp, Artificial Sequence
  derived and/or modified sequence
atggagtccgtgagctgcagtgctgcagcggtcaggaccggcgacatggagtcacagagagaccttagtcttgtgccggagagactccagagacgggagcaggagcggcagctggaggtggagcgccggaaacagaagcgccagaatcaggaggttgaaaaagaaaatagccatttctttgtagccaccttcgtgagagaacgagccgctgtagaagagcttctagagcgcgctgaatccgttgagaggctcgaggaggctgcgtctaggctgcagggactccaaaagttgattaacgattcagtttttttcttggctgcatacgatttgcgccagggccaggaagcactggctcggctgcaggccgcattggcggagagacgccggggcttgcagccgaagaagcggtttgccttcaagaccagaggtaaagatgccgcatcaagcactaaagtggacgctgccccagggattcctcccgctgttgaaagtatccaagacagtcctctgcccaagaaagccgaaggcgacctggggccctcatgggtctgcgggttttccaaccttgaatctcaggtgttagaaaaacgtgcatctgaactgcatcaaagggacgtcctcttgacagaactgtcaaattgcacagtgcggctctacggtaacccgaacactctgagattgaccaaagcccatagctgtaagctgctgtgtggtcctgtctctacctccgtgttcttggaggactgtagtgactgcgtgctcgcagtcgcgtgtcagcagttgcgcatccactctacaaaggacaccagaatttttctgcaagtgacgtcaagagcaatcgtcgaagactgcagcggaatccagttcgctccctacacatggagctacccagagattgacaaagactttgagtccagtggcctggaccgctccaaaaacaactggaatgatgtggatgatttcaattggctggcaagggacatggccagccccaactggagcatattaccagaagaggagcgaaatatccagtgggattag

SEQ ID NO: 136070 - DNA, 1616 bp, Artificial Sequence
  derived and/or modified sequence
gagagaggaagcttgaagccaatatggagtccgtcagttgctccgctgctgctgtcaggaccggagacatggagtcccagcgggacctgagcctggtgcctgagcggcttcagagacgcgaacaagaacggcagctggaagttgaaaggcggaaacaaaagcggcagaaccaggaggtagagaaggagaacagccactttttcgtcgccacctttgttcgggagcgagcggccgtggaagagcttctggagcgcgcggagtcggtcgagcggctggaggaggcggcctctcggctccaggggctgcagaaactaatcaacgactcagtttttttcctagccgcttacgacctgcggcagggacaagaggcgctggcgcggctgcaggcggccttggccgagcggcgccgggggctgcagcccaagaagcgtttcgctttcaagacccggggaaaggatgctgcttcgtctaccaaagtagacgcggctcctggcatccccccggcagttgaaagcatacaggactccccgctgcccaagaaggcggaaggagacctcggccccagctgggtctgcggtttctccaacctggagtcccaagtcttggagaagagagccagcgagttgcaccagcgcgacgttcttttgaccgaactgagcaactgcacggtcagactgtatggaaatcccaacaccctgcggctaaccaaggcccacagctgcaagctgctctgcggtccggtgtctacctctgttttcctggaggactgcagtgactgcgtgctggcagtggcctgccaacagctccgcatacacagtacgaaagacacccgcatcttcctgcaggtgaccagcagggccatcgtggaggactgcagtgggatccagttcgccccttacacctggagctacccggagatcgacaaggacttcgagagctctggtttagataggagcaaaaataactggaacgatgttgacgattttaactggctggcccgggatatggcctccccaaactggagtattcttcctgaagaggagcgaaatatccagtgggactaagcagttgtcactctgttcttcactcctaccaaatactttccacgttggactttcccccttattgggtctcgaagtttacttattgtcacactgtgtatgttttcagcattttaaggctagagattgtaatgggctcctacttgtaatttccattaaattcgtaacaggtataacactaaagcatttttgctattttcgtcatgcctttgagactgagtcttactccgtcccccagcgtggtggcgcgctgggattacaggcgcgcgccaccacgcgaacttgtatttttagtagagacggggtttcgccatgttgtccgggctgctctcgaactcctgacctcaggtgatccacccgcttcagcttcccaaagtgctggcattacaggcgtgagccaccacgccagggctttatttatttatttttaccacaatagtttgaagcagtaagggggaaggagggtgattatattgctttgtaatggtttgtgatacttgaaacatcacggtgcataataaagtaggtctgcagtaaatacatgggtttgtttgg

SEQ ID NO: 136071 - DNA, 1041 bp, Artificial Sequence
  derived and/or modified sequence
atggagagcgtgtcctgcagcgctgctgctgtgaggactggagacatggagagccagagggacctgagcctggtgcctgagcggctgcagaggcgggagcaggagcggcagctggaggtggagaggaggaagcagaagaggcagaaccaggaggtggagaaggagaacagccacttctttgtggccacctttgtgcgggagagagctgctgtggaggagctgctggagcgggcagagagcgtggagcggctggaggaggccgccagccggctgcagggcctgcagaagctgatcaatgattctgtgttcttcctggccgcctatgacctgcggcagggccaggaggccctggcccggctgcaggccgccctggccgagcggcggcggggcctgcagcccaagaagagatttgccttcaagacccggggcaaggatgctgccagcagcaccaaggtggatgctgcccctggcatccccccagctgtggagagcatccaggacagccccctgcccaagaaggccgagggggacctgggccccagctgggtgtgtggcttcagcaacctggagagccaggtgctggagaagagggccagcgagctgcaccagagagatgtgctgctgacagagctgagcaactgcaccgtgcggctgtatggcaaccccaacaccctgcggctgaccaaggcccacagctgcaagctgctgtgtggccctgtgtccacctctgtgttcctggaggactgcagcgactgtgtgctggccgtggcctgccagcagctgcgcatccacagcaccaaggacacccgcatcttcctgcaggtgaccagccgggccatcgtggaggactgcagcggcatccagtttgccccctacacctggagctacccagaaattgacaaggactttgagagcagcggcctggacaggagcaagaacaactggaatgatgtggatgacttcaactggctggcccgggacatggccagccccaactggagcatcctgcctgaggaggagaggaacatccagtgggactag

SEQ ID NO: 136072 - DNA, 1041 bp, Artificial Sequence
  derived and/or modified sequence
atggagagcgtgagctgcagcgccgccgccgtgcggaccggcgacatggagagccagagagatctgagtctcgtgcctgagcgccttcagaggcgtgagcaagagcggcagctggaggtggagagaaggaaacagaagcggcagaaccaggaagtggaaaaggagaactcacactttttcgttgccactttcgtgagggaaagagccgcggtcgaggagctgctggagcgtgccgaatctgtggagcgcctggaagaagccgctagccggctccaggggcttcagaagttgattaatgactcagtctttttcctggcggcatatgatctccgacagggccaggaagctctggcaaggttacaagcagcccttgcagagcgccgcagggggctgcaacctaagaaaaggtttgcattcaagaccaggggtaaggacgccgccagctcaaccaaggtggatgcagctcctgggattcccccagctgtggagtccatccaggattctccgttgcccaaaaaggcggaaggtgatcttggaccaagctgggtgtgtggtttttccaatctggaatctcaagtcctcgagaagagagcatccgagcttcatcagagagatgtgctgttaactgaactctccaactgtaccgtgcgattgtacgggaatcccaacacattaaggctgacaaaggcgcactcatgcaagcttctctgcggccccgtctccacaagcgtttttttggaggattgtagtgattgtgtactcgccgtggcgtgtcagcaattaagaattcactccaccaaggataccagaatttttctgcaggtgactagtcgtgctatagtcgaggactgcagcggtatccagtttgctccgtatacgtggagctacccggaaatcgacaaagatttcgaaagtagcggccttgatcggtcaaaaaataactggaatgatgttgacgacttcaattggcttgcaagagacatggcgtcgccaaattggtctatcttgcctgaggaggagagaaatattcagtgggactag

SEQ ID NO: 136073 - DNA, 1041 bp, Artificial Sequence
  derived and/or modified sequence
atggagagcgtgagctgcagcgccgccgccgtgcggaccggcgacatggaatcccaaagagatctgtccctggtgcccgagagactgcagcgtagggaacaggagagacagctggaggtggaaagaagaaaacagaagcgtcaaaatcaggaagtggaaaaggagaatagccacttcttcgttgccaccttcgtccgcgagcgcgctgccgtggaggaattgctcgagagagccgaatcagtagagaggctagaggaggctgcttcaagactgcaggggctgcagaaattaataaatgatagtgttttcttcttagcggcatacgacctgagacagggccaggaagcactggcacgtctgcaagcggccctggccgagcgcagacgggggctgcagccaaaaaaaagatttgcctttaagaccagaggcaaggacgctgccagttccaccaaggtcgacgccgctcccggtatccctcccgccgtagaatctatccaggacagccccctccctaaaaaagcagagggagatctcggccccagctgggtttgcggcttctccaatctggagagccaagtgctggagaaaagggcatctgagctgcaccagcgcgatgtgttgttgaccgagctgtccaattgcaccgtccgactttacggaaatcccaacacgcttagactgacaaaggcacacagctgcaaactgttgtgtgggcctgtgagcaccagcgtctttctggaggattgctcagactgtgttctggccgtggcatgtcagcagctgaggatccattcaacaaaggatacccgcatctttctgcaggtgacaagtcgtgccattgtagaagattgtagcggcatccaattcgctccttatacttggagctatccggaaatagataaagacttcgagtcttccggactggacagaagtaaaaataactggaacgatgtcgacgacttcaattggcttgctcgagacatggcttctccaaactggagcattctgccagaggaagagcgcaacatccagtgggactag

SEQ ID NO: 136074 - DNA, 2137 bp, Artificial Sequence
  derived and/or modified sequence
ctctcccatcgcagtgccccttgccttctcctgccctagtaactgcctgcggggatccaggagcccccaggccgcgccgaactgcagtggataggggggaggggggcggtaaggatgagggctacggggaggcagaaatgggttgggggaaggggtggtggaagggaaaagaaaaaaccggaggcatgcaagcggctccccagccagctgttccagctgctgcttcctccggcgcgggccaggcggtgcaatattcccccccgctccatctttctcaccactacctgtccccccaacccaccacacgcactcatccctcccacccacacccctagtagcggatctccggcctgtaagggggtagtagggaggagctggggggagggggaggcctgcgagtttctaaccttgttcttataaacaaacccacatgtgcagctgccgctgctgcaactcaccccacaatcccggatataagtcctgcccctttaagaggaaaaaaaagattcccccgcctgcctcccaccccacccatccacaagagagaggaagcttgaagccaatatggagtccgtcagttgctccgctgctgctgtcaggaccggagacatggagtcccagcgggacctgagcctggtgcctgagcggcttcagagacgcgaacaagaacggcagctggaagttgaaaggcggaaacaaaagcggcagaaccaggaggtagagaaggagaacagccactttttcgtcgccacctttgttcgggagcgagcggccgtggaagagcttctggagcgcgcggagtcggtcgagcggctggaggaggcggcctctcggctccaggggctgcagaaactaatcaacgactcagtttttttcctagccgcttacgacctgcggcagggacaagaggcgctggcgcggctgcaggcggccttggccgagcggcgccgggggctgcagcccaagaagcgtttcgctttcaagacccggggaaaggatgctgcttcgtctaccaaagtagacgcggctcctggcatccccccggcagttgaaagcatacaggactccccgctgcccaagaaggcggaaggagacctcggccccagctgggtctgcggtttctccaacctggagtcccaagtcttggagaagagagccagcgagttgcaccagcgcgacgttcttttgaccgaactgagcaactgcacggtcagactgtatggaaatcccaacaccctgcggctaaccaaggcccacagctgcaagctgctctgcggtccggtgtctacctctgttttcctggaggactgcagtgactgcgtgctggcagtggcctgccaacagctccgcatacacagtacgaaagacacccgcatcttcctgcaggtgaccagcagggccatcgtggaggactgcagtgggatccagttcgccccttacacctggagctacccggagatcgacaaggacttcgagagctctggtttagataggagcaaaaataactggaacgatgttgacgattttaactggctggcccgggatatggcctccccaaactggagtattcttcctgaagaggagcgaaatatccagtgggactaagcagttgtcactctgttcttcactcctaccaaatactttccacgttggactttcccccttattgggtctcgaagtttacttattgtcacactgtgtatgttttcagcattttaaggctagagattgtaatgggctcctacttgtaatttccattaaattcgtaacaggtataacactaaagcatttttgctattttcgtcatgcctttgagactgagtcttactccgtcccccagcgtggtggcgcgctgggattacaggcgcgcgccaccacgcgaacttgtatttttagtagagacggggtttcgccatgttgtccgggctgctctcgaactcctgacctcaggtgatccacccgcttcagcttcccaaagtgctggcattacaggcgtgagccaccacgccagggctttatttatttatttttaccacaatagtttgaagcagtaagggggaaggagggtgattatattgctttgtaatggtttgtgatacttgaaacatcacggtgcataataaagtaggtctgcagt

SEQ ID NO: 136075 - DNA, 1041 bp, Artificial Sequence
  derived and/or modified sequence
atggaatctgtctcgtgcagtgctgctgccgtgaggactggcgacatggagtcacagcgggatctttccctagttcccgaaagactccagaggagagagcaggagcggcagctcgaggttgaacgcaggaagcagaagaggcagaaccaggaagtcgagaaagaaaacagccattttttcgtggccacattcgtgcgtgagcgggcagctgtcgaggaactgctggagagggctgagtccgtggaaagattggaggaagctgcctctcggctccaggggctacagaaactgatcaatgattcagtctttttcctcgccgcttacgatttgcggcaggggcaggaagccctggcgaggcttcaggccgctttagcggaacgtcgtaggggactccagccaaagaagagatttgcatttaaaacaagggggaaagacgctgcttccagcaccaaggtggacgccgctccaggcattcctccagccgtcgagtccattcaggattcacccttgcctaagaaggcagagggtgacctcggtccctcttgggtctgcgggttctcgaatctggagtcacaggtgcttgagaagagagcgtcggaactgcatcagcgggacgtactcctgactgagctgtctaattgcaccgtgcgtctgtacggaaacccgaatactctccgtctaactaaagctcactcctgtaaacttttatgcgggcctgtcagcactagtgtgtttctggaggactgctcagattgtgtgctcgccgttgcctgccaacagttaagaatccacagcaccaaagatacccgcattttcctgcaggtgactagtcgggcaattgttgaggactgttctggcatccagttcgctccctacacatggagctatcctgagatcgataaggattttgaatcctccggtctcgacaggtctaaaaacaattggaacgacgtagatgattttaattggctggccagagacatggccagccccaactggagcattttacccgaagaagaaagaaatatccagtgggattag

SEQ ID NO: 136076 - DNA, 1041 bp, Artificial Sequence
  derived and/or modified sequence
atggagtccgtgagctgcagcgcagctgcagttcgcaccggcgacatggagtcccaacgggacctgtcattagtgcccgaacggctccaaagacgcgaacaggagcgtcaactcgaggttgaacggagaaagcagaaaaggcagaatcaggaggtggaaaaagagaatagtcactttttcgtagcaacattcgtcagagagcgtgctgcagtggaagaactccttgagcgcgcagagtctgtggagagattggaagaggccgctagtcgcctgcaaggactgcaaaaactcattaatgattcggttttctttcttgccgcttatgacctgcgccagggccaggaggccctagcccgattacaggccgcactggccgagagaaggaggggcttacaaccgaagaagagattcgcctttaagactcgcggtaaggacgccgcatcatccactaaggttgatgcggctcctggaattcccccagccgtggagtctatccaggattcacccctgcctaaaaaagctgaaggagatctcggtccgtcatgggtctgtggtttcagcaacctcgagtcacaagtcctggaaaaaagagcttccgagctgcatcagagggatgtactcttaacagaattaagcaattgtaccgtccggctgtatgggaatccaaatacgcttcggcttacaaaggcccactcatgcaagctgctgtgcgggccagtctctaccagtgtcttccttgaggattgcagcgattgcgtgttggccgtggcctgccaacagctgagaatccatagtactaaggacacccgcatattcctccaggtgacttcaagagcaatagtggaagattgctctggaattcaattcgccccttatacgtggtcatatccggagattgacaaggatttcgaatcatccggactcgataggagtaaaaataattggaatgacgtcgacgatttcaattggttggccagagacatggcttctcccaactggtctatcctgccggaggaggaacggaatatccaatgggattag

SEQ ID NO: 136077 - DNA, 1041 bp, Artificial Sequence
  derived and/or modified sequence
atggagagcgtgagctgcagcgccgccgccgtgagaaccggcgacatggagagccagagagacctgagcctggtgcccgagagactgcagagaagagagcaggagagacagctggaggtggagagaagaaagcagaagagacagaaccaggaggtggagaaggagaacagccacttcttcgtggccaccttcgtgagagagagagccgccgtggaggagctgctggagagagccgagagcgtggagagactggaggaggccgccagcagactgcagggcctgcagaagctgatcaacgacagcgtgttcttcctggccgcctacgacctgagacagggccaggaggccctggccagactgcaggccgccctggccgagagaagaagaggcctgcagcccaagaagagattcgccttcaagaccagaggcaaggacgccgccagcagcaccaaggtggacgccgcccccggcatcccccccgccgtggagagcatccaggacagccccctgcccaagaaggccgagggcgacctgggccccagctgggtgtgcggcttcagcaacctggagagccaggtgctggagaagagagccagcgagctgcaccagagagacgtgctgctgaccgagctgagcaactgcaccgtgagactgtacggcaaccccaacaccctgagactgaccaaggcccacagctgcaagctgctgtgcggccccgtgagcaccagcgtgttcctggaggactgcagcgactgcgtgctggccgtggcctgccagcagctgagaatccacagcaccaaggacaccagaatcttcctgcaggtgaccagcagagccatcgtggaggactgcagcggcatccagttcgccccctacacctggagctaccccgagatcgacaaggacttcgagagcagcggcctggacagaagcaagaacaactggaacgacgtggacgacttcaactggctggccagagacatggccagccccaactggagcatcctgcccgaggaggagagaaacatccagtgggactag

SEQ ID NO: 136078 - protein, 339 aa, Artificial Sequence
  derived and/or modified sequence
MDQNNSLPPYAQGLASPQGAMTPGIPIFSPMMPYGTGLTPQPIQNTNSLSILEEQQRQQQQQQQQQQQQQQQQQQQQQQQQQQQQQQQQQQQQQQAVAAAAVQQSTSQQATQGTSGQAPQLFHSQTLTTAPLPGTTPLYPSPMTPMTPITPATPASESSGIVPQLQNIVSTVNLGCKLDLKTIALRARNAEYNPKRFAAVIMRIREPRTTALIFSSGKMVCTGAKSEEQSRLAARKYARVVQKLGFPAKFLDFKIQNMVGSCDVKFPIRLEGLVLTHQQFSSYEPELFPGLIYRMIKPRIVLLIFVSGKVVLTGAKVRAEIYEAFENIYPILKGFRKTT

SEQ ID NO: 136079 - protein, 316 aa, Artificial Sequence
  derived and/or modified sequence
MDQNNSLPPYAQGLASPQGAMTPGIPIFSPMMPYGTGLTPQPIQNTNSLSILEEQQRQQQQQQQQQQQQQQQAVAAAAVQQSTSQQATQGTSGQAPQLFHSQTLTTAPLPGTTPLYPSPMTPMTPITPATPASESSGIVPQLQNIVSTVNLGCKLDLKTIALRARNAEYNPKRFAAVIMRIREPRTTALIFSSGKMVCTGAKSEEQSRLAARKYARVVQKLGFPAKFLDFKIQNMVGSCDVKFPIRLEGLVLTHQQFSSYEPELFPGLIYRMIKPRIVLLIFVSGKVVLTGAKVRAEIYEAFENIYPILKGFRKTT

SEQ ID NO: 136080 - protein, 208 aa, Artificial Sequence
  derived and/or modified sequence
MDQNNSLPPYAQGLASPQGAMTPGIPIFSPMMPYGTGLTPQPIQNTNSLSILEEQQRQQQQQQQQQQQQQQQQQQQQQQQQQQQQQQQQQQQQQQAVAAAAVQQSTSQQATQGTSGQAPQLFHSQTLTTAPLPGTTPLYPSPMTPMTPITPATPASESSGIVPQLQNIVSTVNLGCKLDLKTIALRARNAEYNPKRFAAVIMRIREPR

SEQ ID NO: 136081 - protein, 151 aa, Artificial Sequence [sequence omitted]

SEQ ID NO: 136082 - protein, 101 aa, Artificial Sequence
  derived and/or modified sequence
  misc_feature (1)..(1): Xaa can be any naturally occurring amino acid
XEEQSRLAARKYARVVQKLGFPAKFLDFKIQNMVGSCDVKFPISYEPELFPGLIYRMIKPRIVLLIFVSGKVVLTGAKVRAEIYEAFENIYPILKGFRKTT

SEQ ID NO: 136083 - DNA, 1921 bp, Artificial Sequence
  derived and/or modified sequence
ggcggaagtgacattatcaacgcgcgccaggggttcagtgaggtcgggcaggttcgctgtggcgggcgcctgggccgccggctgtttaacttcgcttccgctggcccatagtgatctttgcagtgacccagcatcactgtttcttggcgtgtgaagataacccaaggaattgaggaagttgctgagaagagtgtgctggagatgctctaggaaaaaattgaatagtgagacgagttccagcgcaagggtttctggtttgccaagaagaaagtgaacatcatggatcagaacaacagcctgccaccttacgctcagggcttggcctcccctcagggtgccatgactcccggaatccctatctttagtccaatgatgccttatggcactggactgaccccacagcctattcagaacaccaatagtctgtctattttggaagagcaacaaaggcagcagcagcaacaacaacagcagcagcagcagcagcagcagcaacagcaacagcagcagcagcagcagcagcagcagcagcagcagcagcagcagcagcagcagcagcaacaggcagtggcagctgcagccgttcagcagtcaacgtcccagcaggcaacacagggaacctcaggccaggcaccacagctcttccactcacagactctcacaactgcacccttgccgggcaccactccactgtatccctcccccatgactcccatgacccccatcactcctgccacgccagcttcggagagttctgggattgtaccgcagctgcaaaatattgtatccacagtgaatcttggttgtaaacttgacctaaagaccattgcacttcgtgcccgaaacgccgaatataatcccaagcggtttgctgcggtaatcatgaggataagagagccacgaaccacggcactgattttcagttctgggaaaatggtgtgcacaggagccaagagtgaagaacagtccagactggcagcaagaaaatatgctagagttgtacagaagttgggttttccagctaagttcttggacttcaagattcagaatatggtggggagctgtgatgtgaagtttcctataaggttagaaggccttgtgctcacccaccaacaatttagtagttatgagccagagttatttcctggtttaatctacagaatgatcaaacccagaattgttctccttatttttgtttctggaaaagttgtattaacaggtgctaaagtcagagcagaaatttatgaagcatttgaaaacatctaccctattctaaagggattcaggaagacgacgtaatggctctcatgtacccttgcctcccccacccccttctttttttttttttaaacaaatcagtttgttttggtacctttaaatggtggtgttgtgagaagatggatgttgagttgcagggtgtggcaccaggtgatgcccttctgtaagtgcccaccgcgggatgccgggaaggggcattatttgtgcactgagaacaccgcgcagcgtgactgtgagttgctcataccgtgctgctatctgggcagcgctgcccatttatttatatgtagattttaaacactgctgttgacaagttggtttgagggagaaaactttaagtgttaaagccacctctataattgattggactttttaattttaatgtttttccccatgaaccacagtttttatatttctaccagaaaagtaaaaatcttttttaaaagtgttgtttttctaatttataactcctaggggttatttctgtgccagacacattccacctctccagtattgcaggacagaatatatgtgttaatgaaaatgaatggctgtacatatttttttctttcttcagagtactctgtacaataaatgcagtttataaaagtgttagattgttgttaaaaaaaaaaaaaaaaaa

SEQ ID NO: 136084 - DNA, 627 bp, Artificial Sequence
  derived and/or modified sequence
atggaccagaacaacagcctgcccccctacgcccagggcctggccagcccccagggcgccatgacccccggcatccccatcttcagccccatgatgccctacggcaccggcctgaccccccagcccatccagaacaccaacagcctgagcatcctggaggagcagcagagacagcagcagcagcagcagcagcagcagcagcagcagcagcagcagcagcagcagcagcagcagcagcagcagcagcagcagcagcagcagcagcagcagcagcagcagcagcaggccgtggccgccgccgccgtgcagcagagcaccagccagcaggccacccagggcaccagcggccaggccccccagctgttccacagccagaccctgaccaccgcccccctgcccggcaccacccccctgtaccccagccccatgacccccatgacccccatcacccccgccacccccgccagcgagagcagcggcatcgtgccccagctgcagaacatcgtgagcaccgtgaacctgggctgcaagctggacctgaagaccatcgccctgagagccagaaacgccgagtacaaccccaagagattcgccgccgtgatcatgagaatcagagagcccagatag

SEQ ID NO: 136085 - DNA, 456 bp, Artificial Sequence
  derived and/or modified sequence
atggaccagaacaacagcctgcccccctacgcccagggcctggccagcccccagggcgccatgacccccggcatccccatcttcagccccatgatgccctacggcaccggcctgaccccccagcccatccagaacaccaacagcctgagcatcctggaggagcagcagagacagcagcagcagcagcagcagcagcagcagcagcagcagcagcagcagcagcagcagcagcagcagcagcagcagcagcagcagcagcagcagcagcagcagcagcagcagcaggccgtggccgccgccgccgtgcagcagagcaccagccagcaggccacccagggcaccagcggccaggccccccagctgttccacagccagaccctgaccaccgcccccctgcccggcaccacccccctgtaccccagccccatgacccccatgacccccatcaccccctag

SEQ ID NO: 136086 - DNA, 1020 bp, Artificial Sequence
  derived and/or modified sequence
atggaccagaacaacagtctgcccccctacgctcaaggactcgcctccccacaaggagctatgactcccggcattcctatcttcagccccatgatgccatacgggaccggcctaacaccacagccaatccaaaatactaactcacttagcatactggaggagcagcaacgtcagcagcaacaacagcagcaacaacaacagcagcaacagcaacaacagcaacagcagcagcagcaacagcaacagcaacagcagcagcagcagcagcagcaacagcagcagcaagcagtagctgctgctgctgtacagcagagtactagccagcaggccacccaaggtacttccggccaagcacctcaactgtttcatagccagactctgactactgcgcccctgcccgggaccactcccctgtacccctctcctatgacacctatgacacccatcaccccagcaacccctgcaagtgagtcatccgggattgtgccccagctccagaacatcgtgagtaccgtgaacctgggctgcaagttagatctcaagactattgcactcagggcccgcaatgctgaatacaaccccaagcggttcgctgcagttatcatgcgaattcgggaacctaggaccaccgcgcttatatttagcagcggcaagatggtttgcactggcgccaaatccgaggaacaaagtagactggctgctcggaaatacgccagggtagttcagaaattgggattccccgccaagtttctcgacttcaagatccaaaatatggtcgggtcttgcgatgtgaagttccccattagactcgagggcctcgttttgacccatcagcaattttccagctatgaacctgaactctttcccggtctcatttaccgtatgattaagccacggattgtgctcctgattttcgtgagcgggaaagtggtgctcacaggagcgaaggttagagccgagatttacgaggccttcgagaatatttatcccatcctgaaagggttccgaaagaccacttag

SEQ ID NO: 136087 - DNA, 1020 bp, Artificial Sequence
  derived and/or modified sequence
atggatcagaacaactcactcccaccatatgctcagggcttggcctctcctcaaggagccatgacacccggcattcccattttctcccccatgatgccttatggaactggattgaccccacagcccatccaaaataccaatagcttatccattctggaggagcagcagcgacaacagcagcagcaacaacagcagcaacagcagcaacagcagcagcaacagcagcaacagcagcagcagcagcagcagcagcagcagcagcagcagcagcaacagcagcagcaggctgtagcagcagcagctgtccagcagagcacctcccaacaggctactcagggaacctcaggacaggccccacaactcttccattctcaaaccttaactaccgccccattgcccggcacaacaccactgtacccaagcccgatgactcctatgactcccatcacaccagccacccccgccagcgagtcctctgggattgtgccccagctccagaatatcgtcagcacagtaaatctgggctgtaagcttgaccttaaaaccattgccctgcgagctcgcaacgccgagtacaaccctaagcgattcgctgcagtgatcatgcggatcagagaacccagaaccacagccctgatcttttctagcgggaaaatggtgtgtaccggggcgaagtcagaggaacagagccgcctggccgctaggaagtacgctcgagtcgtgcagaaactcgggtttcctgccaagttcctggatttcaaaatccaaaatatggtggggagttgtgatgtgaagtttccgataaggctggaggggctggttttaacacaccaacagttcagcagctatgagcccgagctcttccctgggctgatctatcgcatgataaaaccacggatagtgctgctgatcttcgtttctgggaaagtggtcttgactggagcaaaagtgagggccgagatatatgaggcttttgagaacatctaccctattctgaagggcttcagaaaaacgacgtag

SEQ ID NO: 136088 - DNA, 627 bp, Artificial Sequence
  derived and/or modified sequence
atggaccagaacaactccctgccaccatatgcccaaggcttggcctctcctcagggagctatgacgccaggcataccaatcttctctccaatgatgccatacggcacgggcctgaccccccagcctattcaaaatacgaattcactgagcatcttggaggaacaacaaaggcaacagcagcaacagcagcaacagcagcaacagcagcagcaacagcagcaacaacagcagcagcaacagcagcagcagcaacaacaacagcagcagcagcaacagcagcagcaagcggtcgccgccgccgcggttcagcaaagtacttcccagcaagcaacgcaaggcacctccgggcaggccccccaactgttccatagccagacactgacaacagctcccctgccaggcacaaccccactatacccatcccctatgaccccaatgactccaattacacccgccacacctgcaagcgaaagttccgggatagtacctcagttacaaaatattgtgtcaaccgtgaatctcgggtgtaagctggacctgaagacaatagccttgagagcgcgcaatgccgaatacaatccaaagagatttgcggccgtgatcatgcgaatacgagaaccacgatag

SEQ ID NO: 136089 - DNA, 456 bp, Artificial Sequence
  derived and/or modified sequence
atggatcagaataactccctgccaccatacgcgcaggggctggctagtccacagggcgctatgactcctgggattcccatcttctctccaatgatgccctacgggacaggccttacaccccaaccaatccagaacacaaactctctcagtattctggaagaacagcagcggcagcagcagcagcagcagcagcaacagcagcagcaacaacagcagcagcagcagcagcagcaacagcagcagcagcaacagcagcagcagcagcagcagcagcagcagcagcaggctgtggctgctgcagccgtgcaacagagtacctctcagcaggccacccagggcacgtctggccaagccccacagctcttccattctcagactcttaccactgcccctttacctggcacaaccccgctatacccttcccctatgaccccgatgacccctattaccccatag

SEQ ID NO: 136090 - DNA, 1020 bp, Artificial Sequence
  derived and/or modified sequence
atggaccagaacaacagcctgcccccctatgcccagggcctggccagcccccagggcgccatgaccccaggcatccccatcttcagccccatgatgccctacggcaccggcctgaccccccagcccatccagaacaccaacagcctgagcatcctggaggagcagcagaggcagcagcagcagcagcagcagcagcagcagcagcagcagcagcagcagcagcagcagcagcagcagcagcagcagcagcagcagcagcagcagcagcagcagcagcagcagcaggccgtggccgctgctgctgtgcagcagagcaccagccagcaggccacccagggcaccagcggccaggccccccagctgttccacagccagaccctgaccacagcccccctgcccggcaccacccccctgtaccccagccccatgacccccatgacccccatcaccccagccaccccagccagcgagagcagcggcatcgtgccccagctgcagaacatcgtgtccacagtgaacctgggctgcaagctggacctgaagaccatcgccctgcgggccagaaatgctgagtacaaccccaagagatttgctgctgtgatcatgaggatccgggagcccaggaccacagccctgatcttcagcagcggcaagatggtgtgcaccggggccaagtctgaggagcagagccggctggccgccaggaaatatgcccgggtggtgcagaagctgggcttccctgccaagttcctggacttcaagatccagaacatggtgggcagctgtgatgtgaagttccccatccggctggagggcctggtgctgacccaccagcagttcagcagctatgagcctgagctgtttcctggcctcatctacaggatgatcaagccccgcatcgtgctgctgatctttgtgtctgggaaggtggtgctgactggagccaaggtgcgggcagagatctatgaggcctttgagaacatctaccccatcctgaagggcttcaggaagaccacctag

SEQ ID NO: 136091 - DNA, 627 bp, Artificial Sequence
  derived and/or modified sequence
atggaccagaacaacagcctgcccccctatgcccagggcctggccagcccccagggcgccatgaccccaggcatccccatcttcagccccatgatgccctacggcaccggcctgaccccccagcccatccagaacaccaacagcctgagcatcctggaggagcagcagaggcagcagcagcagcagcagcagcagcagcagcagcagcagcagcagcagcagcagcagcagcagcagcagcagcagcagcagcagcagcagcagcagcagcagcagcagcagcaggccgtggccgctgctgctgtgcagcagagcaccagccagcaggccacccagggcaccagcggccaggccccccagctgttccacagccagaccctgaccacagcccccctgcccggcaccacccccctgtaccccagccccatgacccccatgacccccatcaccccagccaccccagccagcgagagcagcggcatcgtgccccagctgcagaacatcgtgtccacagtgaacctgggctgcaagctggacctgaagaccatcgccctgcgggccagaaatgctgagtacaaccccaagagatttgctgctgtgatcatgaggatccgggagcccaggtag

SEQ ID NO: 136092 - DNA, 456 bp, Artificial Sequence
  derived and/or modified sequence
atggaccagaacaacagcctgcccccctatgcccagggcctggccagcccccagggcgccatgaccccaggcatccccatcttcagccccatgatgccctacggcaccggcctgaccccccagcccatccagaacaccaacagcctgagcatcctggaggagcagcagaggcagcagcagcagcagcagcagcagcagcagcagcagcagcagcagcagcagcagcagcagcagcagcagcagcagcagcagcagcagcagcagcagcagcagcagcagcagcaggccgtggccgctgctgctgtgcagcagagcaccagccagcaggccacccagggcaccagcggccaggccccccagctgttccacagccagaccctgaccacagcccccctgcccggcaccacccccctgtaccccagccccatgacccccatgacccccatcaccccctag

SEQ ID NO: 136093 - DNA, 1020 bp, Artificial Sequence
  derived and/or modified sequence
atggaccagaacaacagcctgcccccctacgcccagggcctggcctccccccagggcgcaatgacccccggaattccaattttttctcccatgatgccatacgggacaggattgactccacagcctattcaaaatactaatagcctgtctatcctggaggaacaacagcggcagcagcaacaacaacagcagcagcagcagcagcaacagcagcagcagcaacaacagcagcagcaacaacagcagcagcagcagcagcagcagcagcagcagcagcagcaacaggccgtggccgcagccgcagtgcaacaatcaacaagccagcaagcaacccagggcactagcggacaggctccccaactgttccacagtcagactctcaccaccgcccctctgcctggaaccacaccactttacccttctcccatgacgccaatgacacctatcacgcctgccacgccggcctcagagagctccggtattgttccacaactgcagaatattgtctcgactgtgaatcttggatgcaagctggaccttaagacgatcgctctgcgcgcacggaacgctgagtacaatccaaagaggtttgctgctgtgatcatgagaatacgagagccaaggacgactgcattgatttttagctcgggcaaaatggtgtgtacaggcgccaagtcagaggaacagagcagacttgctgcacgcaagtacgcaagagtcgtgcagaagctgggcttccccgccaaattcttggactttaagattcaaaatatggtaggatcttgcgacgtaaaattcccgattcgcttagaaggactggttctgacccaccaacagttcagttcttacgagcccgaacttttcccaggccttatatatcggatgatcaaaccccgtattgtgttgctcatctttgtaagtggaaaggtcgtactaacaggggccaaggttagggccgagatctatgaggccttcgagaacatctatccaatcttaaaaggtttccggaagacgacctag

SEQ ID NO: 136094 - DNA, 1020 bp, Artificial Sequence
  derived and/or modified sequence
atggaccagaacaacagcctgcccccctacgcccagggcctggccagtcctcagggggctatgacccccgggatcccaattttctctcccatgatgccatacgggaccggacttactcctcaaccgatacagaacacaaactctctgagcatccttgaggagcagcagaggcaacaacagcaacagcaacaacagcagcaacagcagcaacagcagcaacagcagcagcagcaacagcagcagcagcagcagcagcaacagcaacagcagcagcagcaacagcaggcggtggccgccgcagctgtgcagcagtcaacctctcagcaagctacccagggcacgtcgggacaagccccacaactgttccattcacagactcttacgacagcccccttgcccggcactactcccctataccctagtccaatgactcccatgacccccattaccccggccaccccagcctccgaaagtagcggcatcgtgccacagctgcaaaatattgtgtccaccgtgaatctgggttgtaaactcgacttgaagaccatagcacttagagccagaaatgctgaatacaaccctaaaaggttcgctgcagttatcatgcgaattagagaaccacgcactaccgcgctgatattttccagcggcaaaatggtgtgtaccggcgccaaaagtgaggagcaatcgagactggcggcacgaaaatatgcccgcgtggtgcagaagcttgggttcccagcaaaatttcttgattttaaaatccaaaacatggtgggcagctgcgacgtaaagttcccaattcggctggaggggctggtccttactcaccagcaattctcaagttatgagcctgagctgtttcccggacttatttaccggatgatcaaacctcgcatcgtgctgcttatattcgtctctgggaaagttgtactgactggcgccaaggtcagggctgagatatatgaggcattcgaaaatatctaccctatcctgaagggtttccgaaaaacaacttag

SEQ ID NO: 136095 - DNA, 627 bp, Artificial Sequence
  derived and/or modified sequence
atggaccagaacaacagcctgcccccctacgcccagggcctggcctcaccgcagggggcaatgacccccggaattcccatcttcagccccatgatgccctacggtaccgggctcacaccccagcctattcagaacaccaatagcctcagtatcctggaagaacagcagcgacaacagcagcagcagcaacagcagcaacagcagcagcagcagcagcagcaacagcagcagcagcagcagcaacaacaacagcagcagcaacaacagcaacaacagcagcagcaggcagtagcagctgccgctgtgcagcaatctacctctcagcaggccacccagggcacgagcgggcaagctccccagctgttccactctcagactctcaccacagcaccactcccagggacgacacctctgtacccatcaccgatgactccaatgaccccaattacgccagcgacgcccgcatcggaatcctccggtatcgttccacagcttcagaacatcgtgagtactgtgaatctgggctgtaaactcgacctgaagaccattgcactgagggctcgaaatgccgagtataaccctaagaggtttgcggccgtaattatgagaatacgcgagccacgatag

SEQ ID NO: 136096 - DNA, 456 bp, Artificial Sequence
  derived and/or modified sequence
atggaccagaacaacagcctgcccccctacgcccagggcctggcctccccccagggcgcaatgactcccggcatccccattttcagccctatgatgccatatggcaccggacttaccccacagccaatacagaacacaaattcgttgtccattttggaggagcagcagcggcaacagcaacagcagcagcaacagcagcagcaacagcagcaacagcagcagcagcagcagcagcagcagcagcagcagcagcaacaacagcagcaacagcaacagcagcagcaagcagttgccgctgcagctgtgcagcaatcgacttctcagcaggcaacacagggaacctccggacaggcgccacagctgtttcactcacaaacgctcacaaccgcgcctctgccgggcaccaccccattatatccctcgcctatgacccctatgacgccaattaccccatag

SEQ ID NO: 136097 - DNA, 1020 bp, Artificial Sequence
  derived and/or modified sequence
atggaccagaataattcactcccaccatacgcccagggcctggcgagccctcagggcgcaatgacccccggaatcccaatcttcagtcccatgatgccatatggcacaggactgacccctcagccaatacagaacaccaacagcctgtctatcctggaggagcagcaacggcagcaacagcagcagcaacagcagcagcagcagcagcagcagcagcagcagcaacagcaacagcaacagcagcagcaacagcaacagcagcagcagcagcagcagcaacaacaggcagttgcggctgcagcggtgcagcagtctacgtcacagcaggcaacgcaaggaactagcggacaggcacctcagcttttccatagccagacgttaacaaccgccccactgcctggcaccacccccctctacccttccccaatgacaccaatgacccccatcaccccagcaactccagcatctgaaagttctggaattgtgccgcagctgcagaacattgtttccacagtgaacttaggttgcaagctggaccttaagaccattgcactgcgagcgcgaaacgctgagtacaatccaaaacgcttcgccgcagtcataatgagaatacgagagcccagaacaacagccttaatctttagttccggaaagatggtctgcaccggtgccaaaagcgaagaacagagccgcctggccgctcgcaaatatgctagagtcgtgcagaaactcggcttccctgccaagtttctggactttaagatccagaatatggtgggaagttgcgatgttaagttccccattagactggaaggactcgtgctgacacatcagcagttctctagctacgaacccgagctctttcctggtctaatttaccggatgatcaaaccacggattgtacttctcatctttgttagtggcaaagtggtcctcactggagccaaagtccgagcagaaatttacgaggcttttgaaaatatctacccaatcttaaaagggtttcgcaaaactacatag

SEQ ID NO: 136098 - DNA, 1020 bp, Artificial Sequence
  derived and/or modified sequence
atggatcaaaacaacagtttaccaccatatgcccaaggactggccagcccgcagggcgctatgacacccggaatccctatcttcagtcccatgatgccctatggcaccgggctgacgccacaacctatccaaaataccaatagtttatccatcctggaggaacaacagcgccagcagcagcagcagcagcagcagcaacagcagcagcagcagcaacagcagcagcagcagcagcaacagcagcagcagcagcaacagcaacagcagcagcagcagcaacagcaggcagtggccgcagcggcagttcaacaatcgactagtcagcaagccacccagggtactagcggacaggcccctcagctctttcactcgcaaaccctgactaccgctcctcttcccggaaccacgcccctctaccccagcccgatgacgccgatgacgcctataacaccggctacccctgcctcagaatcctcaggaatcgtgccacaactccagaacatcgtttcaactgttaacctcggttgtaagttggatctcaagacaattgctttacgagctcgtaacgccgaatataatcctaaaaggttcgcagctgtcatcatgagaatccgggaaccacggaccactgcactgattttctccagtggtaagatggtgtgcaccggcgcaaagagcgaagagcagtcccgccttgccgctaggaagtacgcccgagtggtgcagaagctcggttttcctgcaaaatttctggattttaagatacagaacatggtgggctcgtgtgacgtgaagttccctattcgcttagaggggctggtactgactcatcagcagttttcctcgtacgagcccgagctgttccctgggctcatttatcgcatgatcaaacccaggatcgtgctcttgatattcgtctcaggtaaagtagtcctcaccggggctaaggtccgtgcagaaatctatgaagcgttcgaaaacatatacccaatccttaaagggtttaggaaaaccacatag

SEQ ID NO: 136099 - DNA, 627 bp, Artificial Sequence
  derived and/or modified sequence
atggatcagaacaatagcctgcccccttatgcccagggcttggcgtctccccaaggtgctatgacaccaggcatccctattttcagcccaatgatgccttatggtacagggctgaccccccagccgatccaaaacaccaactctctgagtattttggaggagcagcaacgacagcagcagcagcagcaacaacagcagcagcaacagcaacagcaacagcagcagcaacagcaacagcaacagcagcagcaacagcagcagcaacaacagcagcagcagcagcaagctgttgccgcagccgcagtgcagcaatcaacaagccagcaggccacccaagggacatcaggtcaagctcctcagctctttcactctcagaccctgaccaccgcacccctgcccggtaccacacctttgtacccttcaccgatgacacctatgacccctataaccccagctaccccagccagcgagtcaagcggcattgttcctcagcttcagaacatcgtttcgacagtgaacctaggctgtaaactggatctgaagaccatcgcccttagggcacgcaacgcagaatacaatcctaagcggtttgcggcagtgatcatgaggatacgagagccacggtag

SEQ ID NO: 136100 - DNA, 456 bp, Artificial Sequence
  derived and/or modified sequence
atggatcaaaacaactctctccctccctatgcgcaagggttggcttctccacagggagcaatgaccccgggaatccccatttttagcccgatgatgccatacggaaccggcttgacgcctcaacccattcaaaatactaactcgttatccatcttggaggagcagcagcgacagcaacagcaacagcaacaacagcagcaacaacagcaacagcagcaacagcagcagcagcagcagcaacagcagcagcaacagcagcagcagcagcagcagcagcagcaacaggccgtggcggctgccgcagtgcagcaaagcacaagccaacaggccacgcagggcacttccggccaggccccacagctctttcattctcaaacgttaacgactgctcctctgccgggaactacacccctgtatccaagtcccatgacgccaatgacacccattacaccctag

SEQ ID NO: 136101 - DNA, 1844 bp, Artificial Sequence
  derived and/or modified sequence
ggcaggttcgctgtggcgggcgcctgggccgccggctgtttaacttcgcttccgctggcccatagtgatctttgcagtgacccagcagcatcactgtttcttggcgtgtgaagataacccaaggaattgaggaagttgctgagaagagtgtgctggagatgctctaggaaaaaattgaatagtgagacgagttccagcgcaagggtttctggtttgccaagaagaaagtgaacatcatggatcagaacaacagcctgccaccttacgctcagggcttggcctcccctcagggtgccatgactcccggaatccctatctttagtccaatgatgccttatggcactggactgaccccacagcctattcagaacaccaatagtctgtctattttggaagagcaacaaaggcagcagcagcaacaacaacagcagcagcagcagcagcagcagcaacagcaacagcagcagcagcagcagcagcagcagcagcagcagcagcagcagcagcagcagcagcaacaggcagtggcagctgcagccgttcagcagtcaacgtcccagcaggcaacacagggaacctcaggccaggcaccacagctcttccactcacagactctcacaactgcacccttgccgggcaccactccactgtatccctcccccatgactcccatgacccccatcactcctgccacgccagcttcggagagttctgggattgtaccgcagctgcaaaatattgtatccacagtgaatcttggttgtaaacttgacctaaagaccattgcacttcgtgcccgaaacgccgaatataatcccaagcggtttgctgcggtaatcatgaggataagagagccacgaaccacggcactgattttcagttctgggaaaatggtgtgcacaggagccaagagtgaagaacagtccagactggcagcaagaaaatatgctagagttgtacagaagttgggttttccagctaagttcttggacttcaagattcagaatatggtggggagctgtgatgtgaagtttcctataaggttagaaggccttgtgctcacccaccaacaatttagtagttatgagccagagttatttcctggtttaatctacagaatgatcaaacccagaattgttctccttatttttgtttctggaaaagttgtattaacaggtgctaaagtcagagcagaaatttatgaagcatttgaaaacatctaccctattctaaagggattcaggaagacgacgtaatggctctcatgtacccttgcctcccccacccccttctttttttttttttaaacaaatcagtttgttttggtacctttaaatggtggtgttgtgagaagatggatgttgagttgcagggtgtggcaccaggtgatgcccttctgtaagtgcccaccgcgggatgccgggaaggggcattatttgtgcactgagaacaccgcgcagcgtgactgtgagttgctcataccgtgctgctatctgggcagcgctgcccatttatttatatgtagattttaaacactgctgttgacaagttggtttgagggagaaaactttaagtgttaaagccacctctataattgattggactttttaattttaatgtttttccccatgaaccacagtttttatatttctaccagaaaagtaaaaatcttttttaaaagtgttgtttttctaatttataactcctaggggttatttctgtgccagacacattccacctctccagtattgcaggacagaatatatgtgttaatgaaaatgaatggctgtacatatttttttctttcttcagagtactctgtacaataaatgcagtttataaaa

SEQ ID NO: 136102 - DNA, 1903 bp, Artificial Sequence
  derived and/or modified sequence
ggcggaagtgacattatcaacgcgcgccaggggttcagtgaggtcgggcaggttcgctgtggcgggcgcctgggccgccggctgtttaacttcgcttccgctggcccatagtgatctttgcagtgacccagcatcactgtttcttggcgtgtgaagataacccaaggaattgaggaagttgctgagaagagtgtgctggagatgctctaggaaaaaattgaatagtgagacgagttccagcgcaagggtttctggtttgccaagaagaaagtgaacatcatggatcagaacaacagcctgccaccttacgctcagggcttggcctcccctcagggtgccatgactcccggaatccctatctttagtccaatgatgccttatggcactggactgaccccacagcctattcagaacaccaatagtctgtctattttggaagagcaacaaaggcagcagcagcaacaacaacagcagcagcagcagcagcagcagcaacagcaacagcagcagcagcagcagcagcagcagcagcagcagcagcagcagcagcagcagcagcaacaggcagtggcagctgcagccgttcagcagtcaacgtcccagcaggcaacacagggaacctcaggccaggcaccacagctcttccactcacagactctcacaactgcacccttgccgggcaccactccactgtatccctcccccatgactcccatgacccccatcactcctgccacgccagcttcggagagttctgggattgtaccgcagctgcaaaatattgtatccacagtgaatcttggttgtaaacttgacctaaagaccattgcacttcgtgcccgaaacgccgaatataatcccaagcggtttgctgcggtaatcatgaggataagagagccacgaaccacggcactgattttcagttctgggaaaatggtgtgcacaggagccaagagtgaagaacagtccagactggcagcaagaaaatatgctagagttgtacagaagttgggttttccagctaagttcttggacttcaagattcagaatatggtggggagctgtgatgtgaagtttcctataaggttagaaggccttgtgctcacccaccaacaatttagtagttatgagccagagttatttcctggtttaatctacagaatgatcaaacccagaattgttctccttatttttgtttctggaaaagttgtattaacaggtgctaaagtcagagcagaaatttatgaagcatttgaaaacatctaccctattctaaagggattcaggaagacgacgtaatggctctcatgtacccttgcctcccccacccccttctttttttttttttaaacaaatcagtttgttttggtacctttaaatggtggtgttgtgagaagatggatgttgagttgcagggtgtggcaccaggtgatgcccttctgtaagtgcccaccgcgggatgccgggaaggggcattatttgtgcactgagaacaccgcgcagcgtgactgtgagttgctcataccgtgctgctatctgggcagcgctgcccatttatttatatgtagattttaaacactgctgttgacaagttggtttgagggagaaaactttaagtgttaaagccacctctataattgattggactttttaattttaatgtttttccccatgaaccacagtttttatatttctaccagaaaagtaaaaatcttttttaaaagtgttgtttttctaatttataactcctaggggttatttctgtgccagacacattccacctctccagtattgcaggacagaatatatgtgttaatgaaaatgaatggctgtacatatttttttctttcttcagagtactctgtacaataaatgcagtttataaaagtgttagattgttgtt

SEQ ID NO: 136103 - DNA, 935 bp, Artificial Sequence
  derived and/or modified sequence
ggagcaactcgctgaagccgagggcagaactggcggaagtgacattatcaacgcgcgccaggggttcagtgaggtcgggcaggttcgctgtggcgggcgcctgggccgccggctgtttaacttcgcttccgctggcccatagtgatctttgcagtgacccagcatcactgtttcttggcgtgtgaagataacccaaggaattgaggaagttgctgagaagagtgtgctggagatgctctaggaaaaaattgaatagtgagacgagttccagcgcaagggtttctggtttgccaagaagaaagtgaacatcatggatcagaacaacagcctgccaccttacgctcagggcttggcctcccctcagggtgccatgactcccggaatccctatctttagtccaatgatgccttatggcactggactgaccccacagcctattcagaacaccaatagtctgtctattttggaagagcaacaaaggcagcagcagcaacaacaacagcagcagcagcagcagcagcagcaacagcaacagcagcagcagcagcagcagcagcagcagcagcagcagcagcagcagcagcagcagcaacaggcagtggcagctgcagccgttcagcagtcaacgtcccagcaggcaacacagggaacctcaggccaggcaccacagctcttccactcacagactctcacaactgcacccttgccgggcaccactccactgtatccctcccccatgactcccatgacccccatcactcctgccacgccagcttcggagagttctgggattgtaccgcagctgcaaaatattgtatccacagtgaatcttggttgtaaacttgacctaaagaccattgcacttcgtgcccgaaacgccgaatataatcccaagcggtttgctgcggtaatcatgaggataagagagccacgaa

SEQ ID NO: 136104 - DNA, 703 bp, Artificial Sequence
  derived and/or modified sequence
gttccggcctgtaacggccactcggccgccactcccgcctggtgccctactctgctgtgtttcgcaggcagcttcccatcgtacgattgtggggctcaggcagcatcactgtttcttggcgtgtgaagataacccaaggaattgaggaagttgctgagaagagtgtgctggagatgctctaggaaaaaattgaatagtgagacgagttccagcgcaagggtttctggtttgccaagaagaaagtgaacatcatggatcagaacaacagcctgccaccttacgctcagggcttggcctcccctcagggtgccatgactcccggaatccctatctttagtccaatgatgccttatggcactggactgaccccacagcctattcagaacaccaatagtctgtctattttggaagagcaacaaaggcagcagcagcaacaacaacagcagcagcagcagcagcagcagcaacagcaacagcagcagcagcagcagcagcagcagcagcagcagcagcagcagcagcagcagcagcaacaggcagtggcagctgcagccgttcagcagtcaacgtcccagcaggcaacacagggaacctcaggccaggcaccacagctcttccactcacagactctcacaactgcacccttgccgggcaccactccactgtatccctcccccatgactcccatgacccccatcactcc

SEQ ID NO: 136105 - DNA, 1701 bp, Artificial Sequence
  derived and/or modified sequence
ggcggaagtgacattatcaacgcgcgccaggggttcagtgaggtcgggcaggttcgctgtggcgggcgcctgggccgccggctgtttaacttcgcttccgctggcccatagtgatctttgcagtgacccagggtgccatgactcccggaatccctatctttagtccaatgatgccttatggcactggactgaccccacagcctattcagaacaccaatagtctgtctattttggaagagcaacaaaggcagcagcagcaacaacaacagcagcagcagcagcagcagcagcaacagcaacagcagcagcagcagcagcagcagcagcagcagcagcagcagcagcagcagcagcagcaacaggcagtggcagctgcagccgttcagcagtcaacgtcccagcaggcaacacagggaacctcaggccaggcaccacagctcttccactcacagactctcacaactgcacccttgccgggcaccactccactgtatccctcccccatgactcccatgacccccatcactcctgccacgccagcttcggagagttctgggattgtaccgcagctgcaaaatattgtatccacagtgaatcttggttgtaaacttgacctaaagaccattgcacttcgtgcccgaaacgccgaatataatcccaagcggtttgctgcggtaatcatgaggataagagagccacgaaccacggcactgattttcagttctgggaaaatggtgtgcacaggagccaagagtgaagaacagtccagactggcagcaagaaaatatgctagagttgtacagaagttgggttttccagctaagttcttggacttcaagattcagaatatggtggggagctgtgatgtgaagtttcctataaggttagaaggccttgtgctcacccaccaacaatttagtagttatgagccagagttatttcctggtttaatctacagaatgatcaaacccagaattgttctccttatttttgtttctggaaaagttgtattaacaggtgctaaagtcagagcagaaatttatgaagcatttgaaaacatctaccctattctaaagggattcaggaagacgacgtaatggctctcatgtacccttgcctcccccacccccttctttttttttttttaaacaaatcagtttgttttggtacctttaaatggtggtgttgtgagaagatggatgttgagttgcagggtgtggcaccaggtgatgcccttctgtaagtgcccaccgcgggatgccgggaaggggcattatttgtgcactgagaacaccgcgcagcgtgactgtgagttgctcataccgtgctgctatctgggcagcgctgcccatttatttatatgtagattttaaacactgctgttgacaagttggtttgagggagaaaactttaagtgttaaagccacctctataattgattggactttttaattttaatgtttttccccatgaaccacagtttttatatttctaccagaaaagtaaaaatcttttttaaaagtgttgtttttctaatttataactcctaggggttatttctgtgccagacacattccacctctccagtattgcaggacagaatatatgtgttaatgaaaatgaatggctgtacatatttttttctttcttcagagtactctgtacaataaatgcagtttataaaagtgttagattgttgtt

SEQ ID NO: 136106 - DNA, 1020 bp, Artificial Sequence
  derived and/or modified sequence
atggaccagaacaacagcctgcccccctacgcccagggcctggccagcccccagggcgccatgacccccggcatccccatcttcagccccatgatgccctacggcaccggcctgaccccccagcccatccagaacaccaacagcctgagcatcctggaggagcagcagagacagcagcagcagcagcagcagcagcagcagcagcagcagcagcagcagcagcagcagcagcagcagcagcagcagcagcagcagcagcagcagcagcagcagcagcagcagcaggccgtggccgccgccgccgtgcagcagagcaccagccagcaggccacccagggcaccagcggccaggccccccagctgttccacagccagaccctgaccaccgcccccctgcccggcaccacccccctgtaccccagccccatgacccccatgacccccatcacccccgccacccccgccagcgagagcagcggcatcgtgccccagctgcagaacatcgtgagcaccgtgaacctgggctgcaagctggacctgaagaccatcgccctgagagccagaaacgccgagtacaaccccaagagattcgccgccgtgatcatgagaatcagagagcccagaaccaccgccctgatcttcagcagcggcaagatggtgtgcaccggcgccaagagcgaggagcagagcagactggccgccagaaagtacgccagagtggtgcagaagctgggcttccccgccaagttcctggacttcaagatccagaacatggtgggcagctgcgacgtgaagttccccatcagactggagggcctggtgctgacccaccagcagttcagcagctacgagcccgagctgttccccggcctgatctacagaatgatcaagcccagaatcgtgctgctgatcttcgtgagcggcaaggtggtgctgaccggcgccaaggtgagagccgagatctacgaggccttcgagaacatctaccccatcctgaagggcttcagaaagaccacctag

SEQ ID NO: 136107 - protein, 299 aa, Artificial Sequence
  derived and/or modified sequence
MMGKEEEIARIARRLDKMVTKKSAEGAMDLLRELKAMPITLHLLQSTRVGMSVNALRKQSSDEEVIALAKSLIKSWKKLLDASDAKARERGRGMPLPTSSRDASEAPDPSRKRPELPRAPSTPRITTFPPVPVTCDAVRNKCREMLTAALQTDHDHVAIGADCERLSAQIEECIFRDVGNTDMKYKNRVRSRISNLKDAKNPDLRRNVLCGAITPQQIAVMTSEEMASDELKEIRKAMTKEAIREHQMARTGGTQTDLFTCGKCRKKNCTYTQVQTRSSDEPMTTFVVCNECGNRWKFC

SEQ ID NO: 136108 - protein, 272 aa, Artificial Sequence
  derived and/or modified sequence
MDLLRELKAMPITLHLLQSTRVGMSVNALRKQSSDEEVIALAKSLIKSWKKLLDASDAKARERGRGMPLPTSSRDASEAPDPSRKRPELPRAPSTPRITTFPPVPVTCDAVRNKCREMLTAALQTDHDHVAIGADCERLSAQIEECIFRDVGNTDMKYKNRVRSRISNLKDAKNPDLRRNVLCGAITPQQIAVMTSEEMASDELKEIRKAMTKEAIREHQMARTGGTQTDLFTCGKCRKKNCTYTQVQTRSSDEPMTTFVVCNECGNRWKFC

SEQ ID NO: 136109 - protein, 242 aa, Artificial Sequence
  derived and/or modified sequence
MMGKEEEIARIARRLDKMVTKKSAEGAMDLLRELKAMPITLHLLQSTRVGMSVNALRKQSSDEEVIALAKSLIKSWKKLLDASDAKARERGRGMPLPTSSRDASEAPDPSRKRPELPRAPSTPRITTFPPVPVTCDAVRNKCREMLTAALQTDHDHVAIGADCERLSAQIEEYILWVGAVGLGFWWSQEAAWPGALWWLLDATAQLSRGHLPGWSPAWVVRLSHLRRAPGPAEGLILSACGA

SEQ ID NO: 136110 - protein, 82 aa, Artificial Sequence
  derived and/or modified sequence
MDLLRELKAMPITLHLLQSTRVGMSVNALRKQSSDEEVIALAKSLIKSWKKLLDASDAKARERGRGMPLPTSSRDASEAPDP

SEQ ID NO: 136111 - DNA, 900 bp, Artificial Sequence
  derived and/or modified sequence
atgatgggcaaagaagaggaaatcgcccgaattgccagacggctggacaaaatggtgaccaagaagtctgccgagggcgccatggatcttttgcgcgagctgaaggctatgcccattacactgcacttgctgcaatccacccgggtggggatgagcgtaaatgcactgcgtaagcagtcatcggatgaagaggttatcgctttagcaaagagtttaatcaaatcctggaagaagctgctcgatgcgagcgacgccaaggcgagggaaagaggccgtggtatgcccctgcccacatcatctcgggacgcttccgaggcacctgacccgtcacgaaagcgtcctgagctgcctagggccccatccaccccaaggattactacctttccaccagttccggtgacctgcgatgctgtccggaacaagtgtcgggagatgctgaccgccgcccttcagactgaccatgaccatgttgccattggtgcagactgcgaacggctgtccgctcaaattgaggagtgcatcttccgcgacgtcggaaataccgatatgaagtacaaaaatcgagtccgcagccgaatcagtaacctgaaggacgcgaaaaatcctgatttgcgtcgcaatgtgctgtgtggcgcaatcacccctcaacagattgccgtcatgacaagcgaagagatggcctctgacgaattgaaagaaatccgtaaggccatgaccaaggaggctattagggagcaccaaatggctcgcactggaggcacacagactgacctttttacttgtggcaaatgccggaagaaaaactgtacctatacacaagtgcagacccgctcaagcgacgaaccgatgaccacttttgtagtctgtaacgaatgtggaaacagatggaaattctgttag

SEQ ID NO: 136112 - DNA, 729 bp, Artificial Sequence
  derived and/or modified sequence
atgatgggcaaggaggaggagatcgcacgcattgcccgaagactagataaaatggtgaccaagaagagcgcagagggtgcaatggatctactgagggagcttaaggccatgccgattaccctccacctccttcagtctacccgagtaggcatgagcgtgaacgctctgagaaagcagagctcagacgaggaagtgatcgccttagctaagagcttaatcaagtcatggaagaagctgttggatgcatccgacgcgaaggcccgggaaaggggacgggggatgccccttccgacctcgagccgggacgcgagcgaggcgcccgatcccagcaggaagcgccccgaactaccacgggcaccatcaacaccaagaattactacctttccaccagttcctgtcacttgcgacgccgtgcggaataaatgcagggagatgctcaccgctgccttgcagacagatcatgaccacgttgcaatcggagctgattgcgagcgcttatctgcccaaattgaggaatacattctgtgggtgggtgccgtcggactaggattctggtggagccaagaggcggcttggccgggggctctgtggtggctgttggacgctacagctcagctctctaggggccacttgcccggatggtctccagcctgggtggtaagactgtcacatctgagacgcgccccaggcccagccgaaggtctaatactctctgcctgtggcgcgtag

SEQ ID NO: 136113 - DNA, 900 bp, Artificial Sequence
  derived and/or modified sequence
atgatgggcaaggaggaggagatcgccagaattgcccggcggctggacaagatggtgaccaagaagtctgctgagggcgccatggacctgctgcgggagctgaaggccatgcccatcaccctgcacctgctgcagagcaccagggtgggcatgtctgtgaatgccctgaggaagcagagcagtgatgaggaggtgattgccctggccaagagcctcatcaagtcctggaagaagctgctggatgccagtgatgccaaggcccgggagcggggccggggcatgcccctgcccaccagcagcagagatgccagcgaggccccagaccccagcaggaagaggcctgagctgccccgggcccccagcaccccccgcatcaccaccttcccccctgtgcctgtgacctgtgatgctgtgagaaataaatgtcgggagatgctgacagctgccctgcagacagaccatgaccacgtggccatcggggctgactgtgagcggctgagcgcccagatcgaggagtgcatcttcagagatgtgggcaacacagacatgaagtacaagaacagagtgcgcagccgcatcagcaacctgaaggatgccaagaacccagacctgcggagaaatgtgctgtgtggggccatcaccccccagcagattgctgtgatgaccagcgaggagatggccagtgatgagctgaaggagatcaggaaggccatgaccaaggaggccatccgggagcaccagatggccaggactggaggcacccagacagacctcttcacctgtgggaaatgtaggaagaagaactgcacctacacccaggtgcagaccaggagcagtgatgagcccatgaccacctttgtggtgtgcaatgaatgtggcaaccgctggaagttctgctag

SEQ ID NO: 136114 - DNA, 729 bp, Artificial Sequence
  derived and/or modified sequence
atgatgggcaaggaggaggagatcgccagaattgcccggcggctggacaagatggtgaccaagaagtctgctgagggcgccatggacctgctgcgggagctgaaggccatgcccatcaccctgcacctgctgcagagcaccagggtgggcatgtctgtgaatgccctgaggaagcagagcagtgatgaggaggtgattgccctggccaagagcctcatcaagtcctggaagaagctgctggatgccagtgatgccaaggcccgggagcggggccggggcatgcccctgcccaccagcagcagagatgccagcgaggccccagaccccagcaggaagaggcctgagctgccccgggcccccagcaccccccgcatcaccaccttcccccctgtgcctgtgacctgtgatgctgtgagaaataaatgtcgggagatgctgacagctgccctgcagacagaccatgaccacgtggccatcggggctgactgtgagcggctgagcgcccagatcgaggagtacatcctgtgggtgggcgctgtgggcctgggcttctggtggagccaggaggccgcctggccaggggccctgtggtggctgctggatgccacagcccagctgagccggggccacctgcccggctggagccctgcctgggtggtgcggctgagccacctgcggcgggcccctggccctgctgagggcctcatcctgagcgcctgtggggcctag

SEQ ID NO: 136115 - DNA, 900 bp, Artificial Sequence
  derived and/or modified sequence
atgatgggcaaggaggaggagatcgcccggatcgcccggcggctggataagatggttacaaagaagagtgctgagggtgccatggatctgctccgggagttgaaggccatgcctatcaccttacacctgctgcaatctacgcgggtgggaatgtccgtgaacgcgctgcggaagcagagtagtgacgaagaggtcatagcactggcgaaatcactgattaagagttggaaaaagctgttggacgcatcagacgctaaggctagggaaagagggcggggaatgccccttcctacatcaagcagagacgcctccgaggccccagatccttctcggaagagaccggagctaccccgggcgcctagtacacctagaattactacctttccaccagtccccgtcacatgtgacgcggtgcgcaataagtgcagggaaatgctgacagcggcactgcagactgatcatgaccatgtcgctataggagcggattgtgagaggctgtccgcacaaatcgaggaatgcatctttcgagatgtcgggaacaccgacatgaaatacaaaaacagggtccggtcaaggatctccaatctgaaggacgccaagaaccctgatctacggagaaacgtgctgtgcggtgccatcacgccacagcagatcgctgtgatgacaagcgaggaaatggccagcgacgagttaaaggaaataagaaaggctatgacaaaggaagcgatccgcgagcaccagatggcacgcacaggcgggactcagacagatctgtttacctgtggcaagtgcagaaagaagaactgtacctatactcaagttcagacacgatcttccgacgagccaatgaccaccttcgtggtctgtaacgagtgcggcaaccggtggaagttctgctag

SEQ ID NO: 136116 - DNA, 729 bp, Artificial Sequence
  derived and/or modified sequence
atgatgggcaaggaggaggagatcgcccggatcgcccggcggctggataagatggtaaccaagaaatccgcagaaggggccatggacctgttacgcgagctaaaggctatgccaattacactgcatctgctccaaagcacacgagttggaatgtcagtcaatgctctgcgcaaacagtcatctgacgaagaggtgatcgccttagctaaaagcctgattaaatcttggaagaagctcttagacgcttcagatgccaaggcaagggagagaggacgcggaatgccccttccaacgagctctagggacgctagtgaagcccctgacccaagccgcaagaggcccgaactgcccagggcccctagtaccccccggatcactacgttcccacccgtgccggttacatgtgacgccgtccggaacaaatgcagagaaatgctcactgccgctcttcaaacagaccacgatcacgtggctatcggagccgactgtgagcggctgtccgcgcagatagaggagtatatcctgtgggtgggagcagtcggcctggggttctggtggagccaggaagctgcatggcctggcgccctgtggtggctcctcgatgctactgcacagctgtccagaggacacttgcccggatggtcacctgcatgggtcgtacgcctatcccacctgcgcagagccccgggacccgctgaaggactgatactcagcgcgtgcggcgcatag

SEQ ID NO: 136117 - DNA, 953 bp, Artificial Sequence
  derived and/or modified sequence
gcgacggccggggccggggtcctgcccggctgcggaggcgggcgcgacgggcgcgggggtcgctgctcctgaggcgatgatgggcaaggaagaggagattgcgcggatcgcccggaggctggacaagatggtgaccaagaagagcgcgcgtttgtcaccctccgtctcccatagcatttgtcgccggcaacagtttggagtctgaggagggagccatggatttgctgcgggagctgaaggccatgcctatcacgctgcacctgctccagtccacccgagtcgggatgtctgtcaacgcccttcggaagcagagctcggatgaggaggtcattgcactggccaagtctctcatcaagtcctggaagaagctcctggatgcttccgatgccaaagccagggagcgggggaggggcatgcctctgcccacgtcctcgagggatgcctcagaggccccggatcccagccgcaagaggccggagctgcccagggcaccgtcgactccgaggatcaccacatttcctccggtgcctgtcacctgtgatgccgtgcgcaacaagtgccgcgagatgctgaccgctgccctgcagacggaccatgaccacgtggccatcggtgcggactgcgagcgcctgtcggctcagatcgaggaatgcatcttccgggacgttggaaacacagacatgaagtataagaaccgtgtacggagtcgtatctccaacctgaaggatgccaagaaccctgacctgcggcggaatgtgctgtgtggggccataacaccccagcagatcgctgtgatgacctcagaggagatggccagtgatgagctgaaggagatccgtaaggccatgaccaaggaggccatccgagagcaccagatggcccgcactggcggcacgcagacagacctgttcacctgcggcaagtgcaggaaaaagaactgcacctacacacag

SEQ ID NO: 136118 - DNA, 1235 bp, Artificial Sequence
  derived and/or modified sequence
aggatgccgcgcgcggccgcggggccgagggtttgaaccgggggtctgtcgtccgcggcggggctgcgtcggctgcggcgggtgtgggaggtggcgacggccggggccggggtcctgcccggctgcggaggcgggcgcgacgggcgcgggggtcgctgctcctgaggcgatgatgggcaaggaagaggagattgcgcggatcgcccggaggctggacaagatggtgaccaagaagagcgcggagggagccatggatttgctgcgggagctgaaggccatgcctatcacgctgcacctgctccagtccacccgagtcgggatgtctgtcaacgcccttcggaagcagagctcggatgaggaggtcattgcactggccaagtctctcatcaagtcctggaagaagctcctggatgcttccgatgccaaagccagggagcgggggaggggcatgcctctgcccacgtcctcgagggatgcctcagaggccccggatcccagccgcaagaggccggagctgcccagggcaccgtcgactccgaggatcaccacatttcctccggtgcctgtcacctgtgatgccgtgcgcaacaagtgccgcgagatgctgaccgctgccctgcagacggaccatgaccacgtggccatcggtgcggactgcgagcgcctgtcggctcagatcgaggaatgcatcttccgggacgttggaaacacagacatgaagtataagaaccgtgtacggagtcgtatctccaacctgaaggatgccaagaaccctgacctgcggcggaatgtgctgtgtggggccataacaccccagcagatcgctgtgatgacctcagaggagatggccagtgatgagctgaaggagatccgtaaggccatgaccaaggaggccatccgagagcaccagatggcccgcactggcggcacgcagacagacctgttcacctgcggcaagtgcaggaaaaagaactgcacctacacacaggtgcagacccgcagctctgatgagcccatgaccacctttgttgtctgcaacgagtgtggaaaccgctggaagttctgctgacccctcgtgtagatgtgctgcagccttgggccctccccggcccacgtcctccgttgacacagcttctctggagaccctagaaggcggcatgtcctgccctcaacctgcctgcctggattgcacctttctgccctttccccctcattattaaatgtttctttttgcc

SEQ ID NO: 136119 - DNA, 1427 bp, Artificial Sequence
  derived and/or modified sequence
agggtttaaccgaaaccgaacattaaccgtagccctaacgcggctgagggatccaggccttgcctctgggccgggtgagagacagacactcgccaaccagtccgcagtggctccccgtgtgtgcgaggctcccgcctgcgtgtgtgcgtgtgcatgtgtgcctgcgcacaggggagggaaagttcttcagctgccgagggcgggagtaggggctggagcagcaccctgcggcgaggccccacaggagaatcgatggttctgatgctgtcagcctctgggtgcaaattctgagggcccgggagcgtctggcggccctgagcagcttgctggggaagctccgtggaggaggaagtccggaggcatgtgatgtgaatcagctgacatcatcttgacgggagccctgtgaggcggacacttaactccagtttcacaggagggagccatggatttgctgcgggagctgaaggccatgcctatcacgctgcacctgctccagtccacccgagtcgggatgtctgtcaacgcccttcggaagcagagctcggatgaggaggtcattgcactggccaagtctctcatcaagtcctggaagaagctcctggatgcttccgatgccaaagccagggagcgggggaggggcatgcctctgcccacgtcctcgagggatgcctcagaggccccggatcccagccgcaagaggccggagctgcccagggcaccgtcgactccgaggatcaccacatttcctccggtgcctgtcacctgtgatgccgtgcgcaacaagtgccgcgagatgctgaccgctgccctgcagacggaccatgaccacgtggccatcggtgcggactgcgagcgcctgtcggctcagatcgaggaatgcatcttccgggacgttggaaacacagacatgaagtataagaaccgtgtacggagtcgtatctccaacctgaaggatgccaagaaccctgacctgcggcggaatgtgctgtgtggggccataacaccccagcagatcgctgtgatgacctcagaggagatggccagtgatgagctgaaggagatccgtaaggccatgaccaaggaggccatccgagagcaccagatggcccgcactggcggcacgcagacagacctgttcacctgcggcaagtgcaggaaaaagaactgcacctacacacaggtgcagacccgcagctctgatgagcccatgaccacctttgttgtctgcaacgagtgtggaaaccgctggaagttctgctgacccctcgtgtagatgtgctgcagccttgggccctccccggcccacgtcctccgttgacacagcttctctggagaccctagaaggcggcatgtcctgccctcaacctgcctgcctggattgcacctttctgccctttccccctcattattaaatgtttctttttgcc

SEQ ID NO: 136120 - DNA, 1733 bp, Artificial Sequence
  derived and/or modified sequence
ggccgcggggccgagggtttgaaccgggggtctgtcgtccgcggcggggctgcgtcggctgcggcgggtgtgggaggtggcgacggccggggccggggtcctgcccggctgcggaggcgggcgcgacgggcgcgggggtcgctgctcctgaggcgatgatgggcaaggaagaggagattgcgcggatcgcccggaggctggacaagatggtgaccaagaagagcgcggagggagccatggatttgctgcgggagctgaaggccatgcctatcacgctgcacctgctccagtccacccgagtcgggatgtctgtcaacgcccttcggaagcagagctcggatgaggaggtcattgcactggccaagtctctcatcaagtcctggaagaagctcctggatgcttccgatgccaaagccagggagcgggggaggggcatgcctctgcccacgtcctcgagggatgcctcagaggccccggatcccagccgcaagaggccggagctgcccagggcaccgtcgactccgaggatcaccacatttcctccggtgcctgtcacctgtgatgccgtgcgcaacaagtgccgcgagatgctgaccgctgccctgcagacggaccatgaccacgtggccatcggtgcggactgcgagcgcctgtcggctcagatcgaggaatatatcctttgggtaggggctgtgggcctgggtttctggtggagtcaggaggctgcctggcctggtgccctctggtggctgctggatgccactgcccagctgtccaggggtcacctgcctgggtggtcacctgcctgggtggtcaggctgtctcacctcaggagggcccccggaccagctgaagggctgattctgtctgcttgtggggcctaggtcccctggggctgtagcctgaagctgggtctcagtcaggaatgggcctggggcaggcttggccctgcagcccttcacctctccaccaggtgtgggtgggcagaccgacccctgtgtggctgggcagaacctttccagcccccaccccaacatggcccccagcggggcaggtggtaggtggagggcagcgacgttgtcctcaggtgggtccttaaaacacttgcacgcatcttccgggacgttggaaacacagacatgaagtataagaaccgtgtacggagtcgtatctccaacctgaaggatgccaagaaccctgacctgcggcggaatgtgctgtgtggggccataacaccccagcagatcgctgtgatgacctcagaggtgagcccctgttggaggggctggagggctgctccctcggagcggtgggctaagccactggccccgtgctccaggagatggccagtgatgagctgaaggagatccgtaaggccatgaccaaggaggccatccgagagcaccagatggcccgcactggcggcacgcagacagacctgttcacctgcggcaagtgcaggaaaaagaactgcacctacacacaggtgcagacccgcagctctgatgagcccatgaccacctttgttgtctgcaacgagtgtggaaaccgctggaagttctgctgacccctcgtgtagatgtgctgcagccttgggccctccccggcccacgtcctccgttgacacagcttctctggagaccctagaaggcggcatgtcctgccctcaacctgcctgcctggattgcacctttctgccctttccccctcattattaaatgtttctttttgcc

SEQ ID NO: 136121 - DNA, 726 bp, Artificial Sequence
  derived and/or modified sequence
ggcaggacgagacccctccccggcagagactaaccgggacgcaggggagacccccacccgtggccgagacccctgccccgggccagccctgccgttcactcccgcaaccccggcagaggccgcgatcaggcctggaccttgtcccgggagagccacccgctctggactcagacccctccctcgcccgcagtcacaggctccgcacccttccctgtcccttaactccagacccccagcctggcccgtcgactccttccttggccctgtcccgcctctcggagcccccggggtgttcgggcctcctctgcgggccgcgccagccccttgccttcctccatcccggcctgggcatcctcacaggccgagccccgccccccaactcagccctctcccacgctccgtctcttacagcgtttgtcaccctccgtctcccatagcatttgtcgccggcaacagtttggagtctgaggagggagccatggatttgctgcgggagctgaaggccatgcctatcacgctgcacctgctccagtccacccgagtcgggatgtctgtcaacgcccttcggaagcagagctcggatgaggaggtcattgcactggccaagtctctcatcaagtcctggaagaagctcctggatgcttccgatgccaaagccagggagcgggggaggggcatgcctctgcccacgtcctcgagggatgcctcagaggccccggatcccag

SEQ ID NO: 136122 - DNA, 1083 bp, Artificial Sequence
  derived and/or modified sequence
gaaccaggtttctctaataaattctctcccttctttagccaggacttagcccgcagcaacttgggttgtgggtagttatgtggacaccctccgaaaagagccggtgtgcttatataagagccaggaggtcgggcaagcctcctctgggagtgtctgggcgctggagcctctggccggctctgttcactgcggcctgggcctctgttgtcttgcggccacagcgagactttggaggaggctgtgtgtgaggactttgaaggggccagtaggcagaaggaggtgatattgtctgttgagatctaaagtcctttatgaaggtcctccttctccttccaggagggagccatggatttgctgcgggagctgaaggccatgcctatcacgctgcacctgctccagtccacccgagtcgggatgtctgtcaacgcccttcggaagcagagctcggatgaggaggtcattgcactggccaagtctctcatcaagtcctggaagaagctcctggatgcttccgatgccaaagccagggagcgggggaggggcatgcctctgcccacgtcctcgagggatgcctcagaggccccggatcccagccgcaagaggccggagctgcccagggcaccgtcgactccgaggatcaccacatttcctccggtgcctgtcacctgtgatgccgtgcgcaacaagtgccgcgagatgctgaccgctgccctgcagacggaccatgaccacgtggccatcggtgcggactgcgagcgcctgtcggctcagatcgaggaatgcatcttccgggacgttggaaacacagacatgaagtataagaaccgtgtacggagtcgtatctccaacctgaaggatgccaagaaccctgacctgcggcggaatgtgctgtgtggggccataacaccccagcagatcgctgtgatgacctcagaggagatggccagtgatgagctgaaggagatccgtaaggccatgaccaaggaggccatccgagagcaccagatggcccgcactggcggcacgcagacagacctgttcacctgcggcaagtgcaggaaaaagaactgcacctacacacag

SEQ ID NO: 136123 - DNA, 941 bp, Artificial Sequence
  derived and/or modified sequence
cacggatgtgggttacaacttggaatgcttgaggctgcagaacccctccccttcttgactgagcagtaagggttccctgctgtggtgcaggaacatgtgggcagagccctgggtgtctccaggagggagccatggatttgctgcgggagctgaaggccatgcctatcacgctgcacctgctccagtccacccgagtcgggatgtctgtcaacgcccttcggaagcagagctcggatgaggaggtcattgcactggccaagtctctcatcaagtcctggaagaagctcctggatgcttccgatgccaaagccagggagcgggggaggggcatgcctctgcccacgtcctcgagggatgcctcagaggccccggatcccagccgcaagaggccggagctgcccagggcaccgtcgactccgaggatcaccacatttcctccggtgcctgtcacctgtgatgccgtgcgcaacaagtgccgcgagatgctgaccgctgccctgcagacggaccatgaccacgtggccatcggtgcggactgcgagcgcctgtcggctcagatcgaggaatgcatcttccgggacgttggaaacacagacatgaagtataagaaccgtgtacggagtcgtatctccaacctgaaggatgccaagaaccctgacctgcggcggaatgtgctgtgtggggccataacaccccagcagatcgctgtgatgacctcagaggagatggccagtgatgagctgaaggagatccgtaaggccatgaccaaggaggccatccgagagcaccagatggcccgcactggcggcacgcagacagacctgttcacctgcggcaagtgcaggaaaaagaactgcacctacacacaggtgcagacccgcagctctgatgagcccatgaccacctttgttgtctgcaacgagtgtggaaaccgctggaag

SEQ ID NO: 136124 - DNA, 900 bp, Artificial Sequence
  derived and/or modified sequence
atgatgggaaaggaggaggagatcgccagaattgcccgacgacttgacaagatggtgacgaagaagagcgctgagggcgctatggatcttttgagggagctgaaagctatgccaatcacgctccacttactgcagagcacacgcgtcgggatgtcggtgaacgcacttcgcaagcaaagctctgatgaggaagtaattgctctggccaagtcgttaattaagtcatggaagaaattgctggacgcctccgatgccaaggctagggagcggggaaggggaatgccactgccgaccagctctcgagatgcaagcgaagccccagatccatcacgcaagagaccagaactacccagagcgccaagtacccctcgaataacaacatttccacctgtccccgtaacatgcgatgccgtgaggaacaagtgccgcgagatgctgacagcggcacttcagactgatcatgatcacgtggccatcggtgcagattgtgagaggttatctgcccagattgaagaatgtatctttcgcgatgtcggaaataccgatatgaagtataaaaatcgcgtgaggagcagaatctcaaacctcaaggacgccaaaaatcctgatctcagacgcaacgttctgtgcggggcaataacgccgcagcagatcgctgttatgactagcgaggagatggccagcgatgagctgaaggagatcaggaaggctatgacaaaggaagccatccgcgagcaccaaatggcgagaaccggcggtacacagactgacctcttcacctgtgggaagtgccgtaagaaaaattgcacttacacccaggtccaaacccgtagttcagatgagcctatgacaacattcgtagtttgtaacgagtgcgggaatcgctggaagttctgctag

SEQ ID NO: 136125 - DNA, 729 bp, Artificial Sequence
  derived and/or modified sequence
atgatgggcaaggaagaggaaatcgcacgtattgctcgtcggctggataagatggtcacaaagaaatccgcggaaggcgcaatggatctcctcagggaattaaaagccatgcctattacccttcacctgctccagtcgacacgtgtcggcatgtccgtgaatgccttaaggaagcagtcaagcgacgaggaggtgattgccctggccaaaagcctaatcaaatcttggaagaagttgctggacgcatccgatgcaaaagccagggagagagggagaggcatgcctctgccaacctcctcgagggacgcctccgaagcacccgacccttccaggaaacggcctgagctcccaagagcaccttctacgccaagaatcacgacattcccacccgtccctgtcacctgtgatgccgtccggaataagtgtagggaaatgctgactgctgccttgcagaccgatcacgatcatgtggcgatcggagcggattgtgagcgattatccgctcaaattgaagagtacatcctatgggtgggcgctgtgggcctagggttctggtggtcccaggaagccgcatggcccggtgctttatggtggttgctcgatgcaactgcacaactatctaggggtcacttgccaggatggtcaccagcatgggtggtgcggctgagtcacctcagacgggcacctggtcctgccgaggggctaatactgagcgcctgtggcgcttag

SEQ ID NO: 136126 - DNA, 900 bp, Artificial Sequence
  derived and/or modified sequence
atgatgggcaaggaggaggagatcgccagaatcgccagaagactggacaagatggtgaccaagaagagcgccgagggcgccatggacctgctgagagagctgaaggccatgcccatcaccctgcacctgctgcagagcaccagagtgggcatgagcgtgaacgccctgagaaagcagagcagcgacgaggaggtgatcgccctggccaagagcctgatcaagagctggaagaagctgctggacgccagcgacgccaaggccagagagagaggcagaggcatgcccctgcccaccagcagcagagacgccagcgaggcccccgaccccagcagaaagagacccgagctgcccagagcccccagcacccccagaatcaccaccttcccccccgtgcccgtgacctgcgacgccgtgagaaacaagtgcagagagatgctgaccgccgccctgcagaccgaccacgaccacgtggccatcggcgccgactgcgagagactgagcgcccagatcgaggagtgcatcttcagagacgtgggcaacaccgacatgaagtacaagaacagagtgagaagcagaatcagcaacctgaaggacgccaagaaccccgacctgagaagaaacgtgctgtgcggcgccatcaccccccagcagatcgccgtgatgaccagcgaggagatggccagcgacgagctgaaggagatcagaaaggccatgaccaaggaggccatcagagagcaccagatggccagaaccggcggcacccagaccgacctgttcacctgcggcaagtgcagaaagaagaactgcacctacacccaggtgcagaccagaagcagcgacgagcccatgaccaccttcgtggtgtgcaacgagtgcggcaacagatggaagttctgctag

SEQ ID NO: 136127 - DNA, 729 bp, Artificial Sequence
  derived and/or modified sequence
atgatgggcaaggaggaggagatcgccagaatcgccagaagactggacaagatggtgaccaagaagagcgccgagggcgccatggacctgctgagagagctgaaggccatgcccatcaccctgcacctgctgcagagcaccagagtgggcatgagcgtgaacgccctgagaaagcagagcagcgacgaggaggtgatcgccctggccaagagcctgatcaagagctggaagaagctgctggacgccagcgacgccaaggccagagagagaggcagaggcatgcccctgcccaccagcagcagagacgccagcgaggcccccgaccccagcagaaagagacccgagctgcccagagcccccagcacccccagaatcaccaccttcccccccgtgcccgtgacctgcgacgccgtgagaaacaagtgcagagagatgctgaccgccgccctgcagaccgaccacgaccacgtggccatcggcgccgactgcgagagactgagcgcccagatcgaggagtacatcctgtgggtgggcgccgtgggcctgggcttctggtggagccaggaggccgcctggcccggcgccctgtggtggctgctggacgccaccgcccagctgagcagaggccacctgcccggctggagccccgcctgggtggtgagactgagccacctgagaagagcccccggccccgccgagggcctgatcctgagcgcctgcggcgcctag

SEQ ID NO: 136128 - DNA, 2004 bp, Artificial Sequence
  derived and/or modified sequence
atgcaccaccagcagagaatggccgccctgggcaccgacaaggagctgagcgacctgctggacttcagcgccatgttcagcccccccgtgagcagcggcaagaacggccccaccagcctggccagcggccacttcaccggcagcaacgtggaggacagaagcagcagcggcagctggggcaacggcggccaccccagccccagcagaaactacggcgacggcaccccctacgaccacatgaccagcagagacctgggcagccacgacaacctgagcccccccttcgtgaacagcagaatccagagcaagaccgagagaggcagctacagcagctacggcagagagagcaacctgcagggctgccaccagcagagcctgctgggcggcgacatggacatgggcaaccccggcaccctgagccccaccaagcccggcagccagtactaccagtacagcagcaacaaccccagaagaagacccctgcacagcagcgccatggaggtgcagaccaagaaggtgagaaaggtgccccccggcctgcccagcagcgtgtacgcccccagcgccagcaccgccgactacaacagagacagccccggctaccccagcagcaagcccgccaccagcaccttccccagcagcttcttcatgcaggacggccaccacagcagcgacccctggagcagcagcagcggcatgaaccagcccggctacgccggcatgctgggcaacagcagccacatcccccagagcagcagctactgcagcctgcacccccacgagagactgagctaccccagccacagcagcgccgacatcaacagcagcctgccccccatgagcaccttccacagaagcggcaccaaccactacagcaccagcagctgcaccccccccgccaacggcaccgacagcatcatggccaacagaggcagcggcgccgccggcagcagccagaccggcgacgccctgggcaaggccctggccagcatctacagccccgaccacaccaacaacagcttcagcagcaaccccagcacccccgtgggcagcccccccagcctgagcgccggcaccgccgtgtggagcagaaacggcggccaggccagcagcagccccaactacgagggccccctgcacagcctgcagagcagaatcgaggacagactggagagactggacgacgccatccacgtgctgagaaaccacgccgtgggccccagcaccgccatgcccggcggccacggcgacatgcacggcatcatcggccccagccacaacggcgccatgggcggcctgggcagcggctacggcaccggcctgctgagcgccaacagacacagcctgatggtgggcacccacagagaggacggcgtggccctgagaggcagccacagcctgctgcccaaccaggtgcccgtgccccagctgcccgtgcagagcgccaccagccccgacctgaaccccccccaggacccctacagaggcatgccccccggcctgcagggccagagcgtgagcagcggcagcagcgagatcaagagcgacgacgagggcgacgagaacctgcaggacaccaagagcagcgaggacaagaagctggacgacgacaagaaggacatcaagagcatcaccagcaacaacgacgacgaggacctgacccccgagcagaaggccgagagagagaaggagagaagaatggccaacaacgccagagagagactgagagtgagagacatcaacgaggccttcaaggagctgggcagaatggtgcagctgcacctgaagagcgacaagccccagaccaagctgctgatcctgcaccaggccgtggccgtgatcctgagcctggagcagcaggtgagagagagaaacctgaaccccaaggccgcctgcctgaagagaagagaggaggagaaggtgagcagcgagcccccccccctgagcctggccggcccccaccccggcatgggcgacgccagcaaccacatgggccagatgtag

SEQ ID NO: 136129 - DNA, 2004 bp, Artificial Sequence
  derived and/or modified sequence
atgcatcaccagcagcggatggctgctctgggcactgacaaggagctaagcgacctgttggactttagtgccatgtttagtccccctgtgtcgtctggtaagaatggccccacctccctagcctctggtcacttcaccggatctaacgttgaagacagaagctcttcagggtcatgggggaacggaggccatccttcccctagcaggaactatggtgacgggacgccatacgatcacatgacatcccgggacctcggatcccatgacaatctgagcccgcccttcgtaaatagtcgcattcagagcaaaacggagcggggctcctacagttcgtatggccgagaatccaacttgcaggggtgccaccagcaatctcttctggggggcgatatggatatgggaaatcccgggacactgtcacctactaagcctggctcacagtattaccagtactcaagcaacaatcctcgccgccggcctctgcatagctccgctatggaggtccaaactaaaaaggtccgaaaggtgcccccagggctgcccagcagcgtctacgctccgtctgccagtacggccgactacaatagagatagccccggctatccgtcctctaagcccgctacttcgacgttcccaagctccttttttatgcaggatggtcaccactcatctgacccctggagcagctcttccggcatgaatcagcccggctacgcaggcatgttaggaaactcttcgcatatcccacaatcctccagctactgctcactgcacccccatgaaaggctgagctatccgtctcattcttcagctgatataaactccagcctgccccccatgtctacttttcatcggtctggaacaaaccattactctacatcatcatgtactccccctgctaacggcaccgacagcattatggctaacagagggtcgggggcagccggcagctcacagaccggcgatgcactggggaaggcattggcgtccatttattctccggaccacaccaacaactcttttagctccaacccttccaccccagtaggctcaccaccttcgctatcagcggggacggcggtttggtcaaggaacgggggacaggcttccagtagtccaaactacgaagggcccctccacagcctgcaatccaggatcgaagacaggctggagagattagacgatgccatccacgtgctgcgcaaccatgctgtgggccctagcacagccatgcctgggggacacggagatatgcacggcatcattggaccatcccataacggggctatgggcggcctgggcagcgggtacgggactggactcctaagtgcgaatcggcattctctcatggtagggacacaccgcgaggacggcgtggcattgcgcggctcccattctttactgccaaaccaggtgcccgttccacagctacccgttcaaagtgccaccagtcctgacctcaacccaccccaagacccttataggggcatgcctcccggcctgcagggacagtccgtgagttctggttcaagtgagattaaaagcgacgacgaaggcgatgaaaatcttcaggacactaaaagttctgaggacaagaaacttgatgacgacaaaaaggacattaagagcatcacgagcaacaacgatgatgaagacttaacccccgaacagaaagccgaaagggagaaggagcgccgtatggccaataatgcccgagagcggctgagggttcgcgatatcaatgaggcatttaaagagctgggccgcatggtgcagcttcatctcaagtctgacaagccccagacgaagcttctgattctacaccaggcagtggccgtgatcctttcattggagcaacaggttcgtgaacggaacctgaacccaaaagccgcctgcctcaaacgccgtgaagaggagaaggtgtcttccgagcctcctccattgagtctggccggccctcaccctggcatgggggacgcgagcaatcatatgggacagatgtag

SEQ ID NO: 136130 - DNA, 2004 bp, Artificial Sequence
  derived and/or modified sequence
atgcaccaccagcagaggatggccgccctgggcacagacaaggagctgagtgacctgctggacttcagcgccatgttcagcccccctgtgagcagcggcaagaatggccccaccagcctggccagcggccacttcaccggcagcaatgtggaggacaggagcagcagcggctcctggggcaatggaggccaccccagccccagcagaaattatggagatggcaccccctatgaccacatgaccagccgggacctgggcagccatgacaacctgagccccccatttgtgaacagccgcatccagagcaagacagagcggggcagctacagcagctatggccgggagagcaacctgcagggctgccaccagcagagcctgctgggcggggacatggacatgggcaaccctggcaccctgagccccaccaagccaggcagccagtactaccagtacagcagcaacaacccccggcggcggcccctgcacagcagcgccatggaggtgcagaccaagaaggtgaggaaggtgcccccaggcctgcccagctctgtgtatgcccccagcgccagcacagctgactacaacagagacagccctggctaccccagcagcaagccagccaccagcaccttccccagcagcttcttcatgcaggacggccaccacagcagtgacccctggagcagcagcagcggcatgaaccagcccggctacgccggcatgctgggcaacagcagccacatcccccagagcagcagctactgcagcctgcacccccatgagcggctgagctaccccagccacagcagcgctgacatcaacagcagcctgccccccatgagcaccttccacaggagcggcaccaaccactacagcaccagcagctgcaccccaccagccaatggaacagacagcatcatggccaacagaggcagcggggctgctggcagcagccagacaggagatgccctgggcaaggccctggccagcatctacagcccagaccacaccaacaacagcttcagcagcaaccccagcacccctgtgggcagcccccccagcctgtctgctggaacagctgtgtggagcagaaatggaggccaggccagcagcagccccaactatgagggccccctgcacagcctgcagagcagaattgaagatcggctggagcggctggatgatgccatccacgtgctgagaaatcatgctgtgggccccagcacagccatgcctgggggccatggagacatgcacggcatcatcggccccagccacaatggagccatgggcggcctgggcagcggctatggaacaggcctgctgagcgccaacagacacagcctgatggtgggcacccaccgggaggatggagtggccctgcggggcagccacagcctgctgcccaaccaggtgcctgtgccccagctgcctgtgcagagcgccaccagcccagacctgaaccccccccaggacccctaccggggcatgcctcctggcctgcagggccagagcgtgagcagcggcagcagcgagatcaagagtgatgatgaaggagatgagaacctgcaggacaccaagagcagcgaggacaagaagctggatgatgacaagaaggacatcaagagcatcaccagcaacaatgatgatgaggacctgaccccagagcagaaggccgagcgggagaaggagaggaggatggccaacaatgcccgggagcggctgcgggtgcgggacatcaatgaggccttcaaggagctgggccgcatggtgcagctgcacctgaagagtgacaagccccagaccaagctgctgatcctgcaccaggccgtggccgtcatcctgagcctggagcagcaggtgcgggagaggaacctgaaccccaaggccgcctgcctgaagagaagagaggaggagaaggtgtcctctgagcccccacccctgagcctggccggcccccaccctggcatgggagatgccagcaaccacatgggccagatgtag

SEQ ID NO: 136131 - DNA, 2004 bp, Artificial Sequence
  derived and/or modified sequence
atgcaccaccagcagcggatggccgccctgggcaccgacaaggagctgagtgatctgctggatttctctgctatgtttagtccaccagtcagctccgggaagaatggccccacaagtctggcatcggggcatttcactggcagcaatgttgaagatcgaagttcatcaggttcttggggcaacggcgggcacccatctccctccagaaattatggagacggcactccgtacgaccatatgacaagccgcgacctgggatctcacgataacttgtctcctccttttgtgaattcgcgaattcagtccaagactgaacgagggagctatagttcgtatgggagagaatcgaatctccagggctgccaccaacagtccctgctgggcggtgacatggatatggggaatcccggcacccttagccctactaaacccggctcccaatactaccaatacagctcgaataacccccgccgacgccctctgcattcctctgccatggaggtgcagaccaaaaaggtgaggaaggtgcctcccggcctcccatcttccgtttatgctccatctgcaagcaccgcagactacaatcgggattctcctggatacccttcttcaaaaccagcaacaagcaccttcccttcgagtttttttatgcaggatgggcaccactccagcgacccctggagctcatccagcggcatgaaccagcctggttacgccggtatgctgggaaactcctcccacatcccccaatcctcatcatactgcagcctgcacccccatgaacgtctgagttacccttctcacagttcagctgacatcaactcttcactgccccctatgtccacatttcacagatctggtacaaatcactacagcacttctagttgcacccctcctgctaacgggaccgactccatcatggctaatcgcgggagcggagctgcggggagctctcagactggagatgccctggggaaagccttagccagcatttacagccccgaccacacaaataatagcttttcatctaatcccagcaccccggttggaagcccacccagtttgagcgccggcaccgctgtctggtcccgtaatggcgggcaggcctctagcagtcccaattatgaggggcctttgcatagtcttcagagtcggatagaggatagactggagcgattggacgacgccatccacgtgctacgtaaccatgctgtgggcccctccacagccatgccaggtgggcatggcgacatgcatgggattataggccccagtcataacggcgctatggggggacttgggagtggctatggcactggtttgctgtctgcaaacaggcactcactcatggtcgggactcaccgggaggatggagtcgcacttcgtggaagccactctctgctgcctaatcaagttcctgtcccacagcttcccgtgcaaagcgcaactagtccagatctcaacccacctcaggacccctatcgcggaatgccaccgggactacagggccagagtgtctcttcaggaagctcagagattaagagtgacgatgaaggagacgaaaatctgcaagatacaaagtcttccgaggacaagaagttagacgatgacaagaaggacatcaagagtattacttctaataacgacgatgaggatctcacacccgagcaaaaggctgaacgcgagaaagagcggagaatggccaacaacgcccgcgaacgtctcagagtgcgagatattaacgaagcctttaaggagctggggcggatggtgcagcttcaccttaagagtgataagccgcaaaccaaactgctgatcctccaccaagctgtcgcagtgattctgagtttagagcagcaggtgcgagaaagaaatttgaacccaaaagctgcctgcctgaagcggagagaggaagaaaaagtgtccagcgaaccacccccactgagcttggccgggccgcatcccggaatgggggacgcttccaatcacatgggacaaatgtag

SEQ ID NO: 136132 - DNA, 2004 bp, Artificial Sequence
  derived and/or modified sequence
atgcatcaccaacagcgcatggccgcattgggaacggataaggagctatccgatttgttagattttagtgcgatgttttcccccccagtctcttcaggcaaaaacggcccaactagcctcgcaagcggtcacttcaccggctctaatgttgaggaccgaagctcaagtggtagttggggtaacggaggacacccaagtccatctagaaattacggggatgggaccccctatgaccatatgacatcacgggacttaggcagccacgacaacctcagcccaccgtttgtcaatagccgaattcagtccaagaccgaacggggtagctacagcagctatggcagagagtccaacttgcagggttgtcaccagcagtcccttttggggggagacatggatatgggcaaccccggaacactctctcccactaagcctggctcccagtattatcagtatagttccaacaatcctcgacggcgtcccctgcactctagcgctatggaggtacagacaaagaaagtgagaaaggtgcccccaggcctgccttccagtgtctacgcgccaagtgcctctacagcagactataaccgagactcaccgggataccctagttctaaaccagccacctctacttttcctagctccttcttcatgcaggacggacaccactcatccgacccgtggagctccagctctgggatgaaccagcccggatacgccggtatgctaggaaattccagtcatatcccccaaagcagttcttactgttcactgcaccctcacgaaaggttgagctaccctagccacagcagcgcagacataaacagtagcctgccacctatgtcaaccttccacaggagcgggactaaccattatagcacctccagctgcactcctcccgctaatggcacagactcaatcatggctaatcgaggatccggtgcggctggtagtagccagactggcgatgctctgggcaaagctttagccagtatctactccccagatcatactaataactcgttttcctccaacccctctaccccagtgggttcccctccttcattgagcgccggaaccgccgtgtggagcagaaacggtggtcaggcttccagctctccaaattatgaagggccactgcacagcctgcagagtcgcatagaagaccgattagagcggctcgacgacgctatccacgtactgaggaaccacgcagtaggaccttccacagcaatgcctggtggccatggggatatgcacggaatcatcggacccagccacaacggagctatggggggtctgggtagcgggtacggtaccggattgctatcagctaaccgacatagccttatggtcggcacgcacagggaggacggcgtggccttaagaggctcacactccctgctacctaatcaggttccggtccctcagctgcctgtgcaatcagctacaagtcctgacctaaatcctccacaagacccctacagaggcatgcctccaggtctccaggggcaaagcgttagttccgggagcagcgaaatcaagtctgatgacgaaggggacgagaacctgcaggatacaaaatcatccgaggataaaaaattggacgatgataagaaagacataaagagcattaccagtaataatgacgatgaagatctaacacctgagcagaaggctgagagggagaaagaacgtcgtatggctaataatgcacgagagcgactgagagtcagggacatcaatgaggcctttaaggaactgggacgaatggtgcagctccatctgaagtcggataaaccacagaccaaattgcttatacttcatcaggcagtcgccgttatcttgagccttgagcagcaggtgcgcgagcgtaatctaaatccgaaagccgcatgtctgaaaagacgcgaggaagaaaaagttagtagcgaaccgccaccattgagcctggctgggcctcaccccggaatgggcgacgcgtctaatcacatgggccagatgtag

SEQ ID NO: 136133 - protein, 654 aa, Artificial Sequence
  derived and/or modified sequence
MNQPQRMAPVGTDKELSDLLDFSMMFPLPVTNGKGRPASLAGAQFGGSGLEDRPSSGSWGSGDQSSSSFDPSRTFSEGTHFTESHSSLSSSTFLGPGLGGKSGERGAYASFGRDAGVGGLTQAGFLSGELALNSPGPLSPSGMKGTSQYYPSYSGSSRRRAADGSLDTQPKKVRKVPPGLPSSVYPPSSGEDYGRDATAYPSAKTPSSTYPAPFYVADGSLHPSAELWSPPGQAGFGPMLGGGSSPLPLPPGSGPVGSSGSSSTFGGLHQHERMGYQLHGAEVNGGLPSASSFSSAPGATYGGVSSHTPPVSGADSLLGSRGTTAGSSGDALGKALASIYSPDHSSNNFSSSPSTPVGSPQGLAGTSQWPRAGAPGALSPSYDGGLHGLQSKIEDHLDEAIHVLRSHAVGTAGDMHTLLPGHGALASGFTGPMSLGGRHAGLVGGSHPEDGLAGSTSLMHNHAALPSQPGTLPDLSRPPDSYSGLGRAGATAAASEIKREEKEDEENTSAADHSEEEKKELKAPRARTSPDEDEDDLLPPEQKAEREKERRVANNARERLRVRDINEAFKELGRMCQLHLNSEKPQTKLLILHQAVSVILNLEQQVRERNLNPKAACLKRREEEKVSGVVGDPQMVLSAPHPGLSEAHNPAGHM

SEQ ID NO: 136134 - DNA, 1965 bp, Artificial Sequence
  derived and/or modified sequence
atgaaccagccccagagaatggcccccgtgggcaccgacaaggagctgagcgacctgctggacttcagcatgatgttccccctgcccgtgaccaacggcaagggcagacccgccagcctggccggcgcccagttcggcggcagcggcctggaggacagacccagcagcggcagctggggcagcggcgaccagagcagcagcagcttcgaccccagcagaaccttcagcgagggcacccacttcaccgagagccacagcagcctgagcagcagcaccttcctgggccccggcctgggcggcaagagcggcgagagaggcgcctacgccagcttcggcagagacgccggcgtgggcggcctgacccaggccggcttcctgagcggcgagctggccctgaacagccccggccccctgagccccagcggcatgaagggcaccagccagtactaccccagctacagcggcagcagcagaagaagagccgccgacggcagcctggacacccagcccaagaaggtgagaaaggtgccccccggcctgcccagcagcgtgtacccccccagcagcggcgaggactacggcagagacgccaccgcctaccccagcgccaagacccccagcagcacctaccccgcccccttctacgtggccgacggcagcctgcaccccagcgccgagctgtggagcccccccggccaggccggcttcggccccatgctgggcggcggcagcagccccctgcccctgccccccggcagcggccccgtgggcagcagcggcagcagcagcaccttcggcggcctgcaccagcacgagagaatgggctaccagctgcacggcgccgaggtgaacggcggcctgcccagcgccagcagcttcagcagcgcccccggcgccacctacggcggcgtgagcagccacaccccccccgtgagcggcgccgacagcctgctgggcagcagaggcaccaccgccggcagcagcggcgacgccctgggcaaggccctggccagcatctacagccccgaccacagcagcaacaacttcagcagcagccccagcacccccgtgggcagcccccagggcctggccggcaccagccagtggcccagagccggcgcccccggcgccctgagccccagctacgacggcggcctgcacggcctgcagagcaagatcgaggaccacctggacgaggccatccacgtgctgagaagccacgccgtgggcaccgccggcgacatgcacaccctgctgcccggccacggcgccctggccagcggcttcaccggccccatgagcctgggcggcagacacgccggcctggtgggcggcagccaccccgaggacggcctggccggcagcaccagcctgatgcacaaccacgccgccctgcccagccagcccggcaccctgcccgacctgagcagaccccccgacagctacagcggcctgggcagagccggcgccaccgccgccgccagcgagatcaagagagaggagaaggaggacgaggagaacaccagcgccgccgaccacagcgaggaggagaagaaggagctgaaggcccccagagccagaaccagccccgacgaggacgaggacgacctgctgccccccgagcagaaggccgagagagagaaggagagaagagtggccaacaacgccagagagagactgagagtgagagacatcaacgaggccttcaaggagctgggcagaatgtgccagctgcacctgaacagcgagaagccccagaccaagctgctgatcctgcaccaggccgtgagcgtgatcctgaacctggagcagcaggtgagagagagaaacctgaaccccaaggccgcctgcctgaagagaagagaggaggagaaggtgagcggcgtggtgggcgacccccagatggtgctgagcgccccccaccccggcctgagcgaggcccacaaccccgccggccacatgtag

SEQ ID NO: 136135 - DNA, 1965 bp, Artificial Sequence
  derived and/or modified sequence
atgaatcagccacaacggatggctcccgtaggcactgataaggagctttcagaccttttagatttcagtatgatgttccccctgcctgtgacaaacggcaaaggacggccagcttccctcgccggcgcacaattcggcgggtcagggctggaagatagaccttcatccgggagctggggaagcggtgaccagtcctcaagcagttttgacccctctcgaacattttccgaaggcacgcacttcactgagtctcatagctctctgtccagctctacattcctggggccagggttgggagggaagagcggcgagcgcggcgcctatgcatcatttgggagagatgccggcgttggtggcctcacccaggcggggtttctgagcggcgaattagccctgaattctccgggtcctctgagtccatccggtatgaaaggaacatcccaatactacccctcatacagtgggtcgtctcgacgacgcgcagccgacgggtcattggacactcagccgaaaaaggtgagaaaggtgcctcctggactacctagctcggtgtatcctcccagttccggagaggactacgggcgagacgccaccgcgtacccaagcgcgaaaacgccctccagcacctaccctgcacctttctacgtagcagacggctctttgcatccttcggccgagctctggagcccacctggtcaggcgggcttcggcccgatgcttggtggcgggagttcccctttgcctttaccgcctggatccggtccagtcgggtctagcggatcgtcaagcacattcggaggccttcaccagcatgaaagaatgggataccaacttcacggcgccgaagttaatggcggcctaccctcagctagtagtttcagcagcgcccctggggcaacttatgggggcgtatccagccacacgccacccgtgtccggtgccgactctttacttggctctaggggaacaaccgcgggtagcagcggggacgcattgggcaaagccctggcatcgatatacagtccagaccacagtagtaacaacttttctagctccccatccacccccgtcgggtccccgcagggactggcagggaccagtcagtggcctagagcgggcgccccgggcgcactctccccttcctacgatggggggttgcatgggcttcagtccaagatcgaggaccatctggatgaggcaatccatgtgctgcgctcacatgcagtgggaacagctggggacatgcatacactgctgccgggacatggcgccctcgcgtcagggttcaccggccctatgtccctcggcgggcggcatgctggccttgtcggtggaagtcacccagaggatggcctggctggatccacgtctctgatgcacaatcacgccgctttaccctcacagcctggaacccttcctgacttatcccggccacctgattcttacagcggccttgggcgcgccggagcaaccgcagccgcctccgagatcaaacgggaagagaaggaggacgaagagaacacttccgcggctgatcacagcgaagaggaaaaaaaagaactgaaggcaccacgtgctcggacctcacccgacgaggatgaagatgatctactgccgccggaacagaaagcagagcgcgaaaaagagcggcgcgtcgccaacaacgcccgtgagaggttaagggtccgcgacattaacgaggcgttcaaggagctaggtagaatgtgccagctgcatctaaactccgagaagccacagaccaaattgcttattttacaccaagccgtgtctgtgatattgaaccttgagcagcaagtgcgtgagcgtaacctgaatcccaaggccgcatgtctgaaaagaagagaggaggagaaagtatcaggagtggtcggtgatcctcaaatggtcctttcggccccccatcccggacttagtgaagctcacaatcccgccgggcatatgtag

SEQ ID NO: 136136 - DNA, 1965 bp, Artificial Sequence
  derived and/or modified sequence
atgaaccagccccagaggatggcccctgtgggcacagacaaggagctgagtgacctgctggacttctccatgatgttccccctgcctgtgaccaacgggaagggccgcccagccagcctggccggggcccagtttggaggcagcggcctggaggaccggcccagcagcggctcctggggcagcggggaccagagcagcagcagctttgaccccagcaggaccttcagcgagggcacccacttcacagagagccacagcagcctgagcagcagcaccttcctgggccctggcctgggcggcaagagcggggagcggggggcctatgccagctttggaagagatgctggggtgggcggcctgacccaggccggcttcctgtctggagagctggccctgaacagccctggccccctgagccccagcggcatgaagggcaccagccagtactaccccagctacagcggcagcagcagaagaagagctgctgatggcagcctggacacccagcccaagaaggtgaggaaggtgcccccaggcctgcccagctctgtgtacccacccagcagtggagaagattatggaagagatgccacagcctaccccagcgccaagacccccagcagcacctacccagcccccttctacgtggctgatggcagcctgcaccccagcgctgagctgtggagccccccaggccaggccggcttcggccccatgctgggcggcggcagcagccccctgcccctgcccccaggcagcggccctgtgggcagcagcggcagcagcagcacctttggaggcctgcaccagcacgagaggatgggctaccagctgcatggagctgaggtgaatggaggcctgcccagcgccagcagcttcagcagcgcccctggggccacctatggaggagtgagcagccacaccccacctgtgtctggagctgacagcctgctgggcagccggggcaccacagctggcagcagtggagatgccctgggcaaggccctggccagcatctacagcccagaccacagcagcaacaacttcagcagcagccccagcacccctgtgggcagcccccagggcctggccggcaccagccagtggccccgggccggggcccctggggccctgagccccagctatgatggcggcctgcacggcctgcagagcaagattgaggaccacctggatgaggccatccacgtgctgcggagccatgctgtgggcacagctggggacatgcacaccctgctgcccggccacggggccctggccagcggcttcaccggccccatgagcctgggcggcagacatgctggcctggtgggcggcagccacccagaagatggcctggccggcagcaccagcctgatgcacaaccacgccgccctgcccagccagcccggcaccctgcctgacctgagccggcccccagacagctacagcggcctgggccgggccggggccacagctgctgccagcgagatcaagcgggaggagaaggaggatgaggagaacaccagcgctgctgaccacagcgaggaggagaagaaggagctgaaggccccccgggcccggaccagcccagatgaagatgaagatgacctgctgcccccagagcagaaggccgagcgggagaaggagcggcgggtggccaacaatgcccgggagcggctgcgggtgcgggacatcaatgaggccttcaaggagctgggccgcatgtgccagctgcacctgaacagcgagaagccccagaccaagctgctgatcctgcaccaggccgtgtctgtcatcctgaacctggagcagcaggtgcgggagaggaacctgaaccccaaggccgcctgcctgaagaggcgggaggaggagaaggtgtctggagtggtgggggacccccagatggtgctgagcgccccccaccctggcctgtctgaggcccacaacccagctggccacatgtag

SEQ ID NO: 136137 - DNA, 1965 bp, Artificial Sequence
  derived and/or modified sequence
atgaaccagccccagcggatggcccccgtgggcaccgacaaggagttatctgacctgctggacttcagcatgatgtttccacttcctgtgacaaatggaaaggggagaccagccagcttagccggggcacagtttgggggctccggactcgaggacaggccttcaagcggctcatggggctcaggcgaccagagcagctcttcatttgatccatcgaggacttttagtgaagggacccattttacagagagccattcgagtctctcatcttccacattcctgggccccggactcggggggaaatcaggggaaaggggggcatacgcatcttttggtcgcgacgcaggtgtcggcgggttgactcaggcagggtttctatcaggcgaacttgctctcaacagcccaggaccgctaagccctagtgggatgaagggaacctcacagtactatcccagctattctggctcatcaagacggagggccgccgacggctccttggatacacagccgaagaaggtgaggaaggtaccccctggcctcccttcttctgtctatcctcctagcagcggggaggattatgggcgggacgcaactgcttatccttctgccaaaacaccctcgagtacctacccagctcccttctatgttgctgacggctctttacaccccagcgctgaactgtggtcacctccaggtcaggccggctttgggcctatgttgggtggaggttccagtccgttgcctctcccaccgggcagcggcccagtggggagcagcggctcctcctccacgttcgggggattacaccagcacgagagaatgggttatcaactgcacggcgccgaagtgaacggtggtttacctagcgcctcgtccttttcttccgcccctggagctacctatggaggagtgtcgtcccacacacctcccgtttccggagccgattctctcctgggctcgcgcggaacaaccgctgggtcctctggcgatgcactcggcaaggctcttgccagcatttactccccggatcacagcagcaacaatttttcgtccagcccctcaacgcctgtcggcagccctcaaggcctggcgggtacatcacagtggccgcgagcaggcgcccctggtgctctctctccgtcctatgacggagggctccacggtctgcaatcaaaaatcgaagaccaccttgatgaggcgattcacgttctgcggtctcacgccgttggaactgctggcgacatgcacaccttgctgcccggacatggagccctcgcaagtggctttacaggccctatgtccttgggcggacgacacgctggtctggtgggaggctcccatcccgaggatgggttagctggcagcacctctttaatgcacaaccacgcggcattgccctctcagccgggaacactgcctgacctgtcccgccctccagattcgtattccggcctcggcagggctggagcaactgcagccgcgagcgaaatcaaacgtgaggagaaagaggacgaggaaaacacgagtgcagctgatcacagcgaagaagagaagaaagaactcaaagcaccccgggccaggacctcaccggacgaggacgaggacgacctgttgcccccagagcagaaggccgaacgagaaaaagagaggcgagtcgcaaataacgccagggagcggttgagagtaagagacattaacgaggcttttaaggagctagggagaatgtgtcaactgcatcttaattccgagaagccacagaccaaactgttgatactgcaccaggcggttagcgtaatcttgaacctcgagcagcaggtgagagagcgaaacttgaatcctaaggccgcctgtttaaaaaggagagaagaggagaaagtgagtggcgtggtgggagatccgcaaatggttctctctgccccgcatcccggcctgagtgaggcacataaccctgctgggcacatgtag

SEQ ID NO: 136138 - DNA, 1965 bp, Artificial Sequence
  derived and/or modified sequence
atgaatcagcctcagcggatggcaccagtggggaccgataaggagctctccgatctcctggatttttcaatgatgtttccgctgcctgtgaccaacggaaaaggcagacccgcttcattggcaggcgctcagtttggcggatccgggctggaggacagaccctcatctggttcatggggaagcggcgatcagtcatctagttcctttgatcctagccggaccttcagtgaggggacgcactttacggagagccattccagccttagttcaagcacattcctcggtccaggtctgggcggaaaatcaggcgagcgaggggcatacgcgagcttcggcagagacgcaggcgtggggggacttacccaggctggatttctcagcggagaacttgcgctcaacagccccggtcctttgtcaccgtccggcatgaaggggactagccaatattaccccagctattcaggctcttctcgcaggcgcgctgccgacggctctctggacacccagcccaagaaagtgcggaaggtgccccctggcctgcccagctccgtataccccccttcaagcggtgaagattacggtagggatgcaacggcctacccttctgcgaaaacgccatccagcacataccccgctccattttacgtcgccgacggctccttgcatcccagtgctgaattatggagccccccaggacaagctggattcggcccaatgctcggcggtgggtccagtcccctgccactgcccccaggcagcggccctgtgggtagctccggaagtagtagcactttcggaggcctccatcaacacgagcgaatggggtatcaattgcacggcgcagaagtcaacggcggacttccttcagcatcatcctttagttcagccccaggcgcaacctacggcggtgtgtcatctcacaccccacctgtttctggggctgactcactgctaggctctcgcggtaccactgcaggaagcagcggcgacgcccttggaaaagccctcgcttccatttattcacctgatcactccagcaacaatttctcaagttcacctagtacaccagtaggctcccctcaaggactggctggaacctcccagtggccgagggctggggcacccggtgctctgtcgcctagttacgacggcggattgcatggcttgcagtccaagatcgaggatcatctggatgaagcaatccacgtcctgaggtctcatgccgttggtaccgcaggggatatgcacactctgctcccagggcacggcgctctcgcttctgggtttaccgggccaatgagtctgggcggaaggcatgcgggtttggtggggggatcgcatcctgaggatggcctcgctgggagcacaagtctgatgcataaccatgctgcactgccttctcagccgggaactcttccagacctttctagaccacctgatagttactctggtctgggtcgcgcaggtgccactgctgctgcatccgagataaaacgtgaagagaaggaggacgaagaaaatacttccgcggcagaccattctgaggaggaaaagaaagaattaaaggctccacgggcaaggacttcccccgatgaggatgaggacgatctccttccacccgaacaaaaagccgagagggaaaaggaacggagagtcgcgaataacgctcgggaacgcctccgggtccgggacatcaatgaggcttttaaagaattaggccgaatgtgccagttgcatcttaattcagaaaagccacagacaaaactgcttatcctgcaccaggccgtgtctgtgattctgaatttggaacagcaggtgagagaaagaaacctgaatcccaaggccgcttgcctcaagaggagggaggaagagaaagtcagcggagtcgtgggtgacccacagatggtgctatccgctccacaccccggattatctgaagcccataatccagctggacatatgtag

SEQ ID NO: 136139 - DNA, 4445 bp, Artificial Sequence
  derived and/or modified sequence
gcgccgcgtgcccggccgcgcccagcagggtttccaggcctgaggtgcccgccctggccccaggagaatgaaccagccgcagaggatggcgcctgtgggcacagacaaggagctcagtgacctcctggacttcagcatgatgttcccgctgcctgtcaccaacgggaagggccggcccgcctccctggccggggcgcagttcggaggttcaggtcttgaggaccggcccagctcaggctcctggggcagcggcgaccagagcagctcctcctttgaccccagccggaccttcagcgagggcacccacttcactgagtcgcacagcagcctctcttcatccacattcctgggaccgggactcggaggcaagagcggtgagcggggcgcctatgcctccttcgggagagacgcaggcgtgggcggcctgactcaggctggcttcctgtcaggcgagctggccctcaacagccccgggcccctgtccccttcgggcatgaaggggacctcccagtactacccctcctactccggcagctcccggcggagagcggcagacggcagcctagacacgcagcccaagaaggtccggaaggtcccgccgggtcttccatcctcggtgtacccacccagctcaggtgaggactacggcagggatgccaccgcctacccgtccgccaagacccccagcagcacctatcccgcccccttctacgtggcagatggcagcctgcacccctcagccgagctctggagtcccccgggccaggcgggcttcgggcccatgctgggtgggggctcatccccgctgcccctcccgcccggtagcggcccggtgggcagcagtggaagcagcagcacgtttggtggcctgcaccagcacgagcgtatgggctaccagctgcatggagcagaggtgaacggtgggctcccatctgcatcctccttctcctcagcccccggagccacgtacggcggcgtctccagccacacgccgcctgtcagcggggccgacagcctcctgggctcccgagggaccacagctggcagctccggggatgccctcggcaaagcactggcctcgatctactccccggatcactcaagcaataacttctcgtccagcccttctacccccgtgggctccccccagggcctggcaggaacgtcacagtggcctcgagcaggagcccccggtgccttatcgcccagctacgacgggggtctccacggcctgcagagtaagatagaagaccacctggacgaggccatccacgtgctccgcagccacgccgtgggcacagccggcgacatgcacacgctgctgcctggccacggggcgctggcctcaggtttcaccggccccatgtcactgggcgggcggcacgcaggcctggttggaggcagccaccccgaggacggcctcgcaggcagcaccagcctcatgcacaaccacgcggccctccccagccagccaggcaccctccctgacctgtctcggcctcccgactcctacagtgggctagggcgagcaggtgccacggcggccgccagcgagatcaagcgggaggagaaggaggacgaggagaacacgtcagcggctgaccactcggaggaggagaagaaggagctgaaggccccccgggcccggaccagcccagacgaggacgaggacgaccttctccccccagagcagaaggccgagcgggagaaggagcgccgggtggccaataacgcccgggagcggctgcgggtccgtgacatcaacgaggcctttaaggagctggggcgcatgtgccaactgcacctcaacagcgagaagccccagaccaaactgctcatcctgcaccaggctgtctcggtcatcctgaacttggagcagcaagtgcgagagcggaacctgaatcccaaagcagcctgtttgaaacggcgagaagaggaaaaggtgtcaggtgtggttggagacccccagatggtgctttcagctccccacccaggcctgagcgaagcccacaaccccgccgggcacatgtgaaaggtatgcctccgtgggacgagccacccgctttcagccctgtgctctggccccagaacggccactcgagaccccgggcttcatccacatccacacctcacacacctgttgtcagcatcgagccaacaccaacctgacaaggttcggagtgatgggggcggccaaggtgacactgggtccaggagctccctggggccctggcctaccactcactggcctcgctccccctgtccccgaatctcagccaccgtgtcactctgtgacctgtcccatggatcctgaaactgcatcttggccctgttgcctgggctgacaggagcattttttttttttccagtaaacaaaacctgaaagcaagcaacaaaacatacactttgtcagagaagaaaaaaatgccttaactataaaaagcggagaaatggaaacatatcactcaagggggatgctgtggaaacctggcttattcttctaaagccaccagcaaattgtgcctaagcgaaatattttttttaaggaaaataaaaacattagttacaagattttttttttcttaatgtagatgaaaattagcaaggatgctgcctttggtctctggtttttttaagctttttttgcatatgttttgtaagcaacaaatttttttgtataaaagtcccgtgtctctcgctatttctgctgctgttcctagactgagcattgcatttcttgatcaaccagatgattaaacgttgtattaaaaagaccccgtgtaaacctgagcccccccgtccccccccccccccggaagccactgcacacagacagaacggggacaggcggcgggtcttttgtttttttgatgttgggggttctcttggttttgtcatgtggaaagtgatgcgtgggcgttccctgatgaaggcaccttggggcttccctgccgcatcctctcccctcaggaaggggactgacctgggcttgggggaagggacgtcagcaaggtggctctgaccctcccaggtgactctgccaagcagctgtggcccccagggctaccctacacaacgccctccccaggcccccctaagctgctctcccttggaacctgcacagctctctgaaatggggcattttgttgggaccagtgacccctggcatggggaccacaccctggagcccggtgctggggacctcctggacaccctgtccttcactcctttgccccagggacccaggctcatgctctgaactctggctgagaggatgctgctcaggagccagcacaggacaccccccaccccaccccaccatgtccccattacaccagagggccatcgtgacgtagacaggatgccaggggcctggccagcctcccccaatgctggggagcatccctgggcctggggccacacctgctgccctccctctgtgtggtccaagggcaagagtggctggagccgggggactgtgctggtctgagccccacgaaggccttgggctgtgcgtccgaccctgctgcagaaccagcagggtgtcccctcgggcccatctgtgtcccatgtcccagcacccaggcctctctccaggtctccttttctggtcttttgccatgagggtaaccagctcttcccagctggctggggactgtcttgggtttaaaactgcaagtctcctaccctgggatcccatccagttccacacgaactagggcagtggtcactgtggcacccaggtgtgggcctggctagctgggggccttcatgtgcccttcatgcccctccctgcattgaggccttgtggacccctgggctggctgtgttcatccccgctgcaggtcgggcgtctccccccgtgccactcctgagactcccaccgttacccccaggagatcctggactgcctgactcccctccccagactggcttgggagcctgggccccatggtagatgcaagggaaacctcaaggccagctcaatgcctggtatctgcccccagtccaggccaggcggaggggaggggctgtccggctgcctctcccttctcggtggcttcccctacgccctgggagtttgatctcttaagggaacttgcctctccctcttgttttgctcctggccctgcccctaggtctgggtgggcagtggccccatagcctctggaactgtgcgttctgcatagaattcaaacgagattcacccagcgcgaggaggaagaaacagcagttcctgggaaccacaattatggggggtggggggtgtgatctgagtgcctcaagatggttttcaaaaaaatttttttaaagaaaataattgtatacgtgtcaacacagctggctggatgattgggactttaaaacgaccctctttcaggtggattcagagacctgtcctgtatataacagcactgtagcaataaacgtgacattttataacg

SEQ ID NO: 136140 - protein, 219 aa, Artificial Sequence
  derived and/or modified sequence
  misc_feature (1)..(1): Xaa can be any naturally occurring amino acid
XELCTGCGSRLRSPFSFVYLPRWFSSVLASCPKKPVSSYLRFSKEQLPIFKAQNPDAKTTELIRRIAQRWRELPDSKKKIYQDAYRAEWQVYKEEISRFKEQLTPSQIMSLEKEIMDKHLKRKAMTKKKELTLLGKPKRPRSAYNVYVAERFQEAKGDSPQEKLKTVKENWKNLSDSEKEVSITVVSLKCLLRISVRECIRARLDSCEDNLVLLIIQVF

SEQ ID NO: 136141 - protein, 246 aa, Artificial Sequence
  derived and/or modified sequence
MAFLRSMWGVLSALGRSGAELCTGCGSRLRSPFSFVYLPRWFSSVLASCPKKPVSSYLRFSKEQLPIFKAQNPDAKTTELIRRIAQRWRELPDSKKKIYQDAYRAEWQVYKEEISRFKEQLTPSQIMSLEKEIMDKHLKRKAMTKKKELTLLGKPKRPRSAYNVYVAERFQEAKGDSPQEKLKTVKENWKNLSDSEKELYIQHAKEDETRYHNEMKSWEEQMIEVGRKDLLRRTIKKQRKYGAEEC

SEQ ID NO: 136142 - DNA, 660 bp, Artificial Sequence
  derived and/or modified sequence
tgagagctgtgcaccggctgcggcagcagactgagaagccccttcagcttcgtgtacctgcccagatggttcagcagcgtgctggccagctgccccaagaagcccgtgagcagctacctgagattcagcaaggagcagctgcccatcttcaaggcccagaaccccgacgccaagaccaccgagctgatcagaagaatcgcccagagatggagagagctgcccgacagcaagaagaagatctaccaggacgcctacagagccgagtggcaggtgtacaaggaggagatcagcagattcaaggagcagctgacccccagccagatcatgagcctggagaaggagatcatggacaagcacctgaagagaaaggccatgaccaagaagaaggagctgaccctgctgggcaagcccaagagacccagaagcgcctacaacgtgtacgtggccgagagattccaggaggccaagggcgacagcccccaggagaagctgaagaccgtgaaggagaactggaagaacctgagcgacagcgagaaggaggtgagcatcaccgtggtgagcctgaagtgcctgctgagaatcagcgtgagagagtgcatcagagccagactggacagctgcgaggacaacctggtgctgctgatcatccaggtgttctag

SEQ ID NO: 136143 - DNA, 741 bp, Artificial Sequence
  derived and/or modified sequence
atggccttcctgagaagcatgtggggcgtgctgagcgccctgggcagaagcggcgccgagctgtgcaccggctgcggcagcagactgagaagccccttcagcttcgtgtacctgcccagatggttcagcagcgtgctggccagctgccccaagaagcccgtgagcagctacctgagattcagcaaggagcagctgcccatcttcaaggcccagaaccccgacgccaagaccaccgagctgatcagaagaatcgcccagagatggagagagctgcccgacagcaagaagaagatctaccaggacgcctacagagccgagtggcaggtgtacaaggaggagatcagcagattcaaggagcagctgacccccagccagatcatgagcctggagaaggagatcatggacaagcacctgaagagaaaggccatgaccaagaagaaggagctgaccctgctgggcaagcccaagagacccagaagcgcctacaacgtgtacgtggccgagagattccaggaggccaagggcgacagcccccaggagaagctgaagaccgtgaaggagaactggaagaacctgagcgacagcgagaaggagctgtacatccagcacgccaaggaggacgagaccagataccacaacgagatgaagagctgggaggagcagatgatcgaggtgggcagaaaggacctgctgagaagaaccatcaagaagcagagaaagtacggcgccgaggagtgctag

SEQ ID NO: 136144 - DNA, 660 bp, Artificial Sequence
  derived and/or modified sequence
taagagctctgcacaggatgcggcagcagactgcgtagccccttctctttcgtgtacctgccaaggtggttttcttccgtgctcgcaagctgcccaaagaagccagtcagtagctacttaaggttcagtaaagagcaactgcctatattcaaagcgcagaaccctgacgccaagaccaccgaactgatacgacggattgcacagaggtggcgggagttgcctgactcgaaaaagaagatttaccaggatgcataccgggccgaatggcaggtttataaggaagaaatcagtcggtttaaggaacagctcacccccagccagattatgtccctcgagaaggagattatggacaagcatctcaagaggaaggcgatgacaaagaaaaaggaactaactttactgggtaaacctaagcggcctaggagtgcgtacaatgtgtatgtggctgaacgatttcaggaggccaaaggggactcaccccaggagaaactgaagacagtcaaggaaaattggaagaatctgtcagactcagaaaaggaagtcagcatcaccgtggtgtcactgaaatgcttgctcaggatctcagtgagggaatgcataagggcaagactagatagttgcgaggataacctcgtattgctaataattcaagttttttag

SEQ ID NO: 136145 - DNA, 741 bp, Artificial Sequence
  derived and/or modified sequence
atggccttcttgcggagcatgtggggagtgctgtccgctctcggccgaagtggggctgaactgtgcacaggatgcggctcacgcctccggagtcctttttcctttgtatatttgccaagatggttctcttctgtgctggcttcctgcccaaagaagccagtaagtagctacctcagattttctaaggaacaattacctatcttcaaggcacagaacccagatgctaaaaccaccgagcttatcagacgcatcgcacagcgttggcgcgaactccctgactctaagaaaaagatataccaggacgcctacagggctgaatggcaagtgtacaaggaggaaatctcacgcttcaaagaacagctcacaccaagccagatcatgtcactcgagaaggaaatcatggataaacacctcaagcggaaagccatgaccaaaaagaaagagctgactcttctaggaaagccaaaacgcccccgtagcgcgtataacgtctatgtggctgagagattccaggaggccaaaggggactccccccaggagaaattgaagactgttaaggagaactggaagaatctgtctgactcagaaaaggagctgtacatacaacacgctaaggaagacgaaactcgctaccacaacgaaatgaagtcctgggaggaacagatgatcgaagtgggaagaaaagatctgttacgtcgcactattaaaaagcaacgtaagtacggtgctgaggaatgttag

SEQ ID NO: 136146 - DNA, 660 bp, Artificial Sequence
  derived and/or modified sequence
tgagagctgtgcaccggctgcggcagccggctgcggagccccttctcctttgtgtacctgccccgctggttcagctctgtgctggccagctgccccaagaagcctgtgagcagctacctgcgcttcagcaaggagcagctgcccatcttcaaggcccagaacccagatgccaagaccacagagctgatccgccgcatcgcccagcgctggagggagctgcctgacagcaagaagaagatctaccaggatgcctacagagctgagtggcaggtgtacaaggaggagatcagccgcttcaaggagcagctgacccccagccagatcatgagcctggagaaggagatcatggacaagcacctgaagaggaaggccatgaccaagaagaaggagctgaccctgctgggcaagcccaagaggcccaggtctgcctacaacgtgtatgtggccgagcgcttccaggaggccaagggggacagcccccaggagaagctgaagacagtgaaggagaactggaagaacctgagtgacagcgagaaggaggtgtccatcaccgtggtgtccctgaagtgcctgctgcgcatctctgtgcgggagtgcatccgggcccggctggacagctgtgaggacaacctggtgctgctgatcatccaggtgttctag

SEQ ID NO: 136147 - DNA, 741 bp, Artificial Sequence
  derived and/or modified sequence
atggccttcctgcgctccatgtggggcgtgctgagcgccctgggccgctctggagctgagctgtgcaccggctgcggcagccggctgcggagccccttctcctttgtgtacctgccccgctggttcagctctgtgctggccagctgccccaagaagcctgtgagcagctacctgcgcttcagcaaggagcagctgcccatcttcaaggcccagaacccagatgccaagaccacagagctgatccgccgcatcgcccagcgctggagggagctgcctgacagcaagaagaagatctaccaggatgcctacagagctgagtggcaggtgtacaaggaggagatcagccgcttcaaggagcagctgacccccagccagatcatgagcctggagaaggagatcatggacaagcacctgaagaggaaggccatgaccaagaagaaggagctgaccctgctgggcaagcccaagaggcccaggtctgcctacaacgtgtatgtggccgagcgcttccaggaggccaagggggacagcccccaggagaagctgaagacagtgaaggagaactggaagaacctgagtgacagcgagaaggagctgtacatccagcacgccaaggaggatgagacccgctaccacaatgagatgaagtcctgggaggagcagatgattgaggtgggcaggaaggacctgctgcggaggaccatcaagaagcagaggaaatatggagcagaagaatgttag

SEQ ID NO: 136148 - DNA, 660 bp, Artificial Sequence
  derived and/or modified sequence
tgagagctgtgcaccggctgcggcagccggctgcggagccccttcagctttgtctatctcccacggtggtttagctcagtgcttgccagctgccccaagaagccagtctcaagctacttacggttctcaaaggagcagctcccgatctttaaggcgcaaaatcccgatgccaaaacaacagaactcatcaggagaatcgctcagcgttggagggagctgccagatagcaagaaaaaaatctaccaggacgcatatagggccgagtggcaggtatacaaagaggaaataagtcggtttaaggagcagcttacacctagccagatcatgtcacttgaaaaggagattatggacaagcacctcaagcggaaggccatgacaaagaagaaggaactgaccctgctgggaaagcctaagcggccgcgctctgcttataacgtttacgtggctgaacgattccaggaggccaaaggcgacagccctcaggagaagttaaaaactgtcaaagagaattggaagaaccttagtgacagtgagaaagaggtttcgatcacagtggtgagtctcaaatgcctgctgcggatcagcgtgagagagtgcataagagcaagattagacagctgtgaggacaacctggtgctgctgatcatacaagtgttctag

SEQ ID NO: 136149 - DNA, 741 bp, Artificial Sequence
  derived and/or modified sequence
atggccttcctgcggagcatgtggggcgtgctgagcgccctgggccgctcaggagctgagttgtgcaccggctgcggctcacggctgaggagtccattctcctttgtttacttaccacggtggttctcgtcagtcctggcatcttgcccgaagaaacccgtgtcttcgtatctgagattcagcaaagagcaattacccatattcaaggctcagaatccggacgccaaaaccaccgaactcattcgcaggattgctcagcgatggagagagctgccggattccaaaaagaagatttaccaggacgcatacagggctgaatggcaagtatataaggaggagatcagccgctttaaagaacagctgacaccctctcagatcatgtccttggaaaaggagattatggacaagcatctgaagaggaaggcaatgacgaaaaagaaagagttaacattgctcggtaagccaaaacgcccaaggagtgcatataatgtgtacgtggccgaacgttttcaagaggcaaaaggtgatagcccccaagagaaactcaaaacagtcaaagagaattggaagaatcttagcgatagcgaaaaggagctctatattcagcacgccaaggaagatgagactagatatcacaacgagatgaagagttgggaggagcagatgatcgaggttggccgaaaggatctccttagacggaccattaaaaaacaacggaagtatggtgctgaggagtgctag

SEQ ID NO: 136150 - DNA, 660 bp, Artificial Sequence
  derived and/or modified sequence
tgagagctatgtaccgggtgtggtagccgactgaggtcccctttctctttcgtctacctgccccgatggttctcttccgtcttggcttcatgccccaagaagcctgtgtcctcttatctccggtttagcaaggaacagttgccaatatttaaggcccagaatcctgacgccaaaaccactgaactgattcgtcgcattgcccagaggtggagggaactgcccgactccaaaaaaaagatttaccaggatgcatatcgggctgaatggcaggtctacaaggaagaaatttctcggttcaaagagcagctgacacccagtcagattatgtccctggagaaggagataatggacaaacacctgaagcgcaaggccatgactaagaagaaagagctcacgcttctcggtaaacccaaacgaccccgtagcgcatataatgtgtatgtcgctgaacggttccaggaggctaagggcgattccccccaggaaaaactgaagactgtcaaagagaactggaaaaacctgtctgattccgagaaggaggtcagtataacggtagtcagcctgaagtgtctcctgcgcatctcggtgcgcgagtgcattcgcgcacgattggactcttgtgaggataatctggtgctcctgatcatccaggtattctag

SEQ ID NO: 136151 - DNA, 741 bp, Artificial Sequence
  derived and/or modified sequence
atggcattcctgagaagcatgtggggcgtcctctcagcattaggtcgctcaggcgcagaactttgtaccggatgtggttctcgtctccggtctccattctcctttgtatatctgcccaggtggttcagctctgtgcttgctagttgccctaaaaaacccgtgtccagctatctcaggttttccaaggagcaactaccgattttcaaggcccagaacccagatgccaaaaccactgaactaattcgcaggattgctcagcgctggcgcgagctgccagattctaaaaagaaaatctaccaggacgcgtacagggctgagtggcaagtctataaagaagagatcagccggtttaaggaacagttaacccctagccagataatgtcactcgaaaaggagattatggataagcacttgaagcgcaaggctatgactaagaagaaggaattgactctgctaggcaagcccaagaggccaagatcagcatataacgtttatgtagccgaacgcttccaagaggccaagggagatagccctcaggaaaaactgaagacagtgaaggagaattggaagaatctgagcgacagcgagaaagagttatatatccagcacgccaaggaagatgagacaaggtaccacaacgagatgaaaagctgggaagagcaaatgatcgaggttgggagaaaagaccttctgcgacggacaatcaaaaaacaacgtaagtacggagccgaggagtgttag

SEQ ID NO: 136152 - DNA, 663 bp, Artificial Sequence
  derived and/or modified sequence
agagctgtgcaccggctgtggaagtcgactgcgctcccccttcagttttgtgtatttaccgaggtggttttcatctgtcttggcaagttgtccaaagaaacctgtaagttcttaccttcgattttctaaagaacaactacccatatttaaagctcagaacccagatgcaaaaactacagaactaattagaagaattgcccagcgttggagggaacttcctgattcaaagaaaaaaatatatcaagatgcttatagggcggagtggcaggtatataaagaagagataagcagatttaaagaacagctaactccaagtcagattatgtctttggaaaaagaaatcatggacaaacatttaaaaaggaaagctatgacaaaaaaaaaagagttaacactgcttggaaaaccaaaaagacctcgttcagcttataacgtttatgtagctgaaagattccaagaagctaagggtgattcaccgcaggaaaagctgaagactgtaaaggaaaactggaaaaatctgtctgactctgaaaaggaagtgagtattacggttgttagtctcaagtgtctacttaggatatctgtgagagaatgtattagggcaaggcttgattcatgtgaagacaaccttgtattactaataatacaagtattctaaaatta

SEQ ID NO: 136153 - DNA, 5414 bp, Artificial Sequence
  derived and/or modified sequence
ctgagacgctccgctgggcgcgcagcagccgccgatcggacctcggggtcctggatgcaggactgtctgttacgtacagcccttgtgaccgtcacgggcggacaccggccaacgccgggttggggtgaggccgccgccgcggtccctccatcaccctcctggcccggcagaggaacccactgctccgggcggccggggacagaggtggctcaacagcgccgcctcgaagccagagccctccgcaggctagaggattgcggtttcccttcatctccgcggctcttattcctcccccgcaaggccgcccaccggggtacgctctcccgcgcctgcgccaattccgccccgccccgcccccatctaccgaccggatgttagcagatttcccatagtgcctcgctagtggcgggcatgataacacacgccggagggtcgcacgcgggttccagttgtgattgctggagttgtgtattgccaggaggctctccgagattggggtcgggtcactgcctcatccaccggagcgatggcgtttctccgaagcatgtggggcgtgctgagtgccctgggaaggtctggagcagagctgtgcaccggctgtggaagtcgactgcgctcccccttcagttttgtgtatttaccgaggtggttttcatctgtcttggcaagttgtccaaagaaacctgtaagttcttaccttcgattttctaaagaacaactacccatatttaaagctcagaacccagatgcaaaaactacagaactaattagaagaattgcccagcgttggagggaacttcctgattcaaagaaaaaaatatatcaagatgcttatagggcggagtggcaggtatataaagaagagataagcagatttaaagaacagctaactccaagtcagattatgtctttggaaaaagaaatcatggacaaacatttaaaaaggaaagctatgacaaaaaaaaaagagttaacactgcttggaaaaccaaaaagacctcgttcagcttataacgtttatgtagctgaaagattccaagaagctaagggtgattcaccgcaggaaaagctgaagactgtaaaggaaaactggaaaaatctgtctgactctgaaaaggaattatatattcagcatgctaaagaggacgaaactcgttatcataatgaaatgaagtcttgggaagaacaaatgattgaagttggacgaaaggatcttctacgtcgcacaataaagaaacaacgaaaatatggtgctgaggagtgttaaaagtagaagattgagatgtgttcacaatggataggcacaggaaaccagttaggtctcaatacctgaagctatcgtaaaattaagaaaggataaagttggtaaaccttttatatttagtatctttttattcagctcatggacttctgccagcataatacttgctttggaaaacccagataaaggttcatgcaaactttattttgtgtttaggaactactgaggatcagagtaatccaagcaaatgtgaatcattttacctttgacaaaggtaaatcagactatgaagttttttttatacaggatgatgactatggaaagagtactcttgtttccttatattatggaggcaggagtttcgttttcaaaattgttacaaattgtagaagccacggtgttctgtgatataagtgtgtgtttttcataaagcaggcagaactcatctaggtaaattacagttcctaggtataattcacattgtattcagagttgatggttgtacatataagtgattgctggttttagttgcaactttgtataaaagggactgagaaatttataaacttttttcttactgtcttttttctaaagtaaaaacaaagaaattatgtgccagatttatgcatattattttatgttgcatagaataaaatttttaatctttaattttacatttcctaaatatattttaagacgaaacatttgttctatagcttttccctttttttaagtaaggaattttatttttttctgaattattttctctcgtgagtatattgatccagaaagaaaacttgtattatgtgtgttttaaaatgagaaatctaaaaaacgaaaagtctccaaagtctctggaatttgaaacactttgcataacgtataaaagcctgtttaagagacagccaactatggcctgtggatcaaatccagcctgctgcctgctttttatggcctgtgagctaggaattgtgtttataattttaaatgtttttttttaaagacttttatgatacttgaaaattaacatgaatatttagtgttcataaataaagtttgttgaaacacaaccaagatcattcttttacttgtctatggctgcttttctgtggcagagtagctgccacagaaactatagcccacaaagcctgatatttactgtctgtctgtttatggaaaaaatttatcaacccatggtctatagtatagtgtgatatgactactgttccaatgtattgaagtgttgggatagttttttcaaatgttttcagatgttcttgttttagaatcattgtcacctttaagaggaaaaaggtcatcactagataatctaaacaaattgttgcttctcagtgttagcaaggaaaataatctagtttcaaattacattgcagtataatgaaaaagatccatatactgtggaatgatattcttttaaaattatttgctatggcttggtaaaaatgtactttttccagtagcacatatcacaagaacctcactgtagttgaaagccatctttctttagtatttgtttatccttttaggagagtcaagcaaaggttttcaccacctgtttgagcagaataattctcatcagttcacagatataggataactcaatttatatgcactttatgcgttatgcaaaatatttagaaattgtagattctagatctccagaaagactttgaagactttgatgtcacaaaaagatgacttgttatatgctgagcttgacaaaggtaggaatgggagagaaaaatagtagcttatgaggaaatatgaggctttaaatatataaagttggatattttaaaataacttttccctgtgggagcttctcactctgggtgcagacaggacagtgttggccattggtgaaatagataggatgggtttgaggccagagcagtctgggagtagggggaaagagaaggaggtgtgctagtgtctatcacaggctttctcaattaggtttgcaggagaaaaagccctaagtccctgtgtcatctagaatggtactaattatgtacagtccctaggagaatggagaaaatcataactcaaatcatcgactcaattctgttctcttcagatgagctcagagagcacataggagtgtttgtaatgaggggtatgtaatgattgagatagaggaatgagttacataaacatctcgggacaaatgcagcatagaaaacatctttgtagttaccctgcggggaaatttcctctgagttcttttaacattaactacccgtattattttatacttaacattcatatcataccttcccaaatatattgggaagttcagtgttaagtacgtttctcaagtacttaacaacttaatatagggaggaaaggtgtaaacagtgaaaaaagagcaaaactattttatggtaattttatggtagtatcagcttgtatttggttctctgtttctaaaataatgtaatttttaatattttaaataataggataacctggtttccaagcctttttttcccccgacatccagaatacacactggatccaagcctttcttaaacatcagtacatgtggaagactggcatgccatataccaaatgccattcagctgtaacagtatacacagattttctcttataaagaataagaacatcataaccaatgaccactcatataaagtcttatttgtgtgtgtgtgtgtgtgtgtgtgcacgtgtgtgtgttagagtctcattatattgctcaggctggagggcatggtgtgatcttggctcactgcagccttgacctcctgggctcaagtgatccttccgagtcgttgggactacagtaggtgaacaccaccatgcctggctaatttttgtattttttttttaatcaagatgggatcttgctatgttgcccaggctggtctcaaactcctggcatcaagcgttcctccttccttggcctccttaagtgctgggattataggtgtgagccaccatgcttgaccataaagccttactatttcttttggagacacagtcttgctctgtccaagctggaatgcagtgatgtgatcatggctcactgcagccttgaactcccaggcttaagagatcctcccatctcagcctcctgagtagctgggattataggtgcagaccatcaagccttgctattattttttagacttttcttaatttcatccaacaaagtagttgctgtaggagctgagtgttagaaggaaagatgctgaagaaatgaaatcaagcagggtgtatactgtcatgaataggcatacagtagtttttatacttttgttctttggagtaccaatgttaggttttacaaaagtaatttgatgaggggaaggagggttgtgtatttattttactttctgatgtttgcttaaataatactgtgtacgtattcagcttgctgtaattctgtaattacgctattgcgtttggctaactcctttttggaaatgtctttttttttgtacaaggcatgtgttagtttttactaattgctctgaatgtgtatatttagatttctgaattgaaaaaaaatagcgtacaataagtagatttaaagtaattagaacactttattgatttttctgatgttttctgtatctaaaatttatcaccaccaggttgtgctaaaacagcaggaagtttttatattgtgagtgacagtacccattatttctcttaattttactaacatttactataagaatattctctcgctcttttctccactcacagccattctccctccttctcttcataacatcaagctgtcacagacaaatctgaaaatgttacaagcacagactatgttgtatgttttgaaattttagaacagtaatgttctttttaaaattgaacttctgcagagtaagaaaatgaatacatttattactttaaatttgtaaaattttccaaagtaaaaccatacaaagctagtgtcagtctctctcattgttcacaaataaaggacttttgttaattgattaaatcacttactatattcgatatgaaatatataaaacatacaaccattatctaatacatttcagaatgtttcactggttacaggagccagtaaataaagttgactctaaacaggaattttaaataaactaaacattttttcatcaccaag

SEQ ID NO: 136154 - protein, 384 aa, Artificial Sequence
  derived and/or modified sequence
MPQLDSGGGGAGGGDDLGAPDELLAFQDEGEEQDDKSRDSAAGPERDLAELKSSLVNESEGAAGGAGIPGVPGAGAGARGEAEALGREHAAQRLFPDKLPEPLEDGLKAPECTSGMYKETVYSAFNLLMHYPPPSGAGQHPQPQPPLHKANQPPHGVPQLSLYEHFNSPHPTPAPADISQKQVHRPLQTPDLSGFYSLTSGSMGQLPHTVSWFTHPSLMLGSGVPGHPAAIPHPAIVPPSGKQELQPFDRNLKTQAESKAEKEAKKPTIKKPLNAFMLYMKEMRAKVIAECTLKESAAINQILGRRWHALSREEQAKYYELARKERQLHMQLYPGWSARDNYGKKKRRSREKHQESTTGGKRNAFGTYPEKAAAPAPFLPMTVL

SEQ ID NO: 136155 - protein, 269 aa, Artificial Sequence
  derived and/or modified sequence
MYKETVYSAFNLLMHYPPPSGAGQHPQPQPPLHKANQPPHGVPQLSLYEHFNSPHPTPAPADISQKQVHRPLQTPDLSGFYSLTSGSMGQLPHTVSWFTHPSLMLGSGVPGHPAAIPHPAIVPPSGKQELQPFDRNLKTQAESKAEKEAKKPTIKKPLNAFMLYMKEMRAKVIAECTLKESAAINQILGRRWHALSREEQAKYYELARKERQLHMQLYPGWSARDNYGKKKRRSREKHQESTTGGKRNAFGTYPEKAAAPAPFLPMTVL

SEQ ID NO: 136156 - DNA, 3277 bp, Artificial Sequence
  derived and/or modified sequence
cccgccagctcgcggagccgctctgccccgcgccctagcccgcgcctgcagcccgcccaggcggagtcagcccgcgctccgcccgccgcgatccgagctcggaggttcggactccgggctcgccgccccccgggccggctccgcgccccgcactcccggcgcccagcgccccgcgccccggcgggcggagcgcaccatgccgcagctggactccggcgggggcggcgcgggcggcggcgacgacctcggcgcgccggacgagctgctggccttccaggatgaaggcgaggagcaggacgacaagagccgcgacagcgccgccggtcccgagcgcgacctggccgagctcaagtcgtcgctcgtgaacgagtccgagggcgcggccggcggcgcagggatcccgggggtcccgggggccggcgccggggcccgcggcgaggccgaggctctcgggcgggaacacgctgcgcagagactcttcccggacaaacttccagagcccctggaggacggcctgaaggccccggagtgcaccagcggcatgtacaaagagaccgtctactccgccttcaatctgctcatgcattacccacccccctcgggagcagggcagcacccccagccgcagcccccgctgcacaaggccaatcagcccccccacggtgtcccccaactctctctctacgaacatttcaacagcccacatcccacccctgcacctgcggacatcagccagaagcaagttcacaggcctctgcagacccctgacctctctggcttctactccctgacctcaggcagcatggggcagctcccccacactgtgagctggttcacccacccatccttgatgctaggttctggtgtacctggtcacccagcagccatcccccacccggccattgtgcccccctcagggaagcaggagctgcagcccttcgaccgcaacctgaagacacaagcagagtccaaggcagagaaggaggccaagaagccaaccatcaagaagcccctcaatgccttcatgctgtacatgaaggagatgagagccaaggtcattgcagagtgcacacttaaggagagcgctgccatcaaccagatcctgggccgcaggtggcacgcgctgtcgcgagaagagcaggccaagtactatgagctggcccgcaaggagaggcagctgcacatgcagctatacccaggctggtcagcgcgggacaactacgggaagaagaagaggcggtcgagggaaaagcaccaagaatccaccacaggaggaaaaagaaatgcattcggtacttacccggagaaggccgctgccccagccccgttccttccgatgacagtgctctaggctgccccgggtccccagctccccaggactcaccctcataccatctgctgccccgcttccccacagaactgcttactagccctgcggagccggcacctacatccccaggtctctccactgctctcagcctcccaaccccagggcccccacaggccccccgcagcaccctgcagagcacacaggtacagcaacaggaatctcagagacaggtggcctagcaggcacaggacacctggccgcctccaggagcctaccccctgaaagtgacagagacccagatctcatggaaactggccaggggtcctgttaacgtcatctcagggtccagaccctgaagatttcagaggctgcaggacttctgcctgaacctggggtcatcgattcaaactgctccaagtggtgggaatcagatctgtcttgatgtgtcatctaattaagggaatcccttgtacctatggctgcctgcatctattctttgtaccatctgtcttgccagccagaagcctctgcctccctagcttttctgctataggtcagagatgggctgaactgagcctagctaccttctctacccatctcccccatcccccactgccacaccctccccattcagacacttcatggaccaagaatgagctggtttgtcaaacaacatgtgagcatggtcacaagcacaaagctcaagatgacagctcttctaaggaaatggagaagctctgtttataaaaacaaaaacaaaaccagctgctactcataagttggaccagaggaagccccttactatgatctcaggagcttgcaagaagcaggaaggggaatggaataggttaagtttaggcctatcaacctaagcaacagaaataatctgacactaccttatcaggcaaattggggaggggagggtgtatctagctctagttcaaattatttggaagtgttccctgagaaacccaccagcctaagaagctctggccccaggcttgtcactagcagctgcagtcaacagttcaaagaagtcatggcccaaatccagtgtgcacccctccccattcacagagcctttttcacaattccatttccagttcatctatggcagtccagccagctcctgggcagcttgagagggcaaacccaaaacctcatgacagccagagcctgtctttcagcattcagtccgcctggccggctccagtttccccatggggctgcgggacagaggaccattacaactagatcaaggagcccagaaaacctccagtagtggacaacaggttttcaccatagcctacgttaacccatttttgagccaagcttcaaccctcagccttgaaaaacaagtctttaatttaatttttgttttttgcctaaatccaaagaaaaagggctgccgggccaggcgcggtggctcacgcctgtaatcccagcactttggcaggccgaggcaggtggatcacctgacgtcagtagtttgagaccagcctggccaacatggtgaaaccctgtatctactaaaaatacaaaaattagccggacgtggtggtgcgcgcatgtaatcccagctactcgggaggctgaggcggaagaatcacttgaacccgggaggcggaggttccagtgagccgagatggcgctattgcactccagtctgggtaacagggagactgcatctcaaaaaaaaaaaaaaaaaaaaaaaagggctgtccatgtattcacacacccctcaaaaaaagcctttagttcctactttagccactggtttctcagaatccaaagatcacatattctagtgtaacactgcaagaagtcttgagaaaaagattattgtagtgttcaaaatatttttgtattgttaatgcatcatcatagaaaaacttttaaacatgagaataaagatactttttactgggtttgtttttcaaagcctga

SEQ ID NO: 136157 - DNA, 1155 bp, Artificial Sequence
  derived and/or modified sequence
atgcctcagctggactcaggcggcgggggtgctgggggcggggatgacctgggggcacctgacgaactcctggcatttcaggatgagggtgaggagcaggatgacaagagccgtgattcagcggccggtcctgagagagatctggctgaattaaaatcatcactggttaacgaatctgaaggggccgctgggggcgctggaataccgggtgtgcctggcgcaggcgctggagcccgcggggaagcagaagccttaggccgggagcacgccgcccagagactcttcccagataagctgcccgagcctctcgaggatgggctgaaagcgccagagtgcactagcgggatgtacaaagaaacagtgtactcggcctttaacctcctcatgcactacccaccaccatctggggctggccagcatccacaaccccaaccgccactccacaaagccaaccaacccccgcatggggtccctcagctcagtctgtatgagcacttcaactcgccacatccaaccccagccccagctgatataagtcagaagcaggttcatagacccctgcaaaccccagacctcagcggattttattccctgacgtcaggttctatgggacaactaccacacacagtgtcctggtttacccatccctcactgatgctcggctctggtgtgccagggcacccagctgccatcccacaccccgcgatagttcctccatcaggcaaacaggaactccagcccttcgacagaaacttgaaaactcaggcagaaagcaaagcggaaaaggaagctaaaaagcctacaatcaaaaagcctctcaatgctttcatgctctatatgaaagaaatgcgggctaaggtgatcgccgagtgtaccctgaaggaatctgccgctatcaaccagatactcggccgtcgttggcacgccctgtccagagaggagcaggcaaagtactatgagctggcccgaaaggaacggcagttgcatatgcagctctacccggggtggtctgcgcgcgataactacggcaagaagaaaagacggtctagggaaaaacaccaggaatctaccaccggggggaagagaaacgccttcggtacataccccgaaaaggcagcggctccggcccccttcctaccaatgacagtgctgtag

SEQ ID NO: 136158 - DNA, 1155 bp, Artificial Sequence
  derived and/or modified sequence
atgccccagctggacagcggcggcggcggggccggcggcggagatgacctgggcgccccagatgagctgctggccttccaggatgaaggagaggagcaggatgacaagagccgggacagcgctgctggccctgagcgggacctggccgagctgaagagcagcctggtgaatgaaagtgaaggagctgctggaggagctggcatccctggggtgcctggggccggggccggggcccggggggaggccgaggccctgggccgggagcacgccgcccagaggctcttcccagacaagctgcctgagcccctggaggatggcctgaaggccccagaatgtaccagcggcatgtacaaggagaccgtgtacagcgccttcaacctgctgatgcactacccacctccttctggagctggccagcacccccagccccagccccccctgcacaaggccaaccagccccctcatggagtgccccagctgagcctgtatgagcacttcaacagcccccaccccaccccagccccagctgacatcagccagaagcaggtgcaccggcccctgcagaccccagacctgagcggcttctacagcctgaccagcggctccatgggccagctgccccacacagtgtcctggttcacccaccccagcctgatgctgggcagcggcgtgcccggccaccctgctgccatcccccacccagccatcgtgccccccagcggcaagcaggagctgcagccctttgacaggaacctgaagacccaggccgagagcaaggccgagaaggaggccaagaagcccaccatcaagaagcccctgaatgccttcatgctgtacatgaaggagatgagggccaaggtgattgctgagtgcaccctgaaggagagcgctgccatcaaccagatcctgggccgccgctggcacgccctgagccgggaggagcaggccaagtactatgagctggccaggaaggagcggcagctgcacatgcagctgtacccaggctggagcgcccgggacaactacggcaagaagaagagaagaagccgggagaagcaccaggagagcaccaccggcggcaagagaaatgccttcggcacctacccagagaaggctgctgccccagcccccttcctgcccatgacagtgctgtag

SEQ ID NO: 136159 - DNA, 1155 bp, Artificial Sequence
  derived and/or modified sequence
atgccccagctggacagcggcggcggcggcgccggcggcggcgacgaccttggagcccctgacgagctccttgcctttcaggacgagggtgaagagcaggacgataaaagtagggatagcgccgctggacccgagcgcgatcttgccgaacttaagtcgtccctcgtgaatgagtctgagggggccgccggtggggccggcatcccaggcgtgcctggcgcaggtgcaggcgcccgaggcgaagccgaggcactcggaagagaacatgccgcccagagactcttccccgacaagttgccagaacccttggaagatgggctcaaggcacctgaatgcacctccggaatgtataaggaaacagtgtattctgcctttaatctacttatgcattacccccccccaagtggtgccgggcaacaccctcaaccacagcccccactccacaaggccaatcagccgccacatggagtaccacagctgagcttgtacgaacactttaacagcccccatccaactccagctcccgctgatattagccagaagcaggtccatcgacctctgcaaacccccgatctgtcagggttctatagcttaacatcagggagtatgggtcagctcccccacacggtgtcatggttcactcatccttccctcatgctaggctctggtgtcccaggacaccccgctgctatccctcaccctgctatagtacccccctccgggaagcaggagcttcaaccttttgaccgcaacttgaaaactcaagccgaatcaaaagccgagaaagaagccaagaaaccaaccattaaaaagcccttgaacgcctttatgctgtatatgaaagagatgagggccaaggtgatcgcagagtgtacccttaaggaatccgccgcaataaatcagattctgggccggcggtggcacgcactgagccgtgaggagcaagcaaaatattacgaactcgctagaaaggaaagacaactacacatgcagttataccctgggtggagcgcacgcgataactatggtaagaagaagaggaggtcgcgcgagaagcaccaagagtctacaacgggtggcaaaagaaacgctttcggaacttatcctgagaaggcggccgctcccgcacctttcttaccaatgacagtgctgtag

SEQ ID NO: 136160 - DNA, 3045 bp, Artificial Sequence
  derived and/or modified sequence
cccgccagctcgcggagccgctctgccccgcgccctagcccgcgcctgcagcccgcccaggcggagtcagcccgcgctccgcccgccgcgatccgagctcggaggttcggactccgggctcgccgccccccgggccggctccgcgccccgcactcccggcgcccagcgccccgcgccccggcgggcggagcgcaccatgccgcagctggactccggcgggggcggcgcgggcggcggcgacgacctcggcgcgccggacgagctgctggccttccaggatgaaggcgaggagcaggacgacaagagccgcgacagcgccgccggtcccgagcgcgacctggccgagctcaagtcgtcgctcgtgaacgagtccgagggcgcggccggcggcgcagggatcccgggggtcccgggggccggcgccggggcccgcggcgaggccgaggctctcgggcgggaacacgctgcgcagagactcttcccggacaaacttccagagcccctggaggacggcctgaaggccccggagtgcaccagcggcatgtacaaagagaccgtctactccgccttcaatctgctcatgcattacccacccccctcgggagcagggcagcacccccagccgcagcccccgctgcacaaggccaatcagcccccccacggtgtcccccaactctctctctacgaacatttcaacagcccacatcccacccctgcacctgcggacatcagccagaagcaagttcacaggcctctgcagacccctgacctctctggcttctactccctgacctcaggcagcatggggcagctcccccacactgtgagctggttcacccacccatccttgatgctaggttctggtgtacctggtcacccagcagccatcccccacccggccattgtgcccccctcagggaagcaggagctgcagcccttcgaccgcaacctgaagacacaagcagagtccaaggcagagaaggaggccaagaagccaaccatcaagaagcccctcaatgccttcatgctgtacatgaaggagatgagagccaaggtcattgcagagtgcacacttaaggagagcgctgccatcaaccagatcctgggccgcaggtggcacgcgctgtcgcgagaagagcaggccaagtactatgagctggcccgcaaggagaggcagctgcacatgcagctatacccaggctggtcagcgcgggacaactacgggaagaagaagaggcggtcgagggaaaagcaccaagaatccaccacaggaggaaaaagaaatgcattcggtacttacccggagaaggccgctgccccagccccgttccttccgatgacagtgctctaggctgccccgggtccccagctccccaggactcaccctcataccatctgctgccccgcttccccacagaactgcttactagccctgcggagccggcacctacatccccaggtctctccactgctctcagcctcccaaccccagggcccccacaggccccccgcagcaccctgcagagcacacaggtacagcaacaggaatctcagagacaggtggcctagcaggcacaggacacctggccgcctccaggagcctaccccctgaaagtgacagagacccagatctcatggaaactggccaggggtcctgttaacgtcatctcagggtccagaccctgaagatttcagaggctgcaggacttctgcctgaacctggggtcatcgattcaaactgctccaagtggtgggaatcagatctgtcttgatgtgtcatctaattaagggaatcccttgtacctatggctgcctgcatctattctttgtaccatctgtcttgccagccagaagcctctgcctccctagcttttctgctataggtcagagatgggctgaactgagcctagctaccttctctacccatctcccccatcccccactgccacaccctccccattcagacacttcatggaccaagaatgagctggtttgtcaaacaacatgtgagcatggtcacaagcacaaagctcaagatgacagctcttctaaggaaatggagaagctctgtttataaaaacaaaaacaaaaccagctgctactcataagttggaccagaggaagccccttactatgatctcaggagcttgcaagaagcaggaaggggaatggaataggttaagtttaggcctatcaacctaagcaacagaaataatctgacactaccttatcaggcaaattggggaggggagggtgtatctagctctagttcaaattatttggaagtgttccctgagaaacccaccagcctaagaagctctggccccaggcttgtcactagcagctgcagtcaacagttcaaagaagtcatggcccaaatccagtgtgcacccctccccattcacagagcctttttcacaattccatttccagttcatctatggcagtccagccagctcctgggcagcttgagagggcaaacccaaaacctcatgacagccagagcctgtctttcagcattcagtccgcctggccggctccagtttccccatggggctgcgggacagaggaccattacaactagatcaaggagcccagaaaacctccagtagtggacaacaggttttcaccatagcctacgttaacccatttttgagccaagcttcaaccctcagccttgaaaaacaagtctttaatttaatttttgttttttgcctaaatccaaagaaaaagggctgccgggccaggcgcggtggctcacgcctgtaatcccagcactttggcaggccgaggcaggtggatcacctgacgtcagtagtttgagaccagcctggccaacatggtgaaaccctgtatctactaaaaatacaaaaattagccggacgtggtggtgcgcgcatgtaatcccagctactcgggaggctgaggcggaagaatcacttgaacccgggaggcggaggttccagtgagccgagatggcgctattgcactccagtctgggtaacagggagactgcatctcaaaaaaaaaaaaaaaaaaaaaaaa

SEQ ID NO: 136161 - DNA, 1155 bp, Artificial Sequence
  derived and/or modified sequence
atgcctcagctggatagcggcggagggggagctgggggaggggatgacctcggtgcgcctgacgagcttctagccttccaggatgagggagaagaacaggatgataagtcacgggattccgccgcaggcccagagagggacctcgccgaattgaagtcatcactagtgaatgaaagcgagggtgctgcagggggtgcgggtattcctggcgtccccggagcaggcgctggggctcggggagaagccgaggccctggggagagagcacgcagcccagcgcctgtttccagacaaactccctgagccactggaggacggccttaaggcgcctgagtgtacaagcgggatgtataaggaaacagtgtacagcgcgtttaatttgctcatgcactatcctcctcccagtggagctggccagcatccccagccacagcccccactgcataaagctaaccaacctccgcatggggtgcctcagttgagcctgtatgagcactttaattctcctcacccaacaccagcccctgctgatatttctcagaaacaagtgcatcggccactccagacgccagacctcagcggcttttatagcctcacctccggaagcatgggtcagctgccccatacagtgtcatggttcactcacccgtctcttatgctcggatctggggtccctggtcacccagctgctatccctcaccccgctatagtacctccttccggaaaacaggagttacagccattcgataggaatttaaagacacaggcagaatcaaaggcggagaaggaagccaaaaagcctaccatcaaaaaacctttgaatgccttcatgctgtacatgaaagaaatgagggcaaaggtgattgctgagtgtaccctgaaggaatcggccgcaatcaatcagatcctgggacgcagatggcacgccttgagtcgcgaggagcaggccaagtattacgagctcgcgagaaaggagcggcagttgcacatgcagctgtaccccggttggagtgccagagacaactatggcaagaaaaaaaggcgctcacgggaaaagcaccaagagtcaaccacaggaggaaaaagaaatgcgtttgggacttacccagaaaaagcagctgcgccagccccttttttacctatgacagtgctgtag

SEQ ID NO: 136162 - DNA, 2815 bp, Artificial Sequence
  derived and/or modified sequence
gcccaggtgactgactaatccgccgccttcaggagacagaattggccaaggcctgaaggccccggagtgcaccagcggcatgtacaaagagaccgtctactccgccttcaatctgctcatgcattacccacccccctcgggagcagggcagcacccccagccgcagcccccgctgcacaaggccaatcagcccccccacggtgtcccccaactctctctctacgaacatttcaacagcccacatcccacccctgcacctgcggacatcagccagaagcaagttcacaggcctctgcagacccctgacctctctggcttctactccctgacctcaggcagcatggggcagctcccccacactgtgagctggttcacccacccatccttgatgctaggttctggtgtacctggtcacccagcagccatcccccacccggccattgtgcccccctcagggaagcaggagctgcagcccttcgaccgcaacctgaagacacaagcagagtccaaggcagagaaggaggccaagaagccaaccatcaagaagcccctcaatgccttcatgctgtacatgaaggagatgagagccaaggtcattgcagagtgcacacttaaggagagcgctgccatcaaccagatcctgggccgcaggtggcacgcgctgtcgcgagaagagcaggccaagtactatgagctggcccgcaaggagaggcagctgcacatgcagctatacccaggctggtcagcgcgggacaactacgggaagaagaagaggcggtcgagggaaaagcaccaagaatccaccacaggaggaaaaagaaatgcattcggtacttacccggagaaggccgctgccccagccccgttccttccgatgacagtgctctaggctgccccgggtccccagctccccaggactcaccctcataccatctgctgccccgcttccccacagaactgcttactagccctgcggagccggcacctacatccccaggtctctccactgctctcagcctcccaaccccagggcccccacaggccccccgcagcaccctgcagagcacacaggtacagcaacaggaatctcagagacaggtggcctagcaggcacaggacacctggccgcctccaggagcctaccccctgaaagtgacagagacccagatctcatggaaactggccaggggtcctgttaacgtcatctcagggtccagaccctgaagatttcagaggctgcaggacttctgcctgaacctggggtcatcgattcaaactgctccaagtggtgggaatcagatctgtcttgatgtgtcatctaattaagggaatcccttgtacctatggctgcctgcatctattctttgtaccatctgtcttgccagccagaagcctctgcctccctagcttttctgctataggtcagagatgggctgaactgagcctagctaccttctctacccatctcccccatcccccactgccacaccctccccattcagacacttcatggaccaagaatgagctggtttgtcaaacaacatgtgagcatggtcacaagcacaaagctcaagatgacagctcttctaaggaaatggagaagctctgtttataaaaacaaaaacaaaaccagctgctactcataagttggaccagaggaagccccttactatgatctcaggagcttgcaagaagcaggaaggggaatggaataggttaagtttaggcctatcaacctaagcaacagaaataatctgacactaccttatcaggcaaattggggaggggagggtgtatctagctctagttcaaattatttggaagtgttccctgagaaacccaccagcctaagaagctctggccccaggcttgtcactagcagctgcagtcaacagttcaaagaagtcatggcccaaatccagtgtgcacccctccccattcacagagcctttttcacaattccatttccagttcatctatggcagtccagccagctcctgggcagcttgagagggcaaacccaaaacctcatgacagccagagcctgtctttcagcattcagtccgcctggccggctccagtttccccatggggctgcgggacagaggaccattacaactagatcaaggagcccagaaaacctccagtagtggacaacaggttttcaccatagcctacgttaacccatttttgagccaagcttcaaccctcagccttgaaaaacaagtctttaatttaatttttgttttttgcctaaatccaaagaaaaagggctgccgggccaggcgcggtggctcacgcctgtaatcccagcactttggcaggccgaggcaggtggatcacctgacgtcagtagtttgagaccagcctggccaacatggtgaaaccctgtatctactaaaaatacaaaaattagccggacgtggtggtgcgcgcatgtaatcccagctactcgggaggctgaggcggaagaatcacttgaacccgggaggcggaggttccagtgagccgagatggcgctattgcactccagtctgggtaacagggagactgcatctcaaaaaaaaaaaaaaaaaaaaaaaagggctgtccatgtattcacacacccctcaaaaaaagcctttagttcctactttagccactggtttctcagaatccaaagatcacatattctagtgtaacactgcaagaagtcttgagaaaaagattattgtagtgttcaaaatatttttgtattgttaatgcatcatcatagaaaaacttttaaacatgagaataaagatactttttactgggtttgtttttcaaagcctga

SEQ ID NO: 136163 - DNA, 1155 bp, Artificial Sequence
  derived and/or modified sequence
atgccccagctggacagcggcggcggcggcgccggcggcggcgacgacctgggcgcccccgacgagctgctggccttccaggacgagggcgaggagcaggacgacaagagcagagacagcgccgccggccccgagagagacctggccgagctgaagagcagcctggtgaacgagagcgagggcgccgccggcggcgccggcatccccggcgtgcccggcgccggcgccggcgccagaggcgaggccgaggccctgggcagagagcacgccgcccagagactgttccccgacaagctgcccgagcccctggaggacggcctgaaggcccccgagtgcaccagcggcatgtacaaggagaccgtgtacagcgccttcaacctgctgatgcactaccccccccccagcggcgccggccagcacccccagccccagccccccctgcacaaggccaaccagcccccccacggcgtgccccagctgagcctgtacgagcacttcaacagcccccaccccacccccgcccccgccgacatcagccagaagcaggtgcacagacccctgcagacccccgacctgagcggcttctacagcctgaccagcggcagcatgggccagctgccccacaccgtgagctggttcacccaccccagcctgatgctgggcagcggcgtgcccggccaccccgccgccatcccccaccccgccatcgtgccccccagcggcaagcaggagctgcagcccttcgacagaaacctgaagacccaggccgagagcaaggccgagaaggaggccaagaagcccaccatcaagaagcccctgaacgccttcatgctgtacatgaaggagatgagagccaaggtgatcgccgagtgcaccctgaaggagagcgccgccatcaaccagatcctgggcagaagatggcacgccctgagcagagaggagcaggccaagtactacgagctggccagaaaggagagacagctgcacatgcagctgtaccccggctggagcgccagagacaactacggcaagaagaagagaagaagcagagagaagcaccaggagagcaccaccggcggcaagagaaacgccttcggcacctaccccgagaaggccgccgcccccgcccccttcctgcccatgaccgtgctgtag

SEQ ID NO: 136164 - protein, 781 aa, Artificial Sequence
  derived and/or modified sequence
MAHRPKRTFRQRAADSSDSDGAEESPAEPGAPRELPVPGSAEEEPPSGGGRAQVAGLPHRVRGPRGRGRVWASSRRATKAAPRADEGSESRTLDVSTDEEDKIHHSSESKDDQGLSSDSSSSLGEKELSSTVKIPDAAFIQAARRKRELARAQDDYISLDVQHTSSISGMKRESEDDPESEPDDHEKRIPFTLRPQTLRQRMAEESISRNEETSEESQEDEKQDTWEQQQMRKAVKIIEERDIDLSCGNGSSKVKKFDTSISFPPVNLEIIKKQLNTRLTLLQETHRSHLREYEKYVQDVKSSKSTIQNLESSSNQALNCKFYKSMKIYVENLIDCLNEKIINIQEIESSMHALLLKQAMTFMKRRQDELKHESTYLQQLSRKDETSTSGNFSVDEKTQWILEEIESRRTKRRQARVLSGNCNHQEGTSSDDELPSAEMIDFQKSQGDILQKQKKVFEEVQDDFCNIQNILLKFQQWREKFPDSYYEAFISLCIPKLLNPLIRVQLIDWNPLKLESTGLKEMPWFKSVEEFMDSSVEDSKKESSSDKKVLSAIINKTIIPRLTDFVEFLWDPLSTSQTTSLITHCRVILEEHSTCENEVSKSRQDLLKSIVSRMKKAVEDDVFIPLYPKSAVENKTSPHSKFQERQFWSGLKLFRNILLWNGLLTDDTLQELGLGKLLNRYLIIALLNATPGPDVVKKCNQVAACLPEKWFENSAMRTSIPQLENFIQFLLQSAHKLSRSEFRDEVEEIILILVKIKALNQAESFIGEHHLDHLKSLIKED

SEQ ID NO: 136165 - protein, 743 aa, Artificial Sequence
  derived and/or modified sequence
MAHRPKRTFRQRAADSSDSDGAEESPAEPGAPRELPVPGSAEEEPPSGGGRAQVAGLPHRVRGPRGRGRVWASSRRATKAAPRADEGSESRTLDVSTDEEDKIHHSSESKDDQGLSSDSSSSLGEKELSSTVKIPDAAFIQAARRKRELARAQDDYISLDVQHTSSISVSRNEETSEESQEDEKQDTWEQQQMRKAVKIIEERDIDLSCGNGSSKVKKFDTSISFPPVNLEIIKKQLNTRLTLLQETHRSHLREYEKYVQDVKSSKSTIQNLESSSNQALNCKFYKSMKIYVENLIDCLNEKIINIQEIESSMHALLLKQAMTFMKRRQDELKHESTYLQQLSRKDETSTSGNFSVDEKTQWILEEIESRRTKRRQARVLSGNCNHQEGTSSDDELPSAEMIDFQKSQGDILQKQKKVFEEVQDDFCNIQNILLKFQQWREKFPDSYYEAFISLCIPKLLNPLIRVQLIDWNPLKLESTGLKEMPWFKSVEEFMDSSVEDSKKESSSDKKVLSAIINKTIIPRLTDFVEFLWDPLSTSQTTSLITHCRVILEEHSTCENEVSKSRQDLLKSIVSRMKKAVEDDVFIPLYPKSAVENKTSPHSKFQERQFWSGLKLFRNILLWNGLLTDDTLQELGLGKLLNRYLIIALLNATPGPDVVKKCNQVAACLPEKWFENSAMRTSIPQLENFIQFLLQSAHKLSRSEFRDEVEEIILILVKIKALNQAESFIGEHHLDHLKSLIKED

SEQ ID NO: 136166 - protein, 254 aa, Artificial Sequence
  derived and/or modified sequence
MAHRPKRTFRQRAADSSDSDGAEESPAEPGAPRELPVPGSAEEEPPSGGGRAQVAGLPHRVRGPRGRGRVWASSRRATKAAPRADEGSESRTLDVSTDEEDKIHHSSESKDDQGLSSDSSSSLGEKELSSTVKIPDAAFIQAARRKRELARAQDDYISLDVQHTSSISGMKRESEDDPESEPDDHEKRIPFTLRPQTLRQRMAEESISRNEETSEESQEDEKQDTWEQQQMRKAVKIIEINITTGNSPLTPEGV

SEQ ID NO: 136167 - DNA, 2346 bp, Artificial Sequence
  derived and/or modified sequence
atggctcaccgtcctaaacggacatttcggcagcgggccgctgattcctccgacagcgatggagccgaggaatcacccgccgaacccggtgccccacgtgaattacctgttcccgggagcgccgaagaagaaccaccatcaggaggaggccgggcacaggttgccggcctgccacatcgtgtgagagggcccagggggagaggcagagtgtgggcatcttccaggcgcgccaccaaagcagccccccgggccgatgagggttccgaatctcgtactctggatgttagcaccgacgaggaagacaagatccatcattccagtgaaagtaaggacgatcaagggctgtctagcgactcttccagcagtctgggtgaaaaggaattgtcctcaaccgtaaaaatccctgatgccgcatttatccaggctgcacggcgaaaacgggaactggctagagctcaggacgattacatcagtctggatgtccagcacacctccagtatcagtggaatgaagagggagtcggaggacgatccagagtcagagccagacgaccacgaaaaaaggatccctttcaccttgaggccacagacccttcgacagagaatggcggaagagtccatctcaagaaatgaggagacgagtgaagaatctcaggaggatgagaaacaggatacctgggagcaacaacagatgagaaaggctgtgaagatcattgaggaacgagacattgatttgtcttgtgggaatggatcatccaaggttaagaagtttgataccagcatctctttcccacccgtgaacctggagatcatcaagaagcaattaaacactcgactcactctgcttcaggaaacccaccgctcgcatctgcgggagtatgaaaaatatgttcaggacgtcaagagctctaaatctacaatccagaatctggaatcctcttcaaatcaggcgttgaactgcaagttttataaatctatgaagatctacgtggagaatttgattgactgcttgaatgaaaagattattaacattcaggagatcgagagcagcatgcacgctctgttgctcaaacaggccatgaccttcatgaaaaggaggcaggacgagctgaagcacgaaagcacgtaccttcagcagttgtcgcgtaaggacgagacttctacaagtgggaatttctcagtcgatgagaaaacccagtggatcctggaggagatcgagagtcgccgcactaagaggagacaagccagggtgttatctggaaactgtaaccatcaagagggcacatccagcgatgatgaacttccttcagccgagatgatagatttccagaagagtcagggagatatacttcagaagcagaagaaagtgttcgaagaggtgcaggacgatttctgcaatatccaaaacattctgctgaaattccagcagtggcgggaaaaattccccgattcttattatgaggcattcatcagcctgtgcatcccaaagctgctcaatcctctcatccgcgtacagttgatcgattggaatccgcttaaactggagtccaccggtctgaaggagatgccatggtttaaatccgtggaagagtttatggacagtagcgtggaggatagcaagaaggaaagcagttccgacaagaaggtgttaagcgccattattaataaaacgattattcctcggctgaccgatttcgtcgagttcttgtgggatccacttagcaccagccagacaacctctttaatcactcactgcagggtgattctggaggagcactcaacgtgcgagaacgaagttagtaagagtcgccaagacctcctgaaaagtattgtgagccgtatgaagaaggccgtggaagatgatgtgtttattccgttgtaccctaaatctgcggtggaaaacaagacctccccacattccaagttccaagaacgacaattctggagcggtctgaagcttttccggaatattcttctgtggaatggcctgcttacagacgatacccttcaggaactgggtcttggcaaactgttaaaccggtatcttattatcgcactgctgaacgccactccaggtcccgacgttgtcaagaagtgtaatcaagtggccgcatgtctccctgagaaatggttcgaaaatagcgccatgcggacgtcaataccgcaactggaaaacttcattcagttcctcctccagtcggcccataaactctctagatcagaattcagagacgaagtcgaagaaatcatcctgattctggtcaagatcaaggctctcaatcaggccgagagctttattggagaacaccatctagatcacctcaaaagcttaatcaaggaggattag

SEQ ID NO: 136168 - DNA, 2232 bp, Artificial Sequence
  derived and/or modified sequence
atggcacatcggccaaaacgcacctttagacagcgtgctgcagactccagcgatagtgacggagccgaggagagtcctgctgaaccaggggccccccgtgaactcccagtccccggcagcgccgaggaggagcctccaagcggcggcggccgggcacaggtcgcaggcctcccccatagagtgagggggccaagggggagaggaagggtgtgggcctcgtctcgcagagctaccaaagctgccccgcgggccgacgagggctctgaatctcgaaccctcgacgtatcgaccgatgaggaggacaaaatacatcacagttcggagtcaaaggacgaccagggcttgagcagcgacagctctagctcccttggtgagaaggaactctctagcacagtcaaaatcccagatgccgccttcatccaggccgcccgccgcaagcgcgagcttgcaagggctcaagacgactatatttcactggatgtccagcacacctcatccatctccgtgagccgcaacgaggagacgtcagaggaaagccaagaagatgaaaagcaggacacatgggaacagcagcagatgaggaaggcagtaaaaatcatagaggagagggacatcgatcttagctgcggcaacggaagcagcaaagtgaaaaagtttgacacaagcattagttttccccccgtaaatctggaaatcatcaagaagcagctgaacacccggctgactttgctccaggaaacgcaccggtcccaccttcgagagtacgagaaatacgtgcaggacgtaaagagcagcaagtcaactatccaaaatctggagagctcttccaatcaggcactgaattgcaaattttataagtcaatgaagatatatgtggagaacctgattgactgtcttaacgagaagattatcaatattcaggagattgagagctccatgcacgccctgctcctgaagcaggctatgactttcatgaagcgacgtcaagatgagttgaagcatgaatccacttacctgcagcagctgagccggaaggacgaaacttccactagcggtaacttctctgttgacgagaagacccagtggatcctggaagaaatagagtcacgaaggacaaagaggcggcaggcccgcgtgctttccggcaactgcaatcaccaagagggcacctcttcagatgatgaactaccgtcagcagaaatgatagatttccagaagtctcaaggagatattctacagaaacagaagaaggtattcgaggaagtacaggatgatttttgtaatattcaaaacatcctgctcaagtttcaacagtggagagagaaattccccgattcatattatgaggccttcattagtctttgtatcccaaaactactcaacccactcatccgggtgcagctcattgactggaaccctctcaagttagagtctactggacttaaggagatgccgtggtttaaatccgtggaggagtttatggactcctctgtagaagactccaaaaaagagagctcgtcagataaaaaggtgctttccgctatcattaataaaaccatcatccctcggttgaccgatttcgtggaatttctctgggatcctttgtccacgagccagacgacctcactcattactcactgtagagttattctggaagagcattctacctgtgagaacgaggtatctaaatcccgccaggacctgcttaagtcgatcgttagccggatgaaaaaagcagtcgaggatgatgtgttcatcccactatacccaaaatctgccgtggagaacaaaacgtccccccacagtaaatttcaggagcgccagttctggtccgggctgaagctgttcagaaacatcctactatggaacggcctacttaccgacgatacccttcaggagctgggcctaggtaaactgctgaaccgctacttgatcatcgcccttctgaacgccactccaggacccgacgttgtgaaaaagtgtaatcaggtggccgcttgcttgcccgagaagtggtttgagaattccgcaatgcgcacttctatcccgcagctggagaacttcattcaatttctgctgcagtcagcacacaagctttccaggtcagaattcagagatgaagtggaagaaatcatcctaattctggtgaaaattaaagcattgaaccaggccgagtctttcattggtgagcatcaccttgatcacctgaagtctctgattaaggaagattag

SEQ ID NO: 136169 - DNA, 2346 bp, Artificial Sequence
  derived and/or modified sequence
atggcccaccggcccaagaggaccttccggcagagagctgctgacagcagtgacagtgatggagctgaggagagccctgctgagcccggggccccccgggagctgcctgtgcccggcagcgctgaggaggagcccccatctgggggcggccgggcccaggtggccggcctgccccaccgggtgcggggcccccggggccggggccgggtgtgggccagcagcagaagagccaccaaggccgcccccagggcagatgagggcagcgagagcaggaccctggatgtgtccacagatgaggaggacaagatccaccacagcagcgagagcaaggatgaccagggcctgagcagtgacagcagcagcagcctgggggagaaggagctgagcagcacagtgaagatcccagatgctgccttcatccaggccgcccggaggaagcgggagctggcccgggcccaggatgactacatcagcctggatgtgcagcacaccagcagcatcagcggcatgaagcgggagagtgaagatgatcctgagagcgagccagatgaccacgagaagaggatccccttcaccctgcggccccagaccctgcggcagaggatggccgaggagagcatcagcagaaatgaggagaccagcgaggagagccaggaggatgagaagcaggacacctgggagcagcagcagatgaggaaggctgtgaagatcatcgaggagcgggacatcgacctgagctgtggaaatggcagcagcaaggtgaagaagtttgacaccagcatctccttcccccctgtgaacctggagatcatcaagaagcagctgaacacccggctgaccctgctgcaggagacccacaggagccacctgcgggagtatgagaagtatgtgcaggatgtgaagagcagcaagagcaccatccagaacctggagagcagcagcaaccaggccctgaactgcaagttctacaagtccatgaagatctacgtggagaacctgattgactgcctgaatgagaagatcatcaacatccaggagattgagagctccatgcacgccctgctgctgaagcaggccatgaccttcatgaagaggcggcaggatgagctgaagcatgagagcacctacctgcagcagctgagcaggaaggatgagaccagcaccagcggcaacttctctgtggatgagaagacccagtggatcctggaggagattgagagcaggaggaccaagaggcggcaggcccgggtgctgagcggcaactgcaaccaccaggagggcaccagcagtgatgatgagctgcccagcgctgagatgattgacttccagaagagccagggcgacatcctgcagaagcagaagaaggtgtttgaggaggtgcaggatgacttctgcaacatccagaacatcctgctgaagttccagcagtggagggagaagttcccagacagctactatgaggccttcatcagcctgtgcatccccaagctgctgaaccccctcatccgggtgcagctgattgactggaaccccctgaagctggagagcacaggcctgaaggagatgccctggttcaagtctgtggaggagttcatggacagctctgtggaggacagcaagaaggagagcagcagtgacaagaaggtgctgagcgccatcatcaacaagaccatcatcccccggctgacagactttgtggagttcctgtgggaccccctgagcaccagccagaccaccagcctcatcacccactgcagggtcatcctggaggagcacagcacctgtgaaaatgaggtgtccaagagccggcaggacctgctgaagagcatcgtgtccaggatgaagaaggctgtggaggatgatgtgttcatccccctgtaccccaagtctgctgtggagaacaagaccagcccccacagcaagttccaggagcggcagttctggagcggcctgaagctgttcaggaacatcctgctgtggaatggcctgctgacagatgacaccctgcaggagctgggcctgggcaagctgctgaaccgctacctgatcatcgccctgctgaatgccaccccaggcccagatgtggtgaagaagtgcaaccaggtggccgcctgcctgcctgagaagtggtttgagaacagcgccatgaggaccagcatcccccagctggagaacttcatccagttcctgctgcagagcgcccacaagctgagccgctctgagttcagagatgaggtggaggagatcatcctgatcctggtgaagatcaaggccctgaaccaggccgagagcttcatcggggagcaccacctggaccacctgaagagcctcatcaaggaggactag

SEQ ID NO: 136170 - DNA, 2232 bp, Artificial Sequence
  derived and/or modified sequence
atggcccaccggcccaagaggaccttccggcagagagctgctgacagcagtgacagtgatggagctgaggagagccctgctgagcccggggccccccgggagctgcctgtgcccggcagcgctgaggaggagcccccatctgggggcggccgggcccaggtggccggcctgccccaccgggtgcggggcccccggggccggggccgggtgtgggccagcagcagaagagccaccaaggccgcccccagggcagatgagggcagcgagagcaggaccctggatgtgtccacagatgaggaggacaagatccaccacagcagcgagagcaaggatgaccagggcctgagcagtgacagcagcagcagcctgggggagaaggagctgagcagcacagtgaagatcccagatgctgccttcatccaggccgcccggaggaagcgggagctggcccgggcccaggatgactacatcagcctggatgtgcagcacaccagcagcatctctgtgtccagaaatgaggagaccagcgaggagagccaggaggatgagaagcaggacacctgggagcagcagcagatgaggaaggctgtgaagatcatcgaggagcgggacatcgacctgagctgtggaaatggcagcagcaaggtgaagaagtttgacaccagcatctccttcccccctgtgaacctggagatcatcaagaagcagctgaacacccggctgaccctgctgcaggagacccacaggagccacctgcgggagtatgagaagtatgtgcaggatgtgaagagcagcaagagcaccatccagaacctggagagcagcagcaaccaggccctgaactgcaagttctacaagtccatgaagatctacgtggagaacctgattgactgcctgaatgagaagatcatcaacatccaggagattgagagctccatgcacgccctgctgctgaagcaggccatgaccttcatgaagaggcggcaggatgagctgaagcatgagagcacctacctgcagcagctgagcaggaaggatgagaccagcaccagcggcaacttctctgtggatgagaagacccagtggatcctggaggagattgagagcaggaggaccaagaggcggcaggcccgggtgctgagcggcaactgcaaccaccaggagggcaccagcagtgatgatgagctgcccagcgctgagatgattgacttccagaagagccagggcgacatcctgcagaagcagaagaaggtgtttgaggaggtgcaggatgacttctgcaacatccagaacatcctgctgaagttccagcagtggagggagaagttcccagacagctactatgaggccttcatcagcctgtgcatccccaagctgctgaaccccctcatccgggtgcagctgattgactggaaccccctgaagctggagagcacaggcctgaaggagatgccctggttcaagtctgtggaggagttcatggacagctctgtggaggacagcaagaaggagagcagcagtgacaagaaggtgctgagcgccatcatcaacaagaccatcatcccccggctgacagactttgtggagttcctgtgggaccccctgagcaccagccagaccaccagcctcatcacccactgcagggtcatcctggaggagcacagcacctgtgaaaatgaggtgtccaagagccggcaggacctgctgaagagcatcgtgtccaggatgaagaaggctgtggaggatgatgtgttcatccccctgtaccccaagtctgctgtggagaacaagaccagcccccacagcaagttccaggagcggcagttctggagcggcctgaagctgttcaggaacatcctgctgtggaatggcctgctgacagatgacaccctgcaggagctgggcctgggcaagctgctgaaccgctacctgatcatcgccctgctgaatgccaccccaggcccagatgtggtgaagaagtgcaaccaggtggccgcctgcctgcctgagaagtggtttgagaacagcgccatgaggaccagcatcccccagctggagaacttcatccagttcctgctgcagagcgcccacaagctgagccgctctgagttcagagatgaggtggaggagatcatcctgatcctggtgaagatcaaggccctgaaccaggccgagagcttcatcggggagcaccacctggaccacctgaagagcctcatcaaggaggactag

SEQ ID NO: 136171 - DNA, 2346 bp, Artificial Sequence
  derived and/or modified sequence
atggcccaccggcccaagcggaccttccggcagcgggccgccgactcttcagattcagatggtgccgaggaatctcccgctgaaccgggggccccccgggagctcccggtgccagggtcggcggaagaagaaccgcctagcggcggcgggcgggcacaagtcgctggactgccacatcgtgtgcgcggacctagagggcgtggccgcgtctgggcctcctctcggcgagccaccaaggctgccccgcgggcagacgagggcagcgagtctaggacccttgacgtaagcacagacgaggaagataaaatccaccactctagcgaatctaaggacgatcaaggtttgtcttcagacagtagctccagcttgggcgaaaaagagttaagttcaaccgtcaaaatccctgacgcagcctttatacaggccgcccgccgcaagagggagttggctagagcacaggatgattatatctcgctggacgtgcaacatacatcttcgatctcagggatgaaaagagaatctgaggacgatcctgaatccgagcctgatgatcatgaaaaaaggatccccttcaccttgagacctcagacgctgagacaaaggatggctgaagaatccatctcacgtaacgaggaaacctcagaggaatcccaggaagatgagaagcaggacacctgggagcaacagcaaatgaggaaggctgtgaagatcattgaggaaagagatattgacctgtcgtgcggtaatggttccagcaaagtgaaaaaatttgatacaagcatctctttcccacccgtaaatttagagatcattaagaagcagctgaatacccgcctcactctcctgcaggagacacataggtcacatcttcgggagtacgagaagtatgtccaggatgtcaaatccagcaaaagcaccatccagaatctagagtcctcttccaatcaggcattgaactgtaaattctataagtcgatgaagatttatgttgagaaccttatcgactgcctgaacgaaaaaatcatcaatatccaggagatcgagagtagcatgcacgcactacttctgaagcaggccatgacttttatgaaacgacggcaggacgaactgaagcacgaaagcacgtatctgcagcaactctctagaaaggatgagacatcaactagcgggaacttttcagtcgacgagaagacccaatggattcttgaagagattgagtcaagaagaactaagaggcggcaagcacgggtgctctcaggcaactgtaatcaccaggaaggaacgtcctctgatgatgagctcccttccgccgagatgatcgacttccagaagtcccaaggcgatatactccaaaaacagaaaaaggtgttcgaagaggttcaggacgacttctgcaatatacagaatatcttgctgaagttccagcaatggagggaaaagtttcctgacagttactacgaagcattcatcagcctgtgtatacctaaactgctgaatcctctcattagggtgcaactgattgactggaatcctctcaaactggagagtaccgggctgaaagagatgccatggtttaagtcagtggaggagtttatggattcatcggtggaggacagtaaaaaagagtcttctagcgacaagaaggtgctgagcgccatcattaacaaaactattattcccaggctgaccgattttgtggaattcctgtgggacccattaagcacttcccaaactaccagcctgatcacccactgccgcgtgattttggaggaacacagcacttgcgagaacgaagtatctaagtctcgacaggatctcctgaaatctatcgtctctcgaatgaaaaaggctgtggaagatgatgtgttcatcccgctatatcccaagtcagccgttgaaaataaaacaagcccgcacagcaagtttcaggaaaggcagttttggtctgggcttaagctatttcgcaacattttactctggaatggactcttaactgacgacactctccaagaattgggtttaggaaagctgctaaaccgttacttgataattgcactgctgaatgcgactcccggtcccgatgtggtcaagaaatgtaaccaggtagcagcctgcctgccagaaaaatggttcgagaatagcgcaatgaggacttcaattccacaattagaaaactttatacagttcctcttgcagtctgctcacaagctcagtcgatcggaatttagagatgaggtagaagagattatcctgattctggtgaagatcaaggctctcaatcaggctgagtcattcattggagagcatcatctggatcacctgaagagtctcatcaaggaagattag

SEQ ID NO: 136172 - DNA, 2232 bp, Artificial Sequence
  derived and/or modified sequence
atggcccaccggcccaagcggaccttccggcagcgggccgccgactcttctgattcggatggtgcagaagagagtcctgcagagccgggagcccctcgagagctgcccgtacccgggagtgccgaagaggaacccccctcaggtggcggcagagctcaggtagcaggactgccacatcgagttcgcggtcctcgcggtaggggcagagtgtgggcatcaagccgacgagctacaaaggctgccccccgagcggacgagggttcagagtcaagaacactggatgtcagtacagatgaggaggacaaaatccaccactccagcgaatccaaggatgatcagggcctgtcatctgattcatcatcttccctgggcgagaaagagctctccagcaccgtcaagatccccgatgctgccttcattcaggccgctaggagaaaaagagaactggctagagctcaggatgactacatctcactggacgtgcagcatacctcatcaataagcgtctccaggaacgaagagacatctgaagagtcgcaggaggacgagaaacaagacacttgggagcaacagcagatgaggaaagcagtgaagatcattgaggaacgtgatattgacctgtcttgtggaaacggcagtagtaaggtgaagaagtttgatacgagcattagcttcccacctgtgaatctcgaaatcatcaaaaaacagttgaacacgaggctgaccttactgcaagagacccacaggagccatctccgagaatacgagaaatacgtccaggatgtgaagagttcaaaatccacaatccagaacctggagtcaagcagcaatcaggccctcaattgtaagttctacaaaagcatgaagatatatgtggaaaacctgattgattgcttgaatgagaaaatcatcaatatccaggagatcgagagcagtatgcacgctctgctgctcaagcaggctatgacatttatgaagagacgacaggacgaacttaaacatgaatcaacatacctccagcagctgtcccggaaggacgagacctcaacctcggggaatttctctgtggatgagaagacccaatggattctggaagagatcgagtcacgtcgaaccaagcggcgccaggctcgggtgctgtcaggcaattgcaaccaccaagaaggaacgtcatcagacgacgagcttccaagcgctgagatgattgactttcaaaagtcacaaggcgatatcctgcagaaacaaaagaaggtctttgaagaagtgcaagacgatttctgcaacatccaaaacatactgttgaaattccagcagtggcgagaaaagttccccgatagctactacgaagccttcataagcctttgcattcctaagctgcttaatccattaatccgggtgcaactcatcgactggaacccactgaaactggagagtaccggtctcaaggagatgccctggtttaaaagtgtggaagagtttatggactccagcgtcgaggattctaaaaaggaatcctcctctgataagaaggtactcagcgccatcattaacaaaactatcattcctagactgactgattttgtcgagttcctgtgggaccctttgagcaccagccagacaactagcttgataacacattgcagagttatattagaagagcattccacgtgcgagaatgaggtcagcaaatctaggcaggatttgctaaagtctattgtttcaaggatgaagaaggcagttgaagatgacgttttcatcccactttaccctaagtccgctgtagagaacaaaacttcaccacactctaagttccaggagagacaattttggtccggcctgaaactcttccgtaacatcctactgtggaatggactcctaacggacgatacactccaagagctagggctggggaagttgctcaacagatatctgatcattgcactgctgaacgccacacctgggcctgatgtggtgaagaagtgtaaccaagtggcagcttgtctgccagaaaaatggtttgagaattctgctatgcgcaccagtatcccgcagctcgagaatttcattcagttcctcctgcagtccgcccacaaactgagtcggagtgaatttagggatgaagtggaggagattatcctgattttggttaagatcaaagccctgaaccaagctgaatctttcattggtgaacatcatttggaccacctcaaatcacttattaaagaggattag

SEQ ID NO: 136173 - DNA, 2346 bp, Artificial Sequence
  derived and/or modified sequence
atggcacataggccaaagaggacgtttcgtcaacgggctgcagattcctctgacagtgatggagcagaagagagtcctgctgagcccggagcccctcgagaactgcccgttcctggatcagcagaagaggagcccccaagtggaggcggaagagcccaggtggctggtctgccccatcgtgtccgcggacctcgcggtaggggcagagtgtgggcaagcagtaggagagcaacaaaagccgctccacgcgctgacgagggctccgagtctagaacgcttgatgtgtccaccgacgaggaggacaagattcatcacagtagcgagtctaaggacgaccaaggcctcagttcggatagcagtagcagcctgggcgagaaggagctttctagcacagtgaagatcccagacgccgcatttatccaagccgcacgtaggaaacgcgagttggctcgcgctcaagatgactacatttccctcgatgtgcagcatacctccagtatttccgggatgaagcgagagagtgaggatgaccccgaatcagagcccgatgaccacgagaaaagaatcccattcacactgagaccacagaccctgcggcagcggatggccgaggaatccatctctaggaatgaagagaccagcgaagaatctcaggaagatgagaaacaagacacctgggaacagcagcagatgaggaaagctgttaagattatagaagagcgtgacatcgatctgtcttgtggtaacggcagttcgaaagtgaaaaaattcgacaccagtatttcctttccacccgtgaatctggagataatcaaaaagcaactgaacaccaggcttacccttctgcaggagacacataggagccatcttagagagtacgagaagtatgtgcaggacgtcaaaagctccaagtccacaatccagaatctcgagtcaagctcaaatcaagccctgaactgtaagttttacaaatctatgaagatctacgtggagaatctgatcgactgtctgaatgaaaaaattattaatatccaagagattgagtcttcaatgcacgctctgctgttgaaacaggcgatgaccttcatgaagaggaggcaggacgagctaaagcatgaatcaacgtacctccagcagcttagtagaaaagacgagaccagcacatcgggaaacttttccgtggacgaaaaaacacaatggatactcgaagaaatcgagtcgcggagaacaaagaggagacaggctcgcgtcctgagtggtaactgcaaccaccaagaaggaacctctagcgacgatgagcttccaagtgccgagatgatcgatttccagaaatctcagggagatatccttcagaagcagaagaaggtgtttgaagaggtacaggatgatttctgtaacatccagaatattctcctgaagtttcagcagtggcgggaaaaattcccggattcctactacgaggctttcattagtttatgcattcctaaactcctgaatccactgattagagtgcagctcatcgattggaacccgctcaaactagagtccaccgggctaaaagagatgccctggtttaaaagtgttgaggagttcatggatagcagtgtcgaagactcaaagaaagaaagttcatctgacaagaaagtacttagcgcgattatcaacaagactatcataccccgactgaccgacttcgtcgaatttctatgggatcccttaagcaccagccaaacaacctccctcattactcattgtagagtgattctggaggagcacagcacatgcgaaaacgaggtaagcaagagtaggcaggacctactgaagtctatcgtcagtagaatgaagaaggcagtggaggatgacgtctttattcccctgtacccaaagtccgccgtggaaaataaaacaagcccccactcaaagtttcaggagcggcagttctggagcggcttaaagctgttccgaaacatactgctatggaacggtctgttgaccgacgataccctccaagagctcgggttaggcaaactgttgaataggtacctgattattgccctgctcaacgcaaccccaggcccagacgtcgtcaaaaagtgcaatcaagtcgctgcctgcttacctgagaagtggtttgagaacagcgccatgcgaacctccattccgcagttggagaacttcattcagttcctgctccaatccgcccataaactctccagatcagagtttcgtgatgaggtggaggagatcatcctgattctcgtcaaaattaaagctctcaatcaagccgaaagtttcatcggggaacaccacttggaccacctcaaatctctgatcaaggaagactag

SEQ ID NO: 136174 - DNA, 2232 bp, Artificial Sequence
  derived and/or modified sequence
atggcacatcggccaaaacggactttccgccagcgagcagcagattcatcggattccgacggcgcagaggagtcccctgcggagcccggagctcccagagagttacccgtcccaggctcagcagaagaagaacccccttcaggcggtggtcgggctcaagtagctggtttgcctcatcgtgtgaggggccctcgaggtagagggagagtgtgggcctcatccaggagagccactaaagccgctcccagggcggatgaaggttccgagtctcgaacgctggacgtcagtacagacgaggaagacaaaatccaccattcatcggagagcaaagacgatcaaggtctgagtagtgacagttctagctccctcggcgagaaagagctgtcttctaccgtaaagatcccagatgcggcttttattcaagcagccagaagaaaacgcgaactggctcgggcacaggatgactatattagtctcgacgtccagcacacttcctctatctccgtgtcaagaaacgaggaaaccagtgaagagtcgcaggaggatgaaaagcaggacacgtgggagcaacagcagatgaggaaagcagtcaaaattatcgaagagcgcgacatagacctctcctgcggcaacgggtcgtctaaagttaaaaagttcgatacttcaattagtttcccgcctgtgaacttggagattataaagaagcagctgaacacacgcttaacccttcttcaagagacacataggagtcatctccgggagtacgagaaatacgtacaagatgtgaagtcatcgaaatccacaatacaaaatttggaaagttctagtaaccaggctctgaactgtaaattctataagtctatgaagatttacgtagagaacctgattgactgcctgaatgagaaaataatcaacattcaggagattgagagctctatgcatgcgctgttactcaaacaggccatgacttttatgaagagaagacaggacgagctgaagcacgagtccacatatctgcaacagctcagtcgaaaagacgagaccagcacaagcggcaatttttctgtggacgagaagactcagtggatcctggaggagatcgaatcgcgcaggacaaaacgcaggcaggccagagtcctgagcgggaactgcaaccaccaggaaggcacctcctcagatgacgagctgccgtccgcggagatgatcgattttcagaagtcccagggtgatatcttgcagaaacagaagaaggtctttgaagaggtgcaggatgatttctgtaacattcagaatattctactaaagtttcaacaatggagagaaaaattccccgacagttattacgaggcctttatatctctctgcatccccaagcttctcaaccccttaattcgtgtgcagctcatagactggaacccactcaagctagaatctactggtctgaaggagatgccttggtttaaatctgtggaggaattcatggacagttctgtcgaggactccaagaaagaaagctcttccgataaaaaagtgctgtcagcaataattaacaagaccatcataccaagacttaccgattttgtagagtttctctgggaccctctcagcacatctcagacgaccagcttaatcacacattgtagggtcatcctagaggagcattctacctgtgagaacgaggtctccaaatcaaggcaggatctgttgaaatcaatagtgtctcgaatgaagaaggccgtcgaggacgacgtctttatccctctgtaccctaaaagtgccgtagagaataaaacctctccgcattctaaattccaggaacggcagttctggtcaggtctgaagttgttcagaaatattctgctctggaacgggttgttgacagatgacacactccaggagcttggcctcggaaagctcctgaacaggtatctcatcatcgcactcctgaatgcaactcccggacccgacgtggttaaaaaatgcaaccaggtagctgcatgcctcccagagaaatggtttgagaatagcgccatgcgcactagtattccccagcttgaaaatttcattcagtttctgctacagagtgcccacaaactcagccggtccgagtttagggacgaggtggaagagattatcctgatccttgtcaaaatcaaggccctaaaccaagcggagtcttttatcggcgaacatcatctggatcatctcaaaagtctgatcaaagaggactag

SEQ ID NO: 136175 - DNA, 4440 bp, Artificial Sequence
  derived and/or modified sequence
gagcagaaggcaggcgggacgggcgcgcgcactcggcggccaggcgcggcgggagcgcgccctagggggcgggcactgaagctgcggcttgcggttcagcgggttctagggcgccgggcgctcgggcctcggccatggctcacaggccgaaaaggacttttcggcagcgcgcggctgattccagcgacagcgatggcgccgaggagtcgcctgctgagcctggggcgccgagggaacttccggtcccgggttctgcggaggaagagccgccctctggaggaggccgcgcgcaggtggcgggactgccccaccgggttcggggccctcgtggccggggccgggtctgggcgagctcccggcgtgccaccaaagcggctccccgcgcggacgaaggctcagaatccagaacccttgatgtgtccacagatgaagaggataaaatacatcactcctcagaaagtaaggatgatcagggtttgtcttctgacagttctagctctcttggagaaaaagaactttcatcaacagttaagatcccagatgcagcttttattcaggcagcccgcagaaaacgtgaattggccagggcccaagatgactatatttctttggatgtacaacatacctcctccatctctggtatgaagagagagagcgaagatgaccctgagagtgagcctgatgaccatgaaaagagaataccatttactctaagacctcaaacacttagacaaaggatggctgaggaatcaataagcagaaatgaagaaacaagtgaagaaagtcaggaagatgaaaagcaagatacttgggaacaacagcaaatgaggaaagcagttaaaatcatagaggaaagagacatagatctttcctgtggcaatggatcttcaaaagtgaagaaatttgatacttccatttcatttccgccagtaaatttagaaattataaagaagcaattaaatactagattaacattactacaggaaactcaccgctcacacctgagggagtatgaaaaatacgtacaagatgtcaaaagctcaaagagtaccatccagaacctagagagttcatcaaatcaagctctaaattgtaaattctataaaagcatgaaaatttatgtggaaaatttaattgactgccttaatgaaaagattatcaacatccaagaaatagaatcatccatgcatgcactccttttaaaacaagctatgacctttatgaaacgcaggcaagatgaattaaaacatgaatcaacgtatttacaacagttatcacgcaaagatgagacatccacaagtggaaacttctcagtagatgaaaaaactcagtggattttagaagagattgaatctcgaaggacaaaaagaagacaagcaagggtgctttctgggaattgtaaccatcaggaaggaacatctagtgatgatgaactgccttcagcagagatgattgacttccaaaaaagccaaggtgacattttacagaaacagaagaaagtttttgaagaagtgcaagatgatttttgtaacatccagaatattttgttgaaatttcagcaatggcgagaaaagtttcctgactcctattatgaagctttcattagtttatgcataccaaagcttttaaatcccctaatacgagttcagttgattgattggaatcctcttaagttggaatccacaggtttaaaagagatgccatggttcaaatctgtagaagaatttatggatagcagtgtggaagattcaaagaaggaaagtagttcagataaaaaagtcttgtctgcaatcatcaacaaaacaattattccccgacttacagactttgtagaattcctttgggatcctttgtcaacctcacagacaacaagtttaataacacattgcagagtgattcttgaagaacattccacttgtgaaaatgaagttagtaaaagcagacaggatttacttaaatccattgtttcaagaatgaaaaaggcagtagaagatgatgtttttattcctctgtatccaaagagtgctgtagaaaacaaaacatcacctcattcaaagttccaagaaagacagttctggtcaggcctaaagctcttccgcaatattcttctttggaatggactccttacagatgacaccttgcaagaactaggactagggaagctgctaaatcgttaccttattatagcacttctcaatgccacacctgggccagatgtggttaaaaagtgcaaccaggtagcagcatgtctaccagaaaaatggtttgaaaattctgccatgaggacatctattccacagctagaaaacttcattcagtttttattgcagtctgcacataaattatctagaagtgaattcagggatgaagtcgaagaaataattcttattttggtgaaaataaaagctttgaatcaagcagaatccttcataggagagcatcacctagaccatcttaaatcactaattaaagaagattgaataaactttattggaaaatgctaaaattttaatatagttacactcagttcctttgtttgagaagaagctggtgcctctctcttctttattccctgtaatagaaggtaggatttgaaaaaaagcaggactccacctctgtattcccccgtgctttaccttctggcatcatgaaaagctgccatgattctgtggtgttctaaggaattaaatgcactggagctttaagagctcaacgtgtttccctttgattcttttggctggtctttcaattttcttaagaggggaactggagaaaccttgctaaaggttttagcttaagtgagcatgctactaagtcttctgtcctgaaccacaataatatcttttagttctctttaactacctttatttaaaaataagtcaatatgaaaatctcagttggagtgaattatttgctaagtattaaatgattaaggcatgtgccgattgtcaaattatccttcagaaatctgtaccaatttaatgtaccaacataagcataagtgagtgccaatgaatccctaccagcagtagttattatcctttttaaaaatgcattgaaaatttgaaaggtaaaaatcttattttaatagcgtattttgtgttggctattagagagtaaacatattggttttggccatttgtaattatttctgaaatatccatctttttcttatggactttaagacctttatatttttaaagatattgattttttgcccatgcttgtggcagaagttttccttatttgccatttttcttttattttttttttaattgtattttttgagacagggtctggctctgtcacccaggctggagagtagtggcacaatctcggctcactgcaacctctgccttctgggctcaagcaatcctcccacttcaacctcccaagtagctgggactataggcatgcgccaccatgcccagctgatttttgtaattttttgtagagatggggtttcgtgacattgcccaggctggtctcgaactcttgagctcaagcagtctacccaccttgacctcccaaagtgctgggattacaggcttgagcaaccatgtttggcctttcttttaaatttgttgatgttttttgaagcattaagtcattacttattagcaagttactattttgtttttttgtcattggtggtaggactaagaaggaaacagatattttaaatactcacaacatgtgattcattttctgataaaatatttgtctaataaaacagaggcaagataatttaatcaaaagaaattaagaaaattttccaaaaatgttagtttactagtaatttttctaagtctacttattaaataacttaagggaaactgtaaatatattttgcaaattgttgttcaaaagataattggaaaaaattgaatatattgtaggatttgaatatacagcctacttttatgtcacctctaccttcaaaactacatataatttattttaggagttggatttgttatgtctgttgcagtgaggacttgtgattcactggtatgaagaattttttgatgtttatattagtaacaaaattatacaaggatagaatctcatctagaaaatgcaaactattgttgaaaagcagttagcatttccacacaaccgctgtccccagagataactgctgttttcattttaatgttatccttttagaccttttctctatttacaaaaatgttacgtgtttctatgtgtacatagttttgggttttttttttttttttacgtaagtggcagacactttattgcacatgaaatttgtaatttttttctatttaagtacacatttggaaattatcctctgacttttggatttttaactaaatatgttggacgtgttcctttatatatttaagttcagcacagaaactttcctacctttttgtggaagataaaatattaaaactgctttcaaaactacaa

SEQ ID NO: 136176 - DNA, 2516 bp, Artificial Sequence
  derived and/or modified sequence
agcgggttctagggcgccgggcgctcgggcctcggccatggctcacaggccgaaaaggacttttcggcagcgcgcggctgattccagcgacagcgatggcgccgaggagtcgcctgctgagcctggggcgccgagggaacttccggtcccgggttctgcggaggaagagccgccctctggaggaggccgcgcgcaggtggcgggactgccccaccgggttcggggccctcgtggccggggccgggtctgggcgagctcccggcgtgccaccaaagcggctccccgcgcggacgaaggctcagaatccagaacccttgatgtgtccacagatgaagaggataaaatacatcactcctcagaaagtaaggatgatcagggtttgtcttctgacagttctagctctcttggagaaaaagaactttcatcaacagttaagatcccagatgcagcttttattcaggcagcccgcagaaaacgtgaattggccagggcccaagatgactatatttctttggatgtacaacatacctcctccatctctgtaagcagaaatgaagaaacaagtgaagaaagtcaggaagatgaaaagcaagatacttgggaacaacagcaaatgaggaaagcagttaaaatcatagaggaaagagacatagatctttcctgtggcaatggatcttcaaaagtgaagaaatttgatacttccatttcatttccgccagtaaatttagaaattataaagaagcaattaaatactagattaacattactacaggaaactcaccgctcacacctgagggagtatgaaaaatacgtacaagatgtcaaaagctcaaagagtaccatccagaacctagagagttcatcaaatcaagctctaaattgtaaattctataaaagcatgaaaatttatgtggaaaatttaattgactgccttaatgaaaagattatcaacatccaagaaatagaatcatccatgcatgcactccttttaaaacaagctatgacctttatgaaacgcaggcaagatgaattaaaacatgaatcaacgtatttacaacagttatcacgcaaagatgagacatccacaagtggaaacttctcagtagatgaaaaaactcagtggattttagaagagattgaatctcgaaggacaaaaagaagacaagcaagggtgctttctgggaattgtaaccatcaggaaggaacatctagtgatgatgaactgccttcagcagagatgattgacttccaaaaaagccaaggtgacattttacagaaacagaagaaagtttttgaagaagtgcaagatgatttttgtaacatccagaatattttgttgaaatttcagcaatggcgagaaaagtttcctgactcctattatgaagctttcattagtttatgcataccaaagcttttaaatcccctaatacgagttcagttgattgattggaatcctcttaagttggaatccacaggtttaaaagagatgccatggttcaaatctgtagaagaatttatggatagcagtgtggaagattcaaagaaggaaagtagttcagataaaaaagtcttgtctgcaatcatcaacaaaacaattattccccgacttacagactttgtagaattcctttgggatcctttgtcaacctcacagacaacaagtttaataacacattgcagagtgattcttgaagaacattccacttgtgaaaatgaagttagtaaaagcagacaggatttacttaaatccattgtttcaagaatgaaaaaggcagtagaagatgatgtttttattcctctgtatccaaagagtgctgtagaaaacaaaacatcacctcattcaaagttccaagaaagacagttctggtcaggcctaaagctcttccgcaatattcttctttggaatggactccttacagatgacaccttgcaagaactaggactagggaagctgctaaatcgttaccttattatagcacttctcaatgccacacctgggccagatgtggttaaaaagtgcaaccaggtagcagcatgtctaccagaaaaatggtttgaaaattctgccatgaggacatctattccacagctagaaaacttcattcagtttttattgcagtctgcacataaattatctagaagtgaattcagggatgaagtcgaagaaataattcttattttggtgaaaataaaagctttgaatcaagcagaatccttcataggagagcatcacctagaccatcttaaatcactaattaaagaagattgaataaactttattggaaaatgctaaaattttaatatagttacactcagttcctttgtttgagaagaagctggtgcctctctcttctttattccctgtaatagaaggtaggatttgaaaaaaagcaggactccacctctgtattcccccgtgctttaccttctggcatcatgaaaagctgccatgattctgtggtgttctaaggaattaaatgcactggagctttaagagctcaacgtgtttccctttg

SEQ ID NO: 136177 - DNA, 2346 bp, Artificial Sequence
  derived and/or modified sequence
atggcccacagacccaagagaaccttcagacagagagccgccgacagcagcgacagcgacggcgccgaggagagccccgccgagcccggcgcccccagagagctgcccgtgcccggcagcgccgaggaggagccccccagcggcggcggcagagcccaggtggccggcctgccccacagagtgagaggccccagaggcagaggcagagtgtgggccagcagcagaagagccaccaaggccgcccccagagccgacgagggcagcgagagcagaaccctggacgtgagcaccgacgaggaggacaagatccaccacagcagcgagagcaaggacgaccagggcctgagcagcgacagcagcagcagcctgggcgagaaggagctgagcagcaccgtgaagatccccgacgccgccttcatccaggccgccagaagaaagagagagctggccagagcccaggacgactacatcagcctggacgtgcagcacaccagcagcatcagcggcatgaagagagagagcgaggacgaccccgagagcgagcccgacgaccacgagaagagaatccccttcaccctgagaccccagaccctgagacagagaatggccgaggagagcatcagcagaaacgaggagaccagcgaggagagccaggaggacgagaagcaggacacctgggagcagcagcagatgagaaaggccgtgaagatcatcgaggagagagacatcgacctgagctgcggcaacggcagcagcaaggtgaagaagttcgacaccagcatcagcttcccccccgtgaacctggagatcatcaagaagcagctgaacaccagactgaccctgctgcaggagacccacagaagccacctgagagagtacgagaagtacgtgcaggacgtgaagagcagcaagagcaccatccagaacctggagagcagcagcaaccaggccctgaactgcaagttctacaagagcatgaagatctacgtggagaacctgatcgactgcctgaacgagaagatcatcaacatccaggagatcgagagcagcatgcacgccctgctgctgaagcaggccatgaccttcatgaagagaagacaggacgagctgaagcacgagagcacctacctgcagcagctgagcagaaaggacgagaccagcaccagcggcaacttcagcgtggacgagaagacccagtggatcctggaggagatcgagagcagaagaaccaagagaagacaggccagagtgctgagcggcaactgcaaccaccaggagggcaccagcagcgacgacgagctgcccagcgccgagatgatcgacttccagaagagccagggcgacatcctgcagaagcagaagaaggtgttcgaggaggtgcaggacgacttctgcaacatccagaacatcctgctgaagttccagcagtggagagagaagttccccgacagctactacgaggccttcatcagcctgtgcatccccaagctgctgaaccccctgatcagagtgcagctgatcgactggaaccccctgaagctggagagcaccggcctgaaggagatgccctggttcaagagcgtggaggagttcatggacagcagcgtggaggacagcaagaaggagagcagcagcgacaagaaggtgctgagcgccatcatcaacaagaccatcatccccagactgaccgacttcgtggagttcctgtgggaccccctgagcaccagccagaccaccagcctgatcacccactgcagagtgatcctggaggagcacagcacctgcgagaacgaggtgagcaagagcagacaggacctgctgaagagcatcgtgagcagaatgaagaaggccgtggaggacgacgtgttcatccccctgtaccccaagagcgccgtggagaacaagaccagcccccacagcaagttccaggagagacagttctggagcggcctgaagctgttcagaaacatcctgctgtggaacggcctgctgaccgacgacaccctgcaggagctgggcctgggcaagctgctgaacagatacctgatcatcgccctgctgaacgccacccccggccccgacgtggtgaagaagtgcaaccaggtggccgcctgcctgcccgagaagtggttcgagaacagcgccatgagaaccagcatcccccagctggagaacttcatccagttcctgctgcagagcgcccacaagctgagcagaagcgagttcagagacgaggtggaggagatcatcctgatcctggtgaagatcaaggccctgaaccaggccgagagcttcatcggcgagcaccacctggaccacctgaagagcctgatcaaggaggactag

SEQ ID NO: 136178 - DNA, 2232 bp, Artificial Sequence
  derived and/or modified sequence
atggcccacagacccaagagaaccttcagacagagagccgccgacagcagcgacagcgacggcgccgaggagagccccgccgagcccggcgcccccagagagctgcccgtgcccggcagcgccgaggaggagccccccagcggcggcggcagagcccaggtggccggcctgccccacagagtgagaggccccagaggcagaggcagagtgtgggccagcagcagaagagccaccaaggccgcccccagagccgacgagggcagcgagagcagaaccctggacgtgagcaccgacgaggaggacaagatccaccacagcagcgagagcaaggacgaccagggcctgagcagcgacagcagcagcagcctgggcgagaaggagctgagcagcaccgtgaagatccccgacgccgccttcatccaggccgccagaagaaagagagagctggccagagcccaggacgactacatcagcctggacgtgcagcacaccagcagcatcagcgtgagcagaaacgaggagaccagcgaggagagccaggaggacgagaagcaggacacctgggagcagcagcagatgagaaaggccgtgaagatcatcgaggagagagacatcgacctgagctgcggcaacggcagcagcaaggtgaagaagttcgacaccagcatcagcttcccccccgtgaacctggagatcatcaagaagcagctgaacaccagactgaccctgctgcaggagacccacagaagccacctgagagagtacgagaagtacgtgcaggacgtgaagagcagcaagagcaccatccagaacctggagagcagcagcaaccaggccctgaactgcaagttctacaagagcatgaagatctacgtggagaacctgatcgactgcctgaacgagaagatcatcaacatccaggagatcgagagcagcatgcacgccctgctgctgaagcaggccatgaccttcatgaagagaagacaggacgagctgaagcacgagagcacctacctgcagcagctgagcagaaaggacgagaccagcaccagcggcaacttcagcgtggacgagaagacccagtggatcctggaggagatcgagagcagaagaaccaagagaagacaggccagagtgctgagcggcaactgcaaccaccaggagggcaccagcagcgacgacgagctgcccagcgccgagatgatcgacttccagaagagccagggcgacatcctgcagaagcagaagaaggtgttcgaggaggtgcaggacgacttctgcaacatccagaacatcctgctgaagttccagcagtggagagagaagttccccgacagctactacgaggccttcatcagcctgtgcatccccaagctgctgaaccccctgatcagagtgcagctgatcgactggaaccccctgaagctggagagcaccggcctgaaggagatgccctggttcaagagcgtggaggagttcatggacagcagcgtggaggacagcaagaaggagagcagcagcgacaagaaggtgctgagcgccatcatcaacaagaccatcatccccagactgaccgacttcgtggagttcctgtgggaccccctgagcaccagccagaccaccagcctgatcacccactgcagagtgatcctggaggagcacagcacctgcgagaacgaggtgagcaagagcagacaggacctgctgaagagcatcgtgagcagaatgaagaaggccgtggaggacgacgtgttcatccccctgtaccccaagagcgccgtggagaacaagaccagcccccacagcaagttccaggagagacagttctggagcggcctgaagctgttcagaaacatcctgctgtggaacggcctgctgaccgacgacaccctgcaggagctgggcctgggcaagctgctgaacagatacctgatcatcgccctgctgaacgccacccccggccccgacgtggtgaagaagtgcaaccaggtggccgcctgcctgcccgagaagtggttcgagaacagcgccatgagaaccagcatcccccagctggagaacttcatccagttcctgctgcagagcgcccacaagctgagcagaagcgagttcagagacgaggtggaggagatcatcctgatcctggtgaagatcaaggccctgaaccaggccgagagcttcatcggcgagcaccacctggaccacctgaagagcctgatcaaggaggactag

SEQ ID NO: 136179 - protein, 772 aa, Artificial Sequence
  derived and/or modified sequence
MLSLKKYLTEGLLQFTILLSLIGVRVDVDTYLTSQLPPLREIILGPSSAYTQTQFHNLRNTLDGYGIHPKSIDLDNYFTARRLLSQVRALDRFQVPTTEVNAWLVHRDPEGSVSGSQPNSGLALESSSGLQDVTGPDNGVRESETEQGFGEDLEDLGAVAPPVSGDLTKEDIDLIDILWRQDIDLGAGREVFDYSHRQKEQDVEKELRDGGEQDTWAGEGAEALARNLLVDGETGESFPAQVPSGEDQTALSLEECLRLLEATCPFGENAEFPADISSITEAVPSESEPPALQNNLLSPLLTGTESPFDLEQQWQDLMSIMEMQAMEVNTSASEILYSAPPGDPLSTNYSLAPNTPINQNVSLHQASLGGCSQDFLLFSPEVESLPVASSSTLLPLAPSNSTSLNSTFGSTNLTGLFFPPQLNGTANDTAGPELPDPLGGLLDEAMLDEISLMDLAIEEGFNPVQASQLEEEFDSDSGLSLDSSHSPSSLSSSEGSSSSSSSSSSSSSSASSSASSSFSEEGAVGYSSDSETLDLEEAEGAVGYQPEYSKFCRMSYQDPAQLSCLPYLEHVGHNHTYNMAPSALDSADLPPPSALKKGSKEKQADFLDKQMSRDEHRARAMKIPFTNDKIINLPVEEFNELLSKYQLSEAQLSLIRDIRRRGKNKMAAQNCRKRKLDTILNLERDVEDLQRDKARLLREKVEFLRSLRQMKQKVQSLYQEVFGRLRDENGRPYSPSQYALQYAGDGSVLLIPRTMADQQARRQERKPKDRRK

SEQ ID NO: 136180 - protein, 791 aa, Artificial Sequence
  derived and/or modified sequence
FVFWKILKTKKHKHSGPSAMLSLKKYLTEGLLQFTILLSLIGVRVDVDTYLTSQLPPLREIILGPSSAYTQTQFHNLRNTLDGYGIHPKSIDLDNYFTARRLLSQVRALDRFQVPTTEVNAWLVHRDPEGSVSGSQPNSGLALESSSGLQDVTGPDNGVRESETEQGFGEDLEDLGAVAPPVSGDLTKEDIDLIDILWRQDIDLGAGREVFDYSHRQKEQDVEKELRDGGEQDTWAGEGAEALARNLLVDGETGESFPAQVPSGEDQTALSLEECLRLLEATCPFGENAEFPADISSITEAVPSESEPPALQNNLLSPLLTGTESPFDLEQQWQDLMSIMEMQAMEVNTSASEILYSAPPGDPLSTNYSLAPNTPINQNVSLHQASLGGCSQDFLLFSPEVESLPVASSSTLLPLAPSNSTSLNSTFGSTNLTGLFFPPQLNGTANDTAGPELPDPLGGLLDEAMLDEISLMDLAIEEGFNPVQASQLEEEFDSDSGLSLDSSHSPSSLSSSEGSSSSSSSSSSSSSSASSSASSSFSEEGAVGYSSDSETLDLEEAEGAVGYQPEYSKFCRMSYQDPAQLSCLPYLEHVGHNHTYNMAPSALDSADLPPPSALKKGSKEKQADFLDKQMSRDEHRARAMKIPFTNDKIINLPVEEFNELLSKYQLSEAQLSLIRDIRRRGKNKMAAQNCRKRKLDTILNLERDVEDLQRDKARLLREKVEFLRSLRQMKQKVQSLYQEVFGRLRDENGRPYSPSQYALQYAGDGSVLLIPRTMADQQARRQERKPKDRRK

SEQ ID NO: 136181 - DNA, 4891 bp, Artificial Sequence
  derived and/or modified sequence
tttccgagtgcggtagcaggagggggcggggaggtaagcggaggctccgagctctaggccggccggcggtggcggcggcgaggccgggactcgggcttagggcctgctgtggaggcagcggcggacgccgagctaagcagtttctctggaaacccccctggtaagtgtggaggaggcgggacactctgacccaagacgaaaggcctgtagctccagccaaagaaaataaaccttaggagggagaaggaaaaaaaaaatccatcagctgttcctgagaacagcctgcattggaatctacagagaggacaactaatgtgagtgaggaagtgactgtatgtggactgtggagaaagtaagtcacgtgggcccttgaggacctggactgggttaggaacagttgtactttcagaggtgaggtgtcgagaagggaaagtgaatgtggtctggagtgtgtccttggccttggctccacagggtgtgctttcctctggggccgtcagggagctcatcccttgtgttctgccagggtggggtacggggtttgacactgaggagggtaacctgctggctggagcggcagagcagtggccttgatttgtcttttggaagattttaaaaaccaaaaagcataaacattctggtccttcagcaatgctttctctgaagaaatacttaacggaaggacttctccagttcaccattctgctgagtttgattggggtacgggtggacgtggatacttacctgacctcacagcttcccccactccgggagatcatcctggggcccagttctgcctatactcagacccagttccacaacctgaggaataccttggatggctatggtatccaccccaagagcatagacctggacaattacttcactgcccggcggctcctcagtcaggtgagggccctggacaggttccaggtgccaaccactgaggtaaatgcctggctggttcaccgagacccagaggggtctgtctctggcagtcagcccaactcaggcctcgccctcgagagttccagtggcctccaagatgtgacaggcccagacaacggggtgcgagaaagcgaaacggagcagggattcggtgaagatttggaggatttgggggctgtagcccccccagtcagtggagacttaaccaaagaggacatagatctgattgacatcctttggcgacaggatattgatctgggggctgggcgtgaggtttttgactatagtcaccgccagaaggagcaggatgtggagaaggagctgcgagatggaggcgagcaggacacctgggcaggcgagggcgcggaagctctggcacggaacctgctagtggatggagagactggggagagcttccctgcacaggtgcctagtggggaggaccagacggccctgtccctggaagagtgccttaggctgctggaagccacctgcccctttggggagaatgctgagtttccagcagacatttccagcataacagaagcagtgcctagtgagagtgagccccctgctcttcaaaacaacctcttgtctcctcttctgaccgggacagagtcaccatttgatttggaacagcagtggcaagatctcatgtccatcatggaaatgcaggccatggaagtgaacacatcagcaagtgaaatcctgtacagtgcccctcctggagacccactgagcaccaactacagccttgcccccaacactcccatcaatcagaatgtcagcctgcatcaggcgtccctggggggctgcagccaggacttcttactcttcagccccgaggtggaaagcctgcctgtggccagtagctccacgctgctcccgttggcccccagcaattctaccagcctcaactccaccttcggctccaccaacctgacagggctcttctttccaccccagctcaatggcacagccaatgacacagcaggcccagagctgcctgaccctttggggggtctgttagatgaagctatgttggatgagatcagccttatggacctggccattgaagaaggctttaaccctgtgcaggcctcccagctggaggaggaatttgactctgactcaggcctttccttagactcgagccatagcccttcttccctaagcagctctgaaggcagttcttcctcttcttcctcctcctcttcctcttcttcctctgcttcttcctctgcctcttcctccttttctgaggaaggtgcggttggctacagctctgactctgagaccctggatctggaagaggccgagggtgctgtgggctaccagcctgagtattccaagttctgccgcatgagctaccaggatccagctcagctctcatgcctgccctacctggagcacgtgggccacaaccacacatacaacatggcacccagtgccctggactcagccgacctgccaccacccagtgccctcaagaaaggcagcaaggagaagcaggctgacttcctggacaagcagatgagccgggatgagcaccgagcccgagccatgaagatccctttcaccaatgacaaaatcatcaacctgcctgtggaggagttcaatgaactgctgtccaaataccagttgagtgaagcccagctgagcctcatccgagacatccggcgccggggcaagaacaagatggcggcgcagaactgccgcaagcgcaagctggacaccatcctgaatctggagcgtgatgtggaggacctgcagcgtgacaaagcccggctgctgcgggagaaagtggagttcctgcgctccctgcgacagatgaagcagaaggtccagagcctgtaccaggaggtgtttgggcggctgcgagatgagaacggacgaccctactcgcccagtcagtatgcgctccagtacgccggggacggcagtgtcctcctcatcccccgcacgatggccgaccagcaggcccggcggcaggagaggaagccaaaggaccggagaaagtgagcctggggaagaagggggtttgaagcccaccaagaccgaaactggagaagggctggacctggacctggacctggacctacagcggggacttaaatgccttcttatccaatatatcttctcagatgggatgactgcgggtcagtgtacaggaagaggcaggcactggctggctcagctccactcgggtggagtggaagtggccagaccatttagacggacagggtcctcaccctacccctttcctgtgaggcaggggtggtggtggagttgctggaggtagaggagctatgtggagcaaaggccgacagaggggaaggaatggacctgtgagaggaagggaaggtggcagaaagtctcatttcaggaaggagggatagaaggaaggaaggaaggaacccccccccccccgaaaaaaaaatcaaagcgggaagaaaatcagagggaaggttaaggttggctctggccaggattccaggcagcaggttggagtgactggtgggcctagatcactggtgtgataaaccccaattttcaccccggggggggtggggtacacagacacagggtgggggtggggagggacggtgttaactctttctgctccttgcattttgacatccctgaaggggagctcttggatatcattggccatgtttcaatcgaatggagccactgggccccaacactggctttgagatttagagtcaaagggtagagtgaacaggaaagggtcacgtggtcccatgttgcaacagccccaacatcacgcatgtcattcactgccttgccactccatctccctccgtgctccagccacccctgagctgaggctcccattgtctccatcagagcctgcatgtgtatgccgtcctcccctggtccggtgtttgtgttccccacccctcacagactgcctgagctcttctgtaagctggggtagggtgatggcagtgctccgggaactgggcctgcagccttcctcttctgggactgctgtgaggcagaggaatgatggagaatctagtgtagcagcctccaggcaggattcagcacaacactggggagtcacccttccctcgggcctctgcctaccaacaactgggcttatcactgggaaaacacaaaaaattacacaacccagcaacaacaaaagaactagtcctcttagaatttcttgcgctttgatttttttagggcttgtgccctgtttcacttatagggtctagaatgcttgtgttgagtaaaaaggagatgcccaatattcaaagctgctaaatgttctctttgccataaagactccgtgtaactgtgtgaacacttgggatttttctcctctgtcccgaggtcgtcgtctgctttcttttttgggtttctttctagaagattgagaagtgcatatgacaggctgagagcacctccccaaacacacaagctctcagccacaggcagcttctccacagccccagcttcgcacaggctcctggagggctgcctgggggaggcagacatgggagtgccaaggtggccagatggttccaggactacaatgtctttatttttaactgtttgccactgctgccctcacccctgcccggctctggagtaccgtctgccccagacaagtgggagtgaaatgggggtggggggaagcactgattcccagttagggggtgcctaactgagcagtagggatagaaggtgtgaacctgggagtgcttttataaattattttccttgtagattttatttttaatttatctctgtgacctgccagggagaggggagagagagagagatgctgttgagcacatgacaaaataaaataaaatggatgattcattcttaagtgcactttttccccactttgaatttaaattgagaataaaggaaatggactcattgtaaaaaaaaaaaaaaaaaa

SEQ ID NO: 136182 - DNA, 2319 bp, Artificial Sequence
  derived and/or modified sequence
atgctgagcctgaagaagtatctaaccgagggattactgcagttcactatcttactgagcttaataggtgtgagggtggatgtggatacttatctcaccagtcagctgcctcccctgcgggagattatcctcgggccatctagcgcctacacccagacccagtttcacaatctccgcaacactctggacggttatgggatacacccaaaatccattgatctggataactactttaccgcccggcgacttctcagccaagtaagggctttggacagattccaggtccctactaccgaagtaaacgcttggctcgtgcatagagatccggaagggagtgtttccggctctcagcccaatagtggactggctctggagtccagtagtggtttgcaagacgttacaggcccagataacggcgtccgggagtctgagacggagcagggttttggtgaggatctcgaggacctgggggctgtagctcctcccgtgtcaggagacctaactaaagaggatattgatctgatcgacatcctgtggaggcaggatattgacctcggcgcagggagagaggtgtttgactatagccataggcaaaaagagcaggatgtcgaaaaggagctcagagacggaggggagcaggatacttgggctggggagggcgcagaagccctcgcacgcaacctgctggtcgacggcgagaccggcgagagttttcctgcccaggtgcctagtggcgaggaccagacggcccttagcctagaggaatgcctccggctactggaagccacctgcccttttggtgaaaatgcagagttcccggccgacatctctagtatcacagaggcagttcccagcgaaagcgagccaccggccctgcagaacaaccttctgagtcctctgcttactggtaccgagtccccgtttgaccttgaacagcagtggcaggacctcatgagcataatggagatgcaggcaatggaggtgaacaccagcgcctctgaaattctctacagtgctcctccaggagacccattgtccaccaactatagcctcgctccaaacacacccataaatcagaatgtgtccttgcatcaagcctccctgggtgggtgcagccaggatttcctgttattcagccccgaagtagaatccttaccagtggccagttccagcacactgttgccactggccccatctaattcaacttcactgaattcaactttcggaagtaccaacctcaccgggttattctttcctccacagctgaacgggaccgcaaatgacactgcaggccccgaactgccagatcccctcggtgggctgcttgatgaggctatgttggatgagatatcactgatggacttggccattgaggaaggttttaatccagtgcaggcatcccaattggaagaggaattcgacagcgacagcggattatcactcgattcaagccactctccctctagtctgagcagtagtgagggctctagtagttcctcaagttccagttcctcctcatctagcagtgctagtagctctgcgtctagtagttttagcgaggagggggcagttggatacagcagcgactctgagacactggaccttgaagaagctgaaggagccgtgggataccaacccgagtattctaagttctgccgtatgagttaccaggaccccgcccagctatcctgtttaccttatctggagcacgttggtcacaaccacacttacaatatggcgccgtcagccctggattcagccgacttacctccaccttctgctctgaagaagggttcaaaggaaaagcaggccgacttcctggacaaacagatgagtagggatgaacaccgagccagagcgatgaagattccctttaccaatgataagataatcaacttgccggtggaagagttcaacgagctcctgtcaaagtaccagctctctgaggcccagttgtcattaattcgcgacattcggagacggggcaagaataagatggccgctcagaactgtcggaagagaaagctcgataccatcttaaacctggagagggatgtggaagatttgcagcgggacaaggctcggttactgcgggagaaagtggagtttctgcgcagcttgaggcaaatgaagcagaaggttcaatccctgtaccaggaggtgttcggaaggctcagagatgagaatggcagaccttattctcctagtcaatacgcgttacaatacgcgggggatgggtccgtgctcctgataccacgaaccatggcggaccagcaggccagacgccaggagcggaagcctaaagacagaagaaaatag

SEQ ID NO: 136183 - DNA, 2376 bp, Artificial Sequence
  derived and/or modified sequence
tttgtgttctggaaaattttaaagaccaagaagcacaagcatagcgggcctagcgctatgttaagtctaaaaaaatatctgactgaggggttgctgcagttcacgatactactatcattgattggcgtacgggtggatgtggatacatatcttacctcccagctgccaccattgcgagagatcattctcgggccctccagtgcctatacccagacccaattccacaatcttagaaacactcttgatgggtacgggattcatcctaaatctatcgatctggacaactactttacagcccggaggttgctcagtcaggtacgcgctttagaccgcttccaggtcccaaccacagaggtcaatgcctggttggtgcatagggatccggagggctcagtttcggggagccagcctaactcagggttagctcttgagagctccagcgggctgcaggatgttactgggcctgacaatggggtgcgcgaatcggagactgagcaaggctttggtgaggatctcgaggatctgggcgctgtggccccccccgtctccggagatctgactaaagaagacatagatctcattgacatcctatggagacaggatattgatctgggtgcaggcagagaggtgttcgactattcccatcggcagaaggagcaggacgtagagaaagaactgagagacggaggtgagcaggacacgtgggctggcgagggggccgaggccctcgccagaaacttgttagtcgacggcgagaccggggaaagcttccccgcgcaggtcccctccggggaagaccagactgcgttgtcgttggaggaatgcttgagactactcgaggcgacttgtccgttcggcgaaaatgctgagttccctgccgatatctcgtctatcactgaggccgtcccatctgaaagtgagccaccagcgcttcaaaataatcttctctcacctcttcttaccggaaccgagtcgccttttgatctcgaacagcagtggcaagatttgatgtccattatggaaatgcaggctatggaggttaacacctcagctagcgagattctgtacagcgcccctccaggcgatcccctttcgaccaactactcattggccccgaatacaccaataaaccagaacgtgagcctgcatcaggcttccttgggcggctgcagccaagacttcctgctgttctccccagaagttgagagcttgccagtggcctcatcttccaccctcttgcctctggcaccatccaacagtaccagtctcaactccacttttgggtccacaaatctgacgggccttttttttccaccacagctcaacggaaccgcaaacgacactgcaggtcccgaactgcccgatcccctgggagggctacttgacgaggctatgctggatgagatttccctgatggaccttgctatcgaggaggggttcaaccccgtgcaggcaagtcagctggaagaggagttcgacagtgatagtggactctcgctcgattctagccactctccgtcgtccctgtcctccagtgaaggcagctccagtagcagttcgagctcatcttcatccagtagcagcgccagcagctctgctagttcttcgttttctgaggaaggtgctgtaggctactcaagtgactctgaaacattggatttggaagaagccgagggcgctgtcgggtatcagcccgagtattccaaattttgtcggatgagttatcaggatcctgctcagttgtcctgtctgccatacctagagcacgtgggtcataatcacacttataacatggcaccctctgccctggattctgccgacctgccccccccctctgccttgaagaaaggcagtaaagagaagcaagcagacttcttagataaacaaatgtcccgcgacgaacaccgcgcgagagcaatgaagatcccattcactaacgacaaaatcattaatctgcctgtcgaggaattcaacgaacttttgtccaagtatcagctcagtgaggcccagttgtcgttgatccgtgatattagaaggagaggcaagaataaaatggcagcacagaactgtcggaaacggaaactcgataccattctgaacctcgagagagatgtggaggatcttcaaagagacaaggccaggctgctgcgtgagaaggtcgaattcctgcggagcctgcgccaaatgaagcaaaaggtgcaatccctgtatcaggaggtgtttgggagactgcgcgatgagaacggccgaccttactccccaagccagtatgccctgcagtacgcaggcgacggctcagtccttctaatcccgagaacgatggccgatcaacaggctcgacgacaggagagaaagcctaaggacaggaggaaatag

SEQ ID NO: 136184 - DNA, 2319 bp, Artificial Sequence
  derived and/or modified sequence
atgctgagcctgaagaagtacctgacagagggcctgctgcagttcaccatcctgctgagcctcatcggcgtgcgggtggatgtggacacctacctgaccagccagctgccccccctgcgggagatcatcctgggccccagcagcgcctacacccagacccagttccacaacctgaggaacaccctggatggctacggcatccaccccaagagcattgacctggacaactacttcaccgcccggcggctgctgagccaggtgcgggccctggaccgcttccaggtgcccaccacagaggtgaatgcctggctggtgcaccgggaccctgagggctctgtgtctggcagccagcccaacagcggcctggccctggagagcagcagcggcctgcaggatgtgacaggccctgacaacggggtgcgggagagcgagacagagcagggctttggagaggacctggaggacctgggcgctgtggcccctcctgtgtctggggacctgaccaaggaggacatcgacctgattgacatcctgtggaggcaggacatcgacctgggcgccggccgggaggtgtttgactacagccaccggcagaaggagcaggatgtggagaaggagctgagagatggaggagagcaggacacctgggccggggagggcgctgaggccctggccaggaacctgctggtggatggagagaccggggagagcttccctgcccaggtgcccagcggggaggaccagacagccctgagcctggaggagtgcctgcggctgctggaggccacctgcccctttggagaaaatgctgagttccctgctgacatcagcagcatcacagaggccgtgcccagcgagagcgagcccccagccctgcagaacaacctgctgagccccctgctgaccggcacagagagcccctttgacctggagcagcagtggcaggacctgatgagcatcatggagatgcaggccatggaggtgaacaccagcgccagcgagatcctgtacagcgcccctcctggggaccccctgagcaccaactacagcctggcccccaacacccccatcaaccagaatgtgtccctgcaccaggccagcctgggcggctgcagccaggacttcctgctcttcagccctgaggtggagagcctgcctgtggccagcagcagcaccctgctgcccctggcccccagcaacagcaccagcctgaacagcaccttcggcagcaccaacctgaccggcctcttcttccccccccagctgaatggaacagccaatgacacagctggccctgagctgcctgaccccctgggcggcctgctggatgaggccatgctggatgagatcagcctgatggacctggccatcgaggagggcttcaaccctgtgcaggccagccagctggaggaggagtttgacagcgacagcggcctgagcctggacagcagccacagccccagcagcctgagcagcagcgagggcagcagcagcagcagcagcagcagcagcagcagcagcagcagcgccagcagcagcgccagcagcagcttcagcgaggagggcgctgtgggctacagcagtgacagcgagaccctggacctggaggaggccgagggcgctgtgggctaccagcctgagtacagcaagttctgcaggatgagctaccaggaccctgcccagctgagctgcctgccctacctggagcacgtgggccacaaccacacctacaacatggcccccagcgccctggacagcgctgacctgcccccaccttctgccctgaagaagggcagcaaggagaagcaggccgacttcctggacaagcagatgagcagagatgagcaccgggcccgggccatgaagatccccttcaccaatgacaagatcatcaacctgcctgtggaggagttcaatgagctgctgagcaagtaccagctgtctgaggcccagctgagcctcatccgggacatcagaagaagaggcaagaacaagatggccgcccagaactgcaggaagaggaagctggacaccatcctgaacctggagagagatgtggaggacctgcagagggacaaggcccggctgctgcgggagaaggtggagttcctgcggagcctgcggcagatgaagcagaaggtgcagagcctgtaccaggaggtgtttggccgcctgagagatgaaaatggccggccctacagccccagccagtatgccctgcagtatgctggagatggctctgtgctgctgatccccaggaccatggctgaccagcaggcccggcggcaggagaggaagcccaaggacaggaggaagtag

SEQ ID NO: 136185 - DNA, 2376 bp, Artificial Sequence
  derived and/or modified sequence
tttgtgttctggaagatcctgaagaccaagaagcacaagcacagcggccccagcgccatgctgagcctgaagaagtacctgacagagggcctgctgcagttcaccatcctgctgagcctgattggagtgcgggtggatgtggacacctacctgaccagccagctgccccccctgcgggagatcatcctgggccccagcagcgcctacacccagacccagttccacaacctgaggaacaccctggatggctacggcatccaccccaagagcattgacctggacaactacttcaccgcccggcggctgctgagccaggtgcgggccctggaccgcttccaggtgcccaccacagaggtgaatgcctggctggtgcaccgggaccctgagggctctgtgtctggcagccagcccaacagcggcctggccctggagagcagcagcggcctgcaggatgtgactggaccagacaatggagtgcgggagagcgagacagagcagggctttggagaggacctggaggacctgggcgctgtggcccctcctgtgtctggggacctgaccaaggaggacatcgacctgattgacatcctgtggaggcaggacatcgacctgggcgccggccgggaggtgtttgactacagccaccggcagaaggagcaggatgtggagaaggagctgagagatggaggagagcaggacacctgggccggggagggcgctgaggccctggccaggaacctgctggtggatggagaaacaggagagagcttccctgcccaggtgcccagcggggaggaccagacagccctgagcctggaggagtgcctgcggctgctggaggccacctgcccctttggagaaaatgctgagttccctgctgacatcagcagcatcacagaagctgtgcccagcgagagcgagcccccagccctgcagaacaacctgctgagccccctgctgactggaacagagagcccctttgacctggagcagcagtggcaggacctgatgagcatcatggagatgcaggccatggaggtgaacaccagcgccagcgagatcctgtacagcgcccctcctggggaccccctgagcaccaactacagcctggcccccaacacccccatcaaccagaatgtgtccctgcaccaggccagcctgggcggctgcagccaggacttcctgctcttcagccctgaggtggagagcctgcctgtggccagcagcagcaccctgctgcccctggcccccagcaacagcaccagcctgaacagcaccttcggcagcaccaacctgaccggcctcttcttccccccccagctgaatggaacagccaatgacacagctggccctgagctgcctgaccccctgggcggcctgctggatgaggccatgctggatgagatcagcctgatggacctggccatcgaggagggcttcaaccctgtgcaggccagccagctggaggaggagtttgacagcgacagcggcctgagcctggacagcagccacagccccagcagcctgagcagcagcgagggcagcagcagcagcagcagcagcagcagcagcagcagcagcagcgccagcagcagcgccagcagcagcttcagcgaggagggcgctgtgggctacagcagtgacagcgagaccctggacctggaggaggccgagggcgctgtgggctaccagcctgagtacagcaagttctgcaggatgagctaccaggaccctgcccagctgagctgcctgccctacctggagcacgtgggccacaaccacacctacaacatggcccccagcgccctggacagcgctgacctgcccccacccagcgccctgaagaagggcagcaaggagaagcaggccgacttcctggacaagcagatgagcagagatgagcaccgggcccgggccatgaagatccccttcaccaatgacaagatcatcaacctgcctgtggaggagttcaatgagctgctgagcaagtaccagctgtctgaggcccagctgagcctcatccgggacatcagaagaagaggcaagaacaagatggccgcccagaactgcaggaagaggaagctggacaccatcctgaacctggagagagatgtggaggacctgcagagggacaaggcccggctgctgcgggagaaggtggagttcctgcggagcctgcggcagatgaagcagaaggtgcagagcctgtaccaggaggtgtttggccgcctgagagatgaaaatggccggccctacagccccagccagtatgccctgcagtatgctggagatggctctgtgctgctgatccccaggaccatggctgaccagcaggcccggcggcaggagaggaagcccaaggacaggaggaagtag

SEQ ID NO: 136186 - DNA, 2319 bp, Artificial Sequence
  derived and/or modified sequence
atgctgagcctgaagaagtacctgaccgagggcctgctgcagttcaccattctcctctccttgatcggagtgcgagtggatgtcgatacttacctcaccagtcagctgcccccgctgcgcgaaatcattttgggcccctcaagcgcctacacacagacccagtttcacaacctgagaaacaccttagatggatacggcatccaccccaagagtattgacctggacaattacttcaccgcgcggcgcctactgtctcaggtgagggctctggaccgattccaagtccccacaacggaggtaaacgcgtggctggtccacagagatcctgaaggctctgtgtccggtagccagcccaatagcggactggcactagagagcagctctggactgcaggatgtgaccgggccagacaatggagtgcgcgaaagcgagacagaacagggctttggagaggatctcgaggatctgggcgcggtcgcacctcccgtgtccggtgatttgacaaaagaggatatcgacctgatcgatattttgtggagacaggacatcgacctaggtgctggaagggaggtgttcgactatagtcacaggcagaaggaacaggacgtagaaaaggagctgagagacggcggagagcaagacacatgggcgggagagggcgcagaagccctggcacggaacttattggtcgatggtgaaacaggtgagtcattcccagcccaggttccttctggcgaggatcagaccgccctaagcctcgaagagtgcctccgcctgttggaagcaacatgccccttcggcgagaacgctgaattccccgctgatatctcttctatcacggaggctgtgcctagcgagtcagagccccccgctctacagaataacctgttgagtccactgctgaccggcactgaaagcccttttgacttagaacagcagtggcaagacctcatgagtataatggaaatgcaggccatggaggtgaatacctccgcctcagagattctttactctgcacccccaggagaccctctgagtacgaactactcattggccccaaacactccaatcaatcagaatgtctctctgcatcaggcaagtcttggcggttgttctcaggacttcctcctcttttcccccgaggtcgaatcactgcctgtcgctagctcctcaacattactgcccctggctccttcaaattccaccagcctgaatagtacattcggatccaccaatcttactggattgttctttcccccccagttgaacggaactgccaatgacactgctgggcctgaacttcccgaccccttggggggactgctggatgaagcaatgttggacgagatctctctgatggatctagcgattgaggagggcttcaatcctgtccaagctagccagctggaggaggaatttgatagcgactctgggctgtccctcgattccagccactcacccagttccctgtcctcatcggaaggttcatcttcaagctcatcttcctcatcgagctcatcatcctctgcctccagttcagcaagctcatctttcagtgaggagggagcagtggggtactcttcagattctgaaacccttgatttagaagaggccgaaggagctgttggctaccagccagagtactcaaagttctgtcggatgtcctaccaggatcctgcgcagctgtcctgtcttccctatctggagcatgtaggccataaccatacatataatatggcaccttctgctctggatagcgctgatcttccaccacccagtgcgctgaagaaggggtcaaaagagaaacaggcagatttcctcgacaagcagatgagccgcgacgaacacagggcacgcgccatgaagataccattcaccaacgataagataattaaccttccagtagaagagttcaatgagttacttagtaagtatcagctgtccgaagcccaactctctctcattagagatataaggcggcgcggcaaaaacaagatggcggcccaaaactgcaggaaacggaagctcgacacaatactgaacctggagcgggatgtcgaggatctgcaaagagacaaagcaagactgcttcgtgagaaagtggagttcttgcgttctctgcgtcagatgaagcagaaagtgcaatctttgtatcaggaggtctttggtcggttgagggacgagaatggaaggccatactcaccatcccaatatgccctgcagtatgcgggtgacggctctgtcctccttatccccagaacaatggctgaccagcaggcacgacgccaggaaaggaagcccaaggatagacgcaaatag

SEQ ID NO: 136187 - DNA, 2376 bp, Artificial Sequence
  derived and/or modified sequence
ttcgtgttctggaagatcctgaagaccaagaagcacaagcacagcggaccgagtgccatgctcagtctgaagaaatacctcaccgaagggctccttcagtttactatactgctgtcacttattggagttcgcgttgacgtagacacttatttgacttctcagctacctccgctcagggaaatcatactaggcccgtccagcgcctatacccaaacccagtttcacaatctgaggaatactctagatggctacggtatccaccctaagagcatagacctggacaattactttacagccagaagactactttcccaggtccgtgctctggataggttccaagtgcccaccacagaggttaatgcttggctggtgcacagggacccagaaggatccgttagcggcagccagccaaactccggactagctctggaaagttcctctgggctacaggatgtgacgggtcctgataacggcgtgcgagagtccgaaacagaacagggatttggagaagacctggaggacctgggggcagttgcaccaccggtttctggagacctcactaaggaagatatcgatttaatcgacatcctctggaggcaggatattgacctgggcgccggaagggaggtgtttgattactcccataggcagaaagaacaggacgtagaaaaggaacttagggatggaggtgaacaggacacttgggctggagagggcgcagaggccctcgccagaaaccttctggtcgacggagagaccggcgagagtttcccggcacaggtgccctctggcgaggaccagactgccctgagtcttgaagagtgtctgcgcctgctcgaagctacttgtccgttcggtgagaacgcagaattcccagctgacatcagttcaattactgaagccgtaccatccgaatctgagcccccagccctccagaacaatctcctgtcccccctgctgacaggaacagagtcaccgtttgaccttgaacagcagtggcaggatttgatgtctatcatggaaatgcaggcaatggaagtaaatactagtgcctcggaaatcctatactccgccccaccgggcgacccattgtctacaaactacagtttggcacctaatacccctattaatcaaaacgtgtcccttcatcaagcctcgctgggtggctgcagtcaggacttcctgctgttctcacctgaagtggagagcctgcccgtcgcgtctagctccaccttgttacccctggccccttctaatagcactagcttaaattccacttttgggagcactaatctgactgggctcttttttccaccccagctcaatggaactgccaacgacacagccgggcctgaacttcctgatcccttggggggcctactggatgaagccatgctggacgagatttctctgatggacctggctatcgaagaaggcttcaatcccgtgcaggcctctcagcttgaagaggagtttgatagcgatagcggtttgtcactcgacagctctcattcaccaagctccctcagctcatccgaggggtcgtccagttccagcagttcatcgtctagttcctcatcatcggcttcatccagtgctagcagcagtttcagcgaggagggcgcggtcggatacagcagtgattccgaaacactggatttagaggaagcagagggagccgttggctaccagccagagtatagcaaattctgccgaatgagttatcaggatccagcccagctgtcctgcctcccctacttagaacatgtgggccataaccacacttataacatggctccatccgctttggactctgccgatctgccgcccccatctgcccttaagaaggggagcaaagaaaagcaggccgattttcttgacaaacagatgtctcgagatgagcacagagcaagagccatgaaaatcccatttaccaacgataaaattatcaacctacctgttgaagagttcaacgaattgttgtcgaagtaccagctgtcagaagctcagctctctttgattcgcgatatccggcggaggggtaagaacaaaatggcggcccagaactgccgaaaacgcaagcttgataccatcctgaatctggaacgtgatgtggaggacctacagagggacaaagctcgcttgctccgagagaaggtcgaattcttacgaagtctgcgccaaatgaagcagaaagtgcagtctctgtatcaagaagtgtttgggcggctgcgcgacgagaacggaaggccgtatagccctagccagtatgccctgcagtatgccggagacggcagtgtgctgctgatcccacgcaccatggcagaccagcaggcccggcggcaagaaagaaagcccaaggaccggagaaaatag

SEQ ID NO: 136188 - DNA, 4873 bp, Artificial Sequence
  derived and/or modified sequence
tttccgagtgcggtagcaggagggggcggggaggtaagcggaggctccgagctctaggccggccggcggtggcggcggcgaggccgggactcgggcttagggcctgctgtggaggcagcggcggacgccgagctaagcagtttctctggaaacccccctggtaagtgtggaggaggcgggacactctgacccaagacgaaaggcctgtagctccagccaaagaaaataaaccttaggagggagaaggaaaaaaaaaatccatcagctgttcctgagaacagcctgcattggaatctacagagaggacaactaatgtgagtgaggaagtgactgtatgtggactgtggagaaagtaagtcacgtgggcccttgaggacctggactgggttaggaacagttgtactttcagaggtgaggtgtcgagaagggaaagtgaatgtggtctggagtgtgtccttggccttggctccacagggtgtgctttcctctggggccgtcagggagctcatcccttgtgttctgccagggtggggtacggggtttgacactgaggagggtaacctgctggctggagcggcagagcagtggccttgatttgtcttttggaagattttaaaaaccaaaaagcataaacattctggtccttcagcaatgctttctctgaagaaatacttaacggaaggacttctccagttcaccattctgctgagtttgattggggtacgggtggacgtggatacttacctgacctcacagcttcccccactccgggagatcatcctggggcccagttctgcctatactcagacccagttccacaacctgaggaataccttggatggctatggtatccaccccaagagcatagacctggacaattacttcactgcccggcggctcctcagtcaggtgagggccctggacaggttccaggtgccaaccactgaggtaaatgcctggctggttcaccgagacccagaggggtctgtctctggcagtcagcccaactcaggcctcgccctcgagagttccagtggcctccaagatgtgacaggcccagacaacggggtgcgagaaagcgaaacggagcagggattcggtgaagatttggaggatttgggggctgtagcccccccagtcagtggagacttaaccaaagaggacatagatctgattgacatcctttggcgacaggatattgatctgggggctgggcgtgaggtttttgactatagtcaccgccagaaggagcaggatgtggagaaggagctgcgagatggaggcgagcaggacacctgggcaggcgagggcgcggaagctctggcacggaacctgctagtggatggagagactggggagagcttccctgcacaggtgcctagtggggaggaccagacggccctgtccctggaagagtgccttaggctgctggaagccacctgcccctttggggagaatgctgagtttccagcagacatttccagcataacagaagcagtgcctagtgagagtgagccccctgctcttcaaaacaacctcttgtctcctcttctgaccgggacagagtcaccatttgatttggaacagcagtggcaagatctcatgtccatcatggaaatgcaggccatggaagtgaacacatcagcaagtgaaatcctgtacagtgcccctcctggagacccactgagcaccaactacagccttgcccccaacactcccatcaatcagaatgtcagcctgcatcaggcgtccctggggggctgcagccaggacttcttactcttcagccccgaggtggaaagcctgcctgtggccagtagctccacgctgctcccgttggcccccagcaattctaccagcctcaactccaccttcggctccaccaacctgacagggctcttctttccaccccagctcaatggcacagccaatgacacagcaggcccagagctgcctgaccctttggggggtctgttagatgaagctatgttggatgagatcagccttatggacctggccattgaagaaggctttaaccctgtgcaggcctcccagctggaggaggaatttgactctgactcaggcctttccttagactcgagccatagcccttcttccctaagcagctctgaaggcagttcttcctcttcttcctcctcctcttcctcttcttcctctgcttcttcctctgcctcttcctccttttctgaggaaggtgcggttggctacagctctgactctgagaccctggatctggaagaggccgagggtgctgtgggctaccagcctgagtattccaagttctgccgcatgagctaccaggatccagctcagctctcatgcctgccctacctggagcacgtgggccacaaccacacatacaacatggcacccagtgccctggactcagccgacctgccaccacccagtgccctcaagaaaggcagcaaggagaagcaggctgacttcctggacaagcagatgagccgggatgagcaccgagcccgagccatgaagatccctttcaccaatgacaaaatcatcaacctgcctgtggaggagttcaatgaactgctgtccaaataccagttgagtgaagcccagctgagcctcatccgagacatccggcgccggggcaagaacaagatggcggcgcagaactgccgcaagcgcaagctggacaccatcctgaatctggagcgtgatgtggaggacctgcagcgtgacaaagcccggctgctgcgggagaaagtggagttcctgcgctccctgcgacagatgaagcagaaggtccagagcctgtaccaggaggtgtttgggcggctgcgagatgagaacggacgaccctactcgcccagtcagtatgcgctccagtacgccggggacggcagtgtcctcctcatcccccgcacgatggccgaccagcaggcccggcggcaggagaggaagccaaaggaccggagaaagtgagcctggggaagaagggggtttgaagcccaccaagaccgaaactggagaagggctggacctggacctggacctggacctacagcggggacttaaatgccttcttatccaatatatcttctcagatgggatgactgcgggtcagtgtacaggaagaggcaggcactggctggctcagctccactcgggtggagtggaagtggccagaccatttagacggacagggtcctcaccctacccctttcctgtgaggcaggggtggtggtggagttgctggaggtagaggagctatgtggagcaaaggccgacagaggggaaggaatggacctgtgagaggaagggaaggtggcagaaagtctcatttcaggaaggagggatagaaggaaggaaggaaggaacccccccccccccgaaaaaaaaatcaaagcgggaagaaaatcagagggaaggttaaggttggctctggccaggattccaggcagcaggttggagtgactggtgggcctagatcactggtgtgataaaccccaattttcaccccggggggggtggggtacacagacacagggtgggggtggggagggacggtgttaactctttctgctccttgcattttgacatccctgaaggggagctcttggatatcattggccatgtttcaatcgaatggagccactgggccccaacactggctttgagatttagagtcaaagggtagagtgaacaggaaagggtcacgtggtcccatgttgcaacagccccaacatcacgcatgtcattcactgccttgccactccatctccctccgtgctccagccacccctgagctgaggctcccattgtctccatcagagcctgcatgtgtatgccgtcctcccctggtccggtgtttgtgttccccacccctcacagactgcctgagctcttctgtaagctggggtagggtgatggcagtgctccgggaactgggcctgcagccttcctcttctgggactgctgtgaggcagaggaatgatggagaatctagtgtagcagcctccaggcaggattcagcacaacactggggagtcacccttccctcgggcctctgcctaccaacaactgggcttatcactgggaaaacacaaaaaattacacaacccagcaacaacaaaagaactagtcctcttagaatttcttgcgctttgatttttttagggcttgtgccctgtttcacttatagggtctagaatgcttgtgttgagtaaaaaggagatgcccaatattcaaagctgctaaatgttctctttgccataaagactccgtgtaactgtgtgaacacttgggatttttctcctctgtcccgaggtcgtcgtctgctttcttttttgggtttctttctagaagattgagaagtgcatatgacaggctgagagcacctccccaaacacacaagctctcagccacaggcagcttctccacagccccagcttcgcacaggctcctggagggctgcctgggggaggcagacatgggagtgccaaggtggccagatggttccaggactacaatgtctttatttttaactgtttgccactgctgccctcacccctgcccggctctggagtaccgtctgccccagacaagtgggagtgaaatgggggtggggggaagcactgattcccagttagggggtgcctaactgagcagtagggatagaaggtgtgaacctgggagtgcttttataaattattttccttgtagattttatttttaatttatctctgtgacctgccagggagaggggagagagagagagatgctgttgagcacatgacaaaataaaataaaatggatgattcattcttaagtgcactttttccccactttgaatttaaattgagaataaaggaaatggactcattgt

SEQ ID NO: 136189 - DNA, 2319 bp, Artificial Sequence
  derived and/or modified sequence
atgctcagccttaagaaatatttgaccgaaggactactgcaattcacaatactgctgagtttaatcggggtgcgggtagacgtggatacgtatctcacatcacagcttccgcctttgcgcgagattatccttgggccaagtagcgcatacactcagacccagttccataatttgcggaacacactggatgggtacggtattcaccccaagtcaatagatctagataattattttacggccagacgactgctctcccaggtgcgggcactggatcgattccaagtgcctacaacagaggtcaacgcctggctggtgcaccgagatcccgaggggtccgtaagcggcagccagcctaactctggactggccttggagtcgtctagcgggctgcaggacgtgacagggcctgacaacggggtgagggagtcagagaccgagcaaggctttggtgaagatctggaggaccttggcgcagtagccccaccagtgagtggtgatctgactaaggaagatatcgacctgatagatattctgtggcgacaggatattgatttgggagccggaagggaagtgttcgattactcgcaccgccaaaaggagcaggatgtcgagaaagaactaagggacggaggggagcaggatacctgggcaggggagggggctgaagcactggctcggaacctcttggtcgatggcgaaacaggagaaagtttccccgctcaagtgccgtctggtgaagaccagaccgccctgagcctggaagagtgcctgaggttactggaagcaacttgcccttttggagaaaacgccgagttccctgcggatatcagttccattacggaggcggtgccgtccgaaagcgagccgccagcactacagaacaatctgctgtcgccactcctgaccggtacagaaagccccttcgacttggagcagcagtggcaggacttgatgtccatcatggagatgcaagccatggaagtgaatacttccgcaagcgaaatcctctattcagccccaccgggtgacccgctgtctacgaactatagcctagcacccaacactccaattaaccaaaacgtcagcctgcaccaggcctccctcggagggtgtagccaggatttcctactttttagtcctgaggtggaatcactgccagtcgctagctcctctactctactgccgctggccccatcgaacagcaccagcttgaattccacctttgggtctaccaatctaacgggtttattcttcccgccacagctgaacggcaccgctaatgatactgctgggccagagctccctgatcccctagggggattactcgatgaggcaatgctggacgagattagcctgatggacttggccattgaggaaggcttcaaccctgtgcaggcctcacagcttgaagaagagtttgattcggattccgggcttagtctcgattccagccattctccaagtagcctttcttcttccgaaggcagcagttccagtagctcatcatcttcctccagctcaagctctgcctcatcatcagcttccagtagcttctcagaagagggagctgtggggtatagttccgactccgagacacttgacttagaggaagcagagggggcagtcgggtaccagcctgaatacagcaagttctgtagaatgagctatcaggacccagcccaactctcgtgcctgccttaccttgaacatgtgggccataaccatacttataacatggcaccgagcgctttagattctgcagacctgccgcctccttctgcccttaaaaagggaagcaaagaaaaacaggctgattttctggacaagcaaatgagccgcgatgagcatagggccagagctatgaagattccgtttaccaacgataagatcattaatcttccggtggaggagttcaatgaactgctctctaagtaccagcttagtgaggcacagttgtccctaatccgggacattcggaggcgcggtaaaaacaagatggccgcacaaaattgccggaaaagaaagctggataccattctgaacctggaacgcgatgtggaggatctccaacgggataaggcaagattactccgggagaaagtcgaatttttaaggtccctccggcaaatgaaacagaaagtccagagcctctaccaagaagtcttcgggagactgagagacgagaacggcagaccttacagccctagccagtacgcactacagtacgctggagacggctctgtcctcctgatccccagaacgatggctgatcagcaggcaagacgacaagagcgaaagccaaaagatagaagaaaatag

SEQ ID NO: 136190 - DNA, 2376 bp, Artificial Sequence
  derived and/or modified sequence
tttgtcttctggaagattctgaaaaccaaaaagcacaaacactctgggccatccgcgatgctttcattgaaaaagtacctgacagaaggcctcctgcagttcaccatcctgctttctctgattggggtccgcgtggacgtggatacttatctcacttcccagctgccacctttgcgggaaattatccttggaccctcgtccgcctatacccagacacagtttcacaacctgcgcaacacacttgacggttatggcatccaccccaaatcaatcgacctcgataactacttcaccgcgaggcgtctgctgagtcaggtgcgggctcttgatagattccaggttcctaccaccgaggtgaatgcctggctggtgcatcgggaccccgaggggtcagtgtcaggctctcaacccaattcaggtctcgccctcgaaagttcgagcggtctgcaggatgtcaccggcccagacaacggtgtgagggaaagtgagaccgaacagggcttcggcgaggacctcgaggacctgggcgcagtagccccaccggtttccggagacctgacgaaagaggatatcgatctcattgatattctgtggagacaggatatcgatcttggcgctgggcgagaggtgtttgactactcccatagacagaaggaacaagacgtggaaaaggaactcagagatgggggagagcaagatacttgggccggtgagggagcggaggccctggctaggaacctgttagtcgatggggagactggcgaaagttttccggctcaagtgccttcaggcgaggatcagaccgcgctgagccttgaagagtgtttacgcctcttagaggccacctgtcccttcggcgagaacgctgaattccctgccgatatctcctccattaccgaagctgtgccgtctgagtccgagcccccagccctgcagaataaccttctcagccctctcttaacgggcaccgaatcaccctttgacctggaacaacagtggcaggacctgatgtcaatcatggaaatgcaggctatggaagtgaacacgagtgcgtccgagattctgtatagcgcgcctccgggagatccacttagtacaaattattcactggcccctaatacaccgattaatcagaacgtatccctacaccaggcctctctcgggggatgctcacaggattttcttctgttttctccagaagtggaaagtttgccagtagccagttcttccacactactacctctcgcccctagcaactcaacctccctgaatagcactttcgggtccaccaatctgaccggtctgtttttccccccacagctcaatggcacggcaaatgacacagccggaccggaacttcctgaccctctagggggattacttgacgaagcgatgctggacgagatttcactgatggacctcgctattgaggaaggattcaatcctgtccaggcgagccaacttgaagaagagttcgattctgattccggtttgagtctggacagttcgcactcccctagtagtctgtcaagctccgagggctcaagctcctcttcttctagttctagctccagttcatccagcgccagctcttccgcctccagctcattctctgaggagggagctgtggggtactctagcgacagcgaaactctggacttggaggaggccgagggggctgtgggttaccagcctgaatattcaaagttttgtcggatgtcatatcaagatccagcccagttatcttgtctgccgtatctggagcacgtgggtcataatcatacgtacaacatggcaccatccgcactggatagtgcagatctgcctcccccttctgcattgaaaaagggcagcaaagagaaacaggcagatttcttagacaaacaaatgtcacgcgatgaacacagggccagggccatgaagattccattcacgaacgacaaaatcatcaatctgcctgtggaagaatttaatgagcttttaagcaagtaccagctgtcggaggcccagttatcgctgatcagagacatcagacgacgcggaaaaaataaaatggcagcacagaattgtcggaaaaggaaacttgacacaattctgaacctggagcgggatgtggaggatttgcagcgcgataaggccagactgctccgagagaaggttgaattcctgagatccctgaggcagatgaagcagaaggtccaaagtttgtaccaggaggtttttgggagattgcgcgatgagaacggacgcccatactcaccctcccagtacgccctgcagtacgccggagacggaagcgtcctgcttatccctcgaaccatggcagaccagcaggctagacgacaagagaggaaaccaaaggaccggagaaagtag

SEQ ID NO: 136191 - DNA, 2319 bp, Artificial Sequence
  derived and/or modified sequence
atgctgagcctgaagaagtacctgaccgagggcctgctgcagttcaccatcctgctgagcctgatcggcgtgagagtggacgtggacacctacctgaccagccagctgccccccctgagagagatcatcctgggccccagcagcgcctacacccagacccagttccacaacctgagaaacaccctggacggctacggcatccaccccaagagcatcgacctggacaactacttcaccgccagaagactgctgagccaggtgagagccctggacagattccaggtgcccaccaccgaggtgaacgcctggctggtgcacagagaccccgagggcagcgtgagcggcagccagcccaacagcggcctggccctggagagcagcagcggcctgcaggacgtgaccggccccgacaacggcgtgagagagagcgagaccgagcagggcttcggcgaggacctggaggacctgggcgccgtggccccccccgtgagcggcgacctgaccaaggaggacatcgacctgatcgacatcctgtggagacaggacatcgacctgggcgccggcagagaggtgttcgactacagccacagacagaaggagcaggacgtggagaaggagctgagagacggcggcgagcaggacacctgggccggcgagggcgccgaggccctggccagaaacctgctggtggacggcgagaccggcgagagcttccccgcccaggtgcccagcggcgaggaccagaccgccctgagcctggaggagtgcctgagactgctggaggccacctgccccttcggcgagaacgccgagttccccgccgacatcagcagcatcaccgaggccgtgcccagcgagagcgagccccccgccctgcagaacaacctgctgagccccctgctgaccggcaccgagagccccttcgacctggagcagcagtggcaggacctgatgagcatcatggagatgcaggccatggaggtgaacaccagcgccagcgagatcctgtacagcgccccccccggcgaccccctgagcaccaactacagcctggcccccaacacccccatcaaccagaacgtgagcctgcaccaggccagcctgggcggctgcagccaggacttcctgctgttcagccccgaggtggagagcctgcccgtggccagcagcagcaccctgctgcccctggcccccagcaacagcaccagcctgaacagcaccttcggcagcaccaacctgaccggcctgttcttccccccccagctgaacggcaccgccaacgacaccgccggccccgagctgcccgaccccctgggcggcctgctggacgaggccatgctggacgagatcagcctgatggacctggccatcgaggagggcttcaaccccgtgcaggccagccagctggaggaggagttcgacagcgacagcggcctgagcctggacagcagccacagccccagcagcctgagcagcagcgagggcagcagcagcagcagcagcagcagcagcagcagcagcagcagcgccagcagcagcgccagcagcagcttcagcgaggagggcgccgtgggctacagcagcgacagcgagaccctggacctggaggaggccgagggcgccgtgggctaccagcccgagtacagcaagttctgcagaatgagctaccaggaccccgcccagctgagctgcctgccctacctggagcacgtgggccacaaccacacctacaacatggcccccagcgccctggacagcgccgacctgcccccccccagcgccctgaagaagggcagcaaggagaagcaggccgacttcctggacaagcagatgagcagagacgagcacagagccagagccatgaagatccccttcaccaacgacaagatcatcaacctgcccgtggaggagttcaacgagctgctgagcaagtaccagctgagcgaggcccagctgagcctgatcagagacatcagaagaagaggcaagaacaagatggccgcccagaactgcagaaagagaaagctggacaccatcctgaacctggagagagacgtggaggacctgcagagagacaaggccagactgctgagagagaaggtggagttcctgagaagcctgagacagatgaagcagaaggtgcagagcctgtaccaggaggtgttcggcagactgagagacgagaacggcagaccctacagccccagccagtacgccctgcagtacgccggcgacggcagcgtgctgctgatccccagaaccatggccgaccagcaggccagaagacaggagagaaagcccaaggacagaagaaagtag

SEQ ID NO: 136192 - DNA, 2376 bp, Artificial Sequence
  derived and/or modified sequence
ttcgtgttctggaagatcctgaagaccaagaagcacaagcacagcggccccagcgccatgctgagcctgaagaagtacctgaccgagggcctgctgcagttcaccatcctgctgagcctgatcggcgtgagagtggacgtggacacctacctgaccagccagctgccccccctgagagagatcatcctgggccccagcagcgcctacacccagacccagttccacaacctgagaaacaccctggacggctacggcatccaccccaagagcatcgacctggacaactacttcaccgccagaagactgctgagccaggtgagagccctggacagattccaggtgcccaccaccgaggtgaacgcctggctggtgcacagagaccccgagggcagcgtgagcggcagccagcccaacagcggcctggccctggagagcagcagcggcctgcaggacgtgaccggccccgacaacggcgtgagagagagcgagaccgagcagggcttcggcgaggacctggaggacctgggcgccgtggccccccccgtgagcggcgacctgaccaaggaggacatcgacctgatcgacatcctgtggagacaggacatcgacctgggcgccggcagagaggtgttcgactacagccacagacagaaggagcaggacgtggagaaggagctgagagacggcggcgagcaggacacctgggccggcgagggcgccgaggccctggccagaaacctgctggtggacggcgagaccggcgagagcttccccgcccaggtgcccagcggcgaggaccagaccgccctgagcctggaggagtgcctgagactgctggaggccacctgccccttcggcgagaacgccgagttccccgccgacatcagcagcatcaccgaggccgtgcccagcgagagcgagccccccgccctgcagaacaacctgctgagccccctgctgaccggcaccgagagccccttcgacctggagcagcagtggcaggacctgatgagcatcatggagatgcaggccatggaggtgaacaccagcgccagcgagatcctgtacagcgccccccccggcgaccccctgagcaccaactacagcctggcccccaacacccccatcaaccagaacgtgagcctgcaccaggccagcctgggcggctgcagccaggacttcctgctgttcagccccgaggtggagagcctgcccgtggccagcagcagcaccctgctgcccctggcccccagcaacagcaccagcctgaacagcaccttcggcagcaccaacctgaccggcctgttcttccccccccagctgaacggcaccgccaacgacaccgccggccccgagctgcccgaccccctgggcggcctgctggacgaggccatgctggacgagatcagcctgatggacctggccatcgaggagggcttcaaccccgtgcaggccagccagctggaggaggagttcgacagcgacagcggcctgagcctggacagcagccacagccccagcagcctgagcagcagcgagggcagcagcagcagcagcagcagcagcagcagcagcagcagcagcgccagcagcagcgccagcagcagcttcagcgaggagggcgccgtgggctacagcagcgacagcgagaccctggacctggaggaggccgagggcgccgtgggctaccagcccgagtacagcaagttctgcagaatgagctaccaggaccccgcccagctgagctgcctgccctacctggagcacgtgggccacaaccacacctacaacatggcccccagcgccctggacagcgccgacctgcccccccccagcgccctgaagaagggcagcaaggagaagcaggccgacttcctggacaagcagatgagcagagacgagcacagagccagagccatgaagatccccttcaccaacgacaagatcatcaacctgcccgtggaggagttcaacgagctgctgagcaagtaccagctgagcgaggcccagctgagcctgatcagagacatcagaagaagaggcaagaacaagatggccgcccagaactgcagaaagagaaagctggacaccatcctgaacctggagagagacgtggaggacctgcagagagacaaggccagactgctgagagagaaggtggagttcctgagaagcctgagacagatgaagcagaaggtgcagagcctgtaccaggaggtgttcggcagactgagagacgagaacggcagaccctacagccccagccagtacgccctgcagtacgccggcgacggcagcgtgctgctgatccccagaaccatggccgaccagcaggccagaagacaggagagaaagcccaaggacagaagaaagtag

SEQ ID NO: 136193 - protein, 682 aa, Artificial Sequence
  derived and/or modified sequence
MNPQQQRMAAIGTDKELSDLLDFSAMFSPPVNSGKTRPTTLGSSQFSGSGIDERGGTTSWGTSGQPSPSYDSSRGFTDSPHYSDHLNDSRLGAHEGLSPTPFMNSNLMGKTSERGSFSLYSRDTGLPGCQSSLLRQDLGLGSPAQLSSSGKPGTAYYSFSATSSRRRPLHDSAALDPLQAKKVRKVPPGLPSSVYAPSPNSDDFNRESPSYPSPKPPTSMFASTFFMQDGTHNSSDLWSSSNGMSQPGFGGILGTSTSHMSQSSSYGNLHSHDRLSYPPHSVSPTDINTSLPPMSSFHRGSTSSSPYVAASHTPPINGSDSILGTRGNAAGSSQTGDALGKALASIYSPDHTSSSFPSNPSTPVGSPSPLTGTSQWPRPGGQAPSSPSYENSLHSLQSRMEDRLDRLDDAIHVLRNHAVGPSTSLPAGHSDIHSLLGPSHNAPIGSLNSNYGGSSLVASSRSASMVGTHREDSVSLNGNHSVLSSTVTTSSTDLNHKTQENYRGGLQSQSGTVVTTEIKTENKEKDENLHEPPSSDDMKSDDESSQKDIKVSSRGRTSSTNEDEDLNPEQKIEREKERRMANNARERLRVRDINEAFKELGRMCQLHLKSEKPQTKLLILHQAVAVILSLEQQVRERNLNPKAACLKRREEEKVSAVSAEPPTTLPGTHPGLSETTNPMGHM

SEQ ID NO: 136194 - protein, 681 aa, Artificial Sequence
  derived and/or modified sequence
MAAFSVLRPRVPGSSGTWAADPDASTAVSPSLRFGGREPARPTRGGATKWPKMNPQQQRMAAIGTDKELSDLLDFSAMFSPPVNSGKTRPTTLGSSQFSGSGIDERGGTTSWGTSGQPSPSYDSSRGFTDSPHYSDHLNDSRLGAHEGLSPTPFMNSNLMGKTSERGSFSLYSRDTGLPGCQSSLLRQDLGLGSPAQLSSSGKPGTAYYSFSATSSRRRPLHDSAALDPLQAKKVRKVPPGLPSSVYAPSPNSDDFNRESPSYPSPKPPTSMFASTFFMQDGTHNSSDLWSSSNGMSQPGFGGILGTSTSHMSQSSSYGNLHSHDRLSYPPHSVSPTDINTSLPPMSSFHRGSTSSSPYVAASHTPPINGSDSILGTRGNAAGSSQTGDALGKALASIYSPDHTSSSFPSNPSTPVGSPSPLTGTSQWPRPGGQAPSSPSYENSLHSLQSRMEDRLDRLDDAIHVLRNHAVGPSTSLPAGHSDIHSLLGPSHNAPIGSLNSNYGGSSLVASSRSASMVGTHREDSVSLNGNHSVLSSTVTTSSTDLNHKTQENYRGGLQSQSGTVVTTEIKTENKEKDENLHEPPSSDDMKSDDESSQKDIKVSSRGRTSSTNEDEDLNPEQKIEREKERRMANNARERLRVRDINEAFKELGRMCQLHLKSEKPQTKLLILHQAVTTIGP

SEQ ID NO: 136195 - DNA, 4734 bp, Artificial Sequence
  derived and/or modified sequence
tccggaggcgagccgagcgcggtggtgaggccgcctcagcgaaaaaaatgtccgcctgaagagacccacaagttctattcggggggaccgacagcccgccccgggaggaaggggcggccaggcccgaaagccgcctccccctcccagacccgagagctcgtgcggggcaaagtgaaccgagccgctgggcggtgcaaggggaagcccaagcccgttctcccggccaaagtgaactttaatcggggtggttggatgcggagacggggcggcaggacctgctagaagtggccgaagatgaatccccagcaacaacgcatggccgctatagggaccgacaaggagctgagcgacctactggacttcagtgcgatgttttccccacctgttaatagtgggaaaactagaccaactacactgggaagcagtcaattcagtggatcaggtattgatgaaagaggaggtacaacatcttggggaacaagtggtcaaccaagtccttcctatgattcatctagaggttttacagacagccctcattacagtgatcacttgaatgacagtcgattaggagcccatgaaggcttgtccccaacacctttcatgaactcaaatctgatgggaaaaacatcagagagaggctcattttccctgtacagcagagatactggattaccaggctgtcaatctagtctcctgagacaagatctggggcttgggagcccagcacagctatcttcttcaggaaaacctgggacagcatactattcattctctgctacaagttccaggaggagaccactccatgactctgcagcgcttgatcccttgcaagcaaaaaaagtcagaaaggtgcctcctggtttgccttcttctgtatatgcaccatccccaaattcagatgatttcaaccgtgaatctcctagttatccatctcctaagccaccaaccagtatgttcgctagcactttctttatgcaagatgggacccacaattcttctgacctttggagttcatcaaatgggatgagccagcctggttttggtggaattctggggacctccacttcccacatgtctcaatccagtagttatggcaaccttcattcacatgaccgcttgagttatcctccacactcagtttcaccaacagacataaacacgagtcttccaccaatgtccagctttcatcgcggcagtaccagcagttcaccttacgttgctgcctcacacactcctcccatcaatggatcagacagcattctaggaaccagagggaatgctgctggaagctcacagacaggtgatgcacttggaaaggctttggcatctatttattctcctgaccataccagcagtagttttccgtcaaatccatcaacaccagttggatcaccttcacctctcacaggtaccagtcagtggccaagacctggagggcaagcaccttcatccccaagctatgaaaactcactccactccctgcagtctcgaatggaggatcgtttagacagactggatgatgcaatccatgtgctgcggaaccatgctgtgggaccttccaccagtttgcctgctggtcacagtgatatacatagtttattgggaccatcccataatgcaccaattggaagcctcaattcaaactatggaggatcaagccttgttgcaagcagtcgatcagcttcaatggttggaactcatcgggaagactctgtcagtctcaatggcaatcattcagtcctgtctagtacagtcactacttcaagcacagacctgaaccataaaacacaagaaaattatagaggtggcttgcaaagtcagtctggaactgttgttacaacagaaatcaagactgaaaacaaagaaaaggatgaaaaccttcatgaacctccttcatcagatgacatgaagtcagatgatgaatcctcccaaaaagatatcaaggtttcatctagaggcagaacaagcagtactaatgaagatgaggatttgaaccctgaacagaagatagaaagggagaaggagaggcggatggctaacaatgccagagaacgcttacgcgtgcgggatattaatgaagcattcaaagagcttggccgaatgtgtcagcttcacttgaagagtgaaaaaccccaaacaaaactccttattcttcatcaagccgtggcagtcatccttagtctagaacagcaagtcagagagaggaaccttaaccccaaagcagcctgccttaagagaagggaagaagaaaaagtttctgccgtatcggcagagccgccaaccacactgccaggaacccatcctgggcttagtgaaactaccaaccctatgggtcatatgtaaacatcagccagttccagagttatcagtaggctagatagaaggtgacctctcctcataaggacttggacaactcagattatctgaagacacaaacctgacaggagggagaagaaaaaacaaaacacttgaaccaagaaactcaaatgtaatcctacgatcaaagcaactggtcaacacttccatcagaagtgaagataggaagctcatcagatagaacatcagcccatgagatgtttgcaacaaatcttttgttgcaagcagtgtgtcgcttctgcacaatcagagactgtctcgatctctccactcaccgtggaagttgccttgtgcctaaactgaattgacaaatgcattgtaactacaaattttatttattgttatgaaactgtaaggtctacatataaagggaaaaagttaatgtggaaagctgatctacactcagctgatgccagcatacattaaagcggttcacgtgcagagaacaaagcagtgacaaccattggcccttagcattcccggcatacctattagtgtcttaaaaaggaagggaaaagtcttttgttgccctctcctatcctcttgccatatgaatagcgttttccatgaaataggaaaatattacttggtatagcatttctcttgctctcattttttgatttatttttattttctctttgtgggtgttatatttgatctctaaatctgaacagtttatggtcacagtccagcctcctccgtgcagccctgtgtgctttgcacatttaccttacagtggtaagcagagaccatctgtgaccatagcctagctagcattttaaaaggggaaattttgttctctaggttttcccccaaataaacattgctttatttctaataataaccaagacttttcaagcttctagatctcataggaaagcttgtaatagcaaaattgtaaattacaagggaagaatctactttttagaaatcgctttgttttccaagcagtaagtactacatacagtacttgtaaagtgttagctgtaagtaagcacaaaatacatttaaaatacaaagacgattttttcaggctgtgattatggtgaacataacaaaacccagtagtcaccaaggcaggtagtgtgataaatgaacacaccactctgaggctaattacctaatggaatacaagagcaatggtcacccgtatttccttatcctagcctttatttctctgtcatttggatggctggtcaatggggaagaattgagtgggtgatttaatcaactgcaaaccatctgcccctgtcccaaaatgatgagccagattagcattaaaccagtacttgtcagtccatcttaatactgttcattaaggcactctctgtctctaatccttaggagttgttttaaaagacataatcactttgaacttccatgaaacctgtcttccaccacaacaaccctgggagagaaaaacatgctaaaggaggtatcttggcttaataattccttatagccaatatcaacagtggcaatcagcacacagaggaaaggacccaaatcactatgtagcttaaagatttctgttaatttgaaagaacaaaaacaagacagaacttctggtactctaatcaggatgattcctaacaagtcagtcatttgtgaacttagtggactttttggttactttaatttgcatatattctccagttacatcggactctatctgtggccttgttcttcatttcagtgttaatcagctaaacagaagttgttgcttatgatgtgtgagtgaacatatgccactgcctggcctttttttcttcagagcttgttgtctttttcgctatattagactttgcagtatgcccagaagctttccttcataaaatagaaagaaaaaaacatttggcttatttttcactgtagctagtcttttatacaataatcttgtaagaaaatttcttgaattctaaatattactctttctagatttttgaaatcaaaaagttttcagtaaaaagtttcttactttattttattatattaggtagtaaaaaatgtagggttatttaccataacctgttcattaatatcagaaatttacaatagcattttaagaccatagtaggattctagcataccgtgtagtacctatggagtattgtaagagctaattgttggagatgaattgcttctcatcttgttctccagtttccattgttggtttattgcagatttgtatcctgtgtcaaattcaaggtattattgataaaccttttcaaccagcagcaagaagttcaaatttttttctgtcactgtaacagaaaacacaatatgtatataacatttatgtagcaataaatgtgccatcttttttttaacacagtaaaaaaaaaaaaaaaaaaaaaa

SEQ ID NO: 136196 - DNA, 2049 bp, Artificial Sequence
  derived and/or modified sequence
atgaacccccagcagcagagaatggccgccatcggcaccgacaaggagctgagcgacctgctggacttcagcgccatgttcagcccccccgtgaacagcggcaagaccagacccaccaccctgggcagcagccagttcagcggcagcggcatcgacgagagaggcggcaccaccagctggggcaccagcggccagcccagccccagctacgacagcagcagaggcttcaccgacagcccccactacagcgaccacctgaacgacagcagactgggcgcccacgagggcctgagccccacccccttcatgaacagcaacctgatgggcaagaccagcgagagaggcagcttcagcctgtacagcagagacaccggcctgcccggctgccagagcagcctgctgagacaggacctgggcctgggcagccccgcccagctgagcagcagcggcaagcccggcaccgcctactacagcttcagcgccaccagcagcagaagaagacccctgcacgacagcgccgccctggaccccctgcaggccaagaaggtgagaaaggtgccccccggcctgcccagcagcgtgtacgcccccagccccaacagcgacgacttcaacagagagagccccagctaccccagccccaagccccccaccagcatgttcgccagcaccttcttcatgcaggacggcacccacaacagcagcgacctgtggagcagcagcaacggcatgagccagcccggcttcggcggcatcctgggcaccagcaccagccacatgagccagagcagcagctacggcaacctgcacagccacgacagactgagctaccccccccacagcgtgagccccaccgacatcaacaccagcctgccccccatgagcagcttccacagaggcagcaccagcagcagcccctacgtggccgccagccacaccccccccatcaacggcagcgacagcatcctgggcaccagaggcaacgccgccggcagcagccagaccggcgacgccctgggcaaggccctggccagcatctacagccccgaccacaccagcagcagcttccccagcaaccccagcacccccgtgggcagccccagccccctgaccggcaccagccagtggcccagacccggcggccaggcccccagcagccccagctacgagaacagcctgcacagcctgcagagcagaatggaggacagactggacagactggacgacgccatccacgtgctgagaaaccacgccgtgggccccagcaccagcctgcccgccggccacagcgacatccacagcctgctgggccccagccacaacgcccccatcggcagcctgaacagcaactacggcggcagcagcctggtggccagcagcagaagcgccagcatggtgggcacccacagagaggacagcgtgagcctgaacggcaaccacagcgtgctgagcagcaccgtgaccaccagcagcaccgacctgaaccacaagacccaggagaactacagaggcggcctgcagagccagagcggcaccgtggtgaccaccgagatcaagaccgagaacaaggagaaggacgagaacctgcacgagccccccagcagcgacgacatgaagagcgacgacgagagcagccagaaggacatcaaggtgagcagcagaggcagaaccagcagcaccaacgaggacgaggacctgaaccccgagcagaagatcgagagagagaaggagagaagaatggccaacaacgccagagagagactgagagtgagagacatcaacgaggccttcaaggagctgggcagaatgtgccagctgcacctgaagagcgagaagccccagaccaagctgctgatcctgcaccaggccgtggccgtgatcctgagcctggagcagcaggtgagagagagaaacctgaaccccaaggccgcctgcctgaagagaagagaggaggagaaggtgagcgccgtgagcgccgagccccccaccaccctgcccggcacccaccccggcctgagcgagaccaccaaccccatgggccacatgtag

SEQ ID NO: 136197 - DNA, 2046 bp, Artificial Sequence
  derived and/or modified sequence
atggccgccttcagcgtgctgagacccagagtgcccggcagcagcggcacctgggccgccgaccccgacgccagcaccgccgtgagccccagcctgagattcggcggcagagagcccgccagacccaccagaggcggcgccaccaagtggcccaagatgaacccccagcagcagagaatggccgccatcggcaccgacaaggagctgagcgacctgctggacttcagcgccatgttcagcccccccgtgaacagcggcaagaccagacccaccaccctgggcagcagccagttcagcggcagcggcatcgacgagagaggcggcaccaccagctggggcaccagcggccagcccagccccagctacgacagcagcagaggcttcaccgacagcccccactacagcgaccacctgaacgacagcagactgggcgcccacgagggcctgagccccacccccttcatgaacagcaacctgatgggcaagaccagcgagagaggcagcttcagcctgtacagcagagacaccggcctgcccggctgccagagcagcctgctgagacaggacctgggcctgggcagccccgcccagctgagcagcagcggcaagcccggcaccgcctactacagcttcagcgccaccagcagcagaagaagacccctgcacgacagcgccgccctggaccccctgcaggccaagaaggtgagaaaggtgccccccggcctgcccagcagcgtgtacgcccccagccccaacagcgacgacttcaacagagagagccccagctaccccagccccaagccccccaccagcatgttcgccagcaccttcttcatgcaggacggcacccacaacagcagcgacctgtggagcagcagcaacggcatgagccagcccggcttcggcggcatcctgggcaccagcaccagccacatgagccagagcagcagctacggcaacctgcacagccacgacagactgagctaccccccccacagcgtgagccccaccgacatcaacaccagcctgccccccatgagcagcttccacagaggcagcaccagcagcagcccctacgtggccgccagccacaccccccccatcaacggcagcgacagcatcctgggcaccagaggcaacgccgccggcagcagccagaccggcgacgccctgggcaaggccctggccagcatctacagccccgaccacaccagcagcagcttccccagcaaccccagcacccccgtgggcagccccagccccctgaccggcaccagccagtggcccagacccggcggccaggcccccagcagccccagctacgagaacagcctgcacagcctgcagagcagaatggaggacagactggacagactggacgacgccatccacgtgctgagaaaccacgccgtgggccccagcaccagcctgcccgccggccacagcgacatccacagcctgctgggccccagccacaacgcccccatcggcagcctgaacagcaactacggcggcagcagcctggtggccagcagcagaagcgccagcatggtgggcacccacagagaggacagcgtgagcctgaacggcaaccacagcgtgctgagcagcaccgtgaccaccagcagcaccgacctgaaccacaagacccaggagaactacagaggcggcctgcagagccagagcggcaccgtggtgaccaccgagatcaagaccgagaacaaggagaaggacgagaacctgcacgagccccccagcagcgacgacatgaagagcgacgacgagagcagccagaaggacatcaaggtgagcagcagaggcagaaccagcagcaccaacgaggacgaggacctgaaccccgagcagaagatcgagagagagaaggagagaagaatggccaacaacgccagagagagactgagagtgagagacatcaacgaggccttcaaggagctgggcagaatgtgccagctgcacctgaagagcgagaagccccagaccaagctgctgatcctgcaccaggccgtgaccaccatcggcccctag

SEQ ID NO: 136198 - DNA, 2049 bp, Artificial Sequence
  derived and/or modified sequence
atgaaccctcagcagcagagaatggcagccatcggtacagacaaagagctgtcggacctgctggatttctccgccatgttcagtcctcctgtcaatagtggaaagacaagaccaacaacgcttggatcctcccagttcagcggtagtggaattgacgagaggggaggcaccacgagctggggtacatcagggcagccatctcctagctacgatagcagtagaggctttacagacagcccacactatagcgaccatctgaacgattcgcgcctcggcgcccatgaaggtctcagtcccacaccatttatgaattccaacctgatgggcaaaacaagtgagcgcggatctttctctttatattcaagggacacaggccttcccggctgccagtctagcctgctaaggcaggacctggggctaggatctccagcacaactctcctcctccggtaaaccgggcacggcatattattcgttctcagcaacgagctctaggagacgccccttgcacgattccgctgcccttgaccctctgcaggccaagaaggtcagaaaggtcccacctgggctgccctccagcgtctatgctccctcccccaactcagatgactttaaccgcgaatccccaagttatcccagtccaaagccaccaacctcaatgttcgcctctacttttttcatgcaagatggcacgcacaactcgtctgacctgtggtccagttcaaatggcatgagtcaacccggcttcggcggcattctcggcacgtcaaccagtcacatgtcccagagctcctcctatgggaacctccactctcacgatcgcctgagctacccccctcattccgtgtctcccactgatatcaataccagccttccgccaatgagcagctttcatcgaggctctacgagctccagcccctatgtggccgcatctcacactcctcccatcaacggatccgatagtattttgggaaccagaggcaacgccgctggatcctctcagactggggatgccttaggcaaggctcttgcgagcatctactcccctgaccatacctcatcttcattcccatccaacccttcaacacccgtcggatcccccagtccactaaccggtactagtcagtggccgagaccaggggggcaagctcccagctctcccagctacgagaactccctccactccctacagtcccggatggaggatagattggacaggctcgacgacgcaatacacgtccttcgaaaccatgcagtaggcccttctacgagtctcccagcaggacattccgacattcattctcttctcggaccctcccataatgctccgattggttctctgaattcaaattacggaggcagcagcttagttgcaagctctcggtcagccagtatggtaggtacacatcgagaggatagtgtaagcctgaacggtaaccattctgttctgtctagtacagttacaactagttcaactgatctgaaccacaagacacaggagaactatcgaggaggcctgcagagccagtccggcacagtcgtcactaccgagattaaaaccgaaaataaggagaaggatgagaacctccacgagcccccatcttctgatgatatgaagtcagatgatgaatccagtcagaaggacattaaggtctcatccagaggccgaacctcctccacaaacgaggatgaggacctgaatccagagcaaaaaatcgaacgggagaaagaacgcagaatggccaacaacgctagagagagattgcgcgtgcgcgacataaatgaggccttcaaagagcttggacggatgtgccagctccaccttaaatcagagaagccccaaaccaagcttttgattctccaccaggccgttgcggtgatactgagtcttgagcaacaggtgcgagagcgtaatctgaaccctaaagctgcatgcctaaaaaggagggaggaagaaaaggtgtcagctgtcagcgccgagcctccaacaacattgccaggtacccacccaggtctgtcagagacaaccaatcccatgggccacatgtag

SEQ ID NO: 136199 - DNA, 2046 bp, Artificial Sequence
  derived and/or modified sequence
atggctgccttttctgttttacggccaagagtgccgggcagtagcggcacatgggctgcagacccagacgctagcactgccgtgtccccaagcctgagattcggcggccgggagcctgctcggccgaccagaggcggcgccaccaaatggccgaagatgaaccctcagcaacagagaatggccgccatagggactgataaagagctctccgacctgttggacttcagtgctatgtttagcccaccggtgaattctgggaagacccggccgactacactgggatcctcccaattctctggatccggcatcgatgagcggggcggtacaaccagttggggtacctcaggccagcccagtccatcgtacgactccagtagaggtttcacagactccccgcattattccgatcacctcaatgactcccgattgggcgctcacgagggattatcccctactccattcatgaacagtaacctgatgggtaaaacttctgagaggggtagcttctctctgtattcacgtgatacggggctgcccggctgccagagtagcctgctgcgtcaggacctcggtctgggcagtcccgctcagttgtccagctctggcaaacctggcaccgcctattactcattttccgcgaccagtagccggaggcgcccgcttcacgactctgcagccttggatcccttgcaagccaagaaggtaagaaaggtcccccccggtctgccatcttcagtgtatgctccctcacccaattcagacgacttcaaccgggaaagtcctagctatcctagccctaagcctcccactagtatgttcgcaagcaccttctttatgcaagatggaacacacaactcctccgacctatggtcgtcaagcaacggcatgagtcaacctggatttgggggcatcctgggtactagcactagtcacatgtcccagtcctcgagctacgggaacctccacagccacgacagattatcctatcctccgcactcagtaagtccgacagacattaacacttctctgcccccaatgagtagcttccaccgtgggtcaacatcctcgtccccatatgtggccgcctcccacacgccacctatcaatgggtcggacagcatcctgggcacccgagggaacgccgcagggtcttcacagacgggcgatgctctgggtaaagccttggcaagtatttatagcccagatcatacaagtagctcattcccttctaatcccagcacacctgttggctccccctcccccctgacaggaactagtcagtggccaaggccaggaggacaggctccgagttcacctagctatgaaaatagcctccactctcttcagtcccgaatggaggatcgccttgaccggctcgatgatgccattcatgtgctgagaaaccacgccgtgggaccttccacttcactgcctgcgggccattcggatatccactcactcctcggcccctctcacaatgcaccaatcggctctctgaattccaattatggtggctccagtttggtcgcaagttctcggtcagccagcatggtcggcacgcacagggaagatagtgtctctcttaacggaaatcattctgtcctgagttccacagtgactacctccagcacagacctgaatcataagacgcaggagaactatcgcggcgggctgcagtctcagtctggcacagtggtaacaaccgaaatcaaaactgagaataaggagaaggatgaaaatctgcatgagccaccatcatctgatgacatgaagtcagacgatgaaagctcccagaaagatatcaaagtctcctctcgtgggcgtacttcctctaccaatgaggatgaggacctcaaccccgagcagaagatcgagcgggagaaggaacgaaggatggccaataatgcccgagaaagactcagagtccgggatatcaatgaggccttcaaggaactgggtaggatgtgccaactgcacttgaagtccgaaaaaccccagactaagctgcttatacttcatcaggctgtaaccaccattggaccttag

SEQ ID NO: 136200 - DNA, 2049 bp, Artificial Sequence
  derived and/or modified sequence
atgaacccgcagcagcagcgcatggccgcaattggaacagacaaggaactctccgacttgctcgacttcagtgctatgtttagccctcccgtaaactcagggaaaactagaccaactacgctgggcagctcccagttctctggtagtgggattgatgaaaggggcggtactacatcttggggcacttccggacagcctagcccaagttatgattcctcaaggggcttcaccgattcaccccactactcagatcaccttaatgattctagactgggagcacacgagggtctgagccctaccccattcatgaattctaaccttatgggtaagactagtgagcgaggctctttctccctgtacagcagagacaccgggctgcctggctgccagtctagcctgctccgacaggacctgggcctgggatcgccggcccagctcagttcttccggaaagccaggtacagcttattatagcttttctgcaacatcctcacggcgcagacctctgcacgatagcgcagcattagacccactgcaggccaaaaaggtgcgcaaagtgccacccggcttaccgagcagcgtgtacgccccaagccccaatagcgacgattttaatcgagagagcccatcatacccaagtccaaaaccccccacatcaatgtttgcatctacttttttcatgcaagacggcacacataattcatcggacctgtggagctcctccaatggtatgtcccagccgggttttggcggcatcctgggaacgtccactagccatatgtcccagagctcttcctacggaaatctgcatagccatgaccggttatcctatcccccacactctgtgtcaccgaccgacatcaacacctccctcccccccatgagtagcttccaccgtgggtcaactagttcgagcccatatgttgctgcaagtcacactcctccaattaatgggagtgattcaattctgggtacacgagggaatgcagccgggagcagtcagaccggagacgcgcttggaaaggctctagcctcaatatacagtccagaccacacctcatcctcgttcccgtccaatccctccacacctgttggtagtcccagccctctgactggtacatcacagtggcccagaccgggcgggcaggctccttcttcccccagctatgaaaactcactccacagcctgcagagcagaatggaagaccgccttgatcgactagacgatgcaatccacgttctccgcaaccacgccgttggaccatctacctccctgccggccggccacagcgatatccattcccttctgggtccctcacataatgcccctatcggcagcctcaattctaactacggaggcagttccctggtagcctctagtagaagcgcctccatggtagggactcacagggaggatagtgttagccttaacgggaatcactctgttttgagttcaacagtgacaaccagcagcactgatctaaatcataaaacgcaagagaactatagggggggtctgcagtcacagtccggaacggtggtgaccacagaaatcaagactgagaataaagagaaagatgaaaatcttcatgagcctccttccagcgacgacatgaaaagtgatgatgaatcttctcagaaggacataaaagtaagcagccgcggcaggacctccagtacaaatgaggacgaggatctcaacccagaacagaagattgagagggaaaaagaacggcggatggccaataacgcccgcgagcgactccgggttcgcgacatcaacgaagcctttaaggagttggggcgcatgtgccagcttcacttaaaatccgagaaacctcaaacaaagttattgattctacaccaggctgttgcagtaatcctttctctggaacaacaagtgagggaaagaaatttgaaccccaaggccgcgtgtctgaaacgaagagaagaagagaaggtcagtgccgtgtctgctgaacctcccacaactctccccgggacacatccaggtctcagcgaaactacaaacccaatgggccatatgtag

SEQ ID NO: 136201 - DNA, 2049 bp, Artificial Sequence
  derived and/or modified sequence
atgaacccccagcagcagaggatggccgccatcggcacagacaaggagctgagtgacctgctggacttcagcgccatgttcagcccccctgtgaacagcggcaagacccggcccaccaccctgggcagcagccagttcagcggcagcggcattgatgagcggggcggcaccacctcctggggcaccagcggccagcccagccccagctatgacagcagccggggcttcacagacagcccccactacagcgaccacctgaatgacagccggctgggcgcccacgagggcctgagccccacccccttcatgaacagcaacctgatgggcaagaccagcgagcggggcagcttcagcctgtacagccgggacaccggcctgcccggctgccagagcagcctgctgcggcaggacctgggcctgggcagccctgcccagctgagcagcagcggcaagccaggcacagcctactacagcttcagcgccaccagcagcagaagaagacccctgcatgacagcgctgccctggaccccctgcaggccaagaaggtgaggaaggtgcccccaggcctgcccagctctgtgtatgcccccagccccaacagtgatgacttcaaccgggagagccccagctaccccagccccaagccacccacctccatgtttgccagcaccttcttcatgcaggacggcacccacaacagcagtgacctgtggagcagcagcaatggcatgagccagcccggctttggaggcatcctgggcaccagcaccagccacatgagccagagcagcagctatggcaacctgcacagccatgaccggctgagctacccaccccacagcgtgagccccacagacatcaacaccagcctgccccccatgagcagcttccaccggggcagcaccagcagcagcccctacgtggccgccagccacaccccacccatcaatggaagtgacagcatcctgggcaccagaggaaatgctgctggcagcagccagacaggagatgccctgggcaaggccctggccagcatctacagcccagaccacaccagcagcagcttccccagcaaccccagcacccctgtgggcagccccagccccctgaccggcaccagccagtggcccaggcctgggggccaggcccccagcagccccagctatgagaacagcctgcacagcctgcagagcaggatggaggaccggctggaccggctggatgatgccatccacgtgctgagaaatcatgctgtgggccccagcaccagcctgcctgctggccacagcgacatccacagcctgctgggccccagccacaatgcccccatcggcagcctgaacagcaactatggaggcagcagcctggtggccagcagccgcagcgcctccatggtgggcacccacagagaagattctgtgtccctgaatggaaaccacagcgtgctgagcagcacagtgaccaccagcagcacagacctgaaccacaagacccaggagaactaccggggcggcctgcagagccagagcggcaccgtggtgaccacagagatcaagacagagaacaaggagaaggatgagaacctgcacgagccccccagcagtgatgacatgaagagtgatgatgagagcagccagaaggacatcaaggtgagcagccggggccgcaccagcagcaccaatgaagatgaggacctgaaccctgagcagaagattgaaagagagaaggagaggaggatggccaacaatgcccgggagcggctgcgggtgcgggacatcaatgaggccttcaaggagctgggccgcatgtgccagctgcacctgaagtctgagaagccccagaccaagctgctgatcctgcaccaggccgtggccgtcatcctgagcctggagcagcaggtgcgggagaggaacctgaaccccaaggccgcctgcctgaagaggcgggaggaggagaaggtgtctgctgtgtctgctgagccccccaccaccctgcccggcacccaccctggcctgtctgagaccaccaaccccatgggccacatgtag

SEQ ID NO: 136202 - DNA, 2046 bp, Artificial Sequence
  derived and/or modified sequence
atggccgccttctctgtgctgcggccccgggtgcccggcagcagcggcacctgggccgctgaccctgatgccagcacagctgtgagccccagcctgcgctttggaggccgggagcccgcccggcccacccggggcggggccaccaagtggcccaagatgaacccccagcagcagaggatggccgccatcggcacagacaaggagctgagtgacctgctggacttcagcgccatgttcagcccccctgtgaacagcggcaagacccggcccaccaccctgggcagcagccagttcagcggcagcggcattgatgagcggggcggcaccacctcctggggcaccagcggccagcccagccccagctatgacagcagccggggcttcacagacagcccccactacagcgaccacctgaatgacagccggctgggcgcccacgagggcctgagccccacccccttcatgaacagcaacctgatgggcaagaccagcgagcggggcagcttcagcctgtacagccgggacaccggcctgcccggctgccagagcagcctgctgcggcaggacctgggcctgggcagccctgcccagctgagcagcagcggcaagccaggcacagcctactacagcttcagcgccaccagcagcagaagaagacccctgcatgacagcgctgccctggaccccctgcaggccaagaaggtgaggaaggtgcccccaggcctgcccagctctgtgtatgcccccagccccaacagtgatgacttcaaccgggagagccccagctaccccagccccaagccacccacctccatgtttgccagcaccttcttcatgcaggacggcacccacaacagcagtgacctgtggagcagcagcaatggcatgagccagcccggctttggaggcatcctgggcaccagcaccagccacatgagccagagcagcagctatggcaacctgcacagccatgaccggctgagctacccaccccacagcgtgagccccacagacatcaacaccagcctgccccccatgagcagcttccaccggggcagcaccagcagcagcccctacgtggccgccagccacaccccacccatcaatggaagtgacagcatcctgggcaccagaggaaatgctgctggcagcagccagacaggagatgccctgggcaaggccctggccagcatctacagcccagaccacaccagcagcagcttccccagcaaccccagcacccctgtgggcagccccagccccctgaccggcaccagccagtggcccaggcctgggggccaggcccccagcagccccagctatgagaacagcctgcacagcctgcagagcaggatggaggaccggctggaccggctggatgatgccatccacgtgctgagaaatcatgctgtgggccccagcaccagcctgcctgctggccacagcgacatccacagcctgctgggccccagccacaatgcccccatcggcagcctgaacagcaactatggaggcagcagcctggtggccagcagccgcagcgcctccatggtgggcacccacagagaagattctgtgtccctgaatggaaaccacagcgtgctgagcagcacagtgaccaccagcagcacagacctgaaccacaagacccaggagaactaccggggcggcctgcagagccagagcggcaccgtggtgaccacagagatcaagacagagaacaaggagaaggatgagaacctgcacgagccccccagcagtgatgacatgaagagtgatgatgagagcagccagaaggacatcaaggtgagcagccggggccgcaccagcagcaccaatgaagatgaggacctgaaccctgagcagaagattgaaagagagaaggagaggaggatggccaacaatgcccgggagcggctgcgggtgcgggacatcaatgaggccttcaaggagctgggccgcatgtgccagctgcacctgaagtctgagaagccccagaccaagctgctgatcctgcaccaggccgtgaccaccatcggcccctag

SEQ ID NO: 136203 - DNA, 2049 bp, Artificial Sequence
  derived and/or modified sequence
atgaacccccagcagcagcggatggccgccatcggcaccgacaaggaactgtctgatctcttggatttctctgcgatgttttcgccccccgtgaactccggtaaaacccgaccgaccacactgggcagttcccagttttcaggatccggaattgacgagcgcggcggcacgacttcatgggggacttcaggacagccctccccctcctacgactccagcagaggatttaccgattcgccccactactccgaccaccttaacgattcccggctcggggcccacgagggcctctctccaaccccctttatgaatagcaatttaatgggaaagacaagcgagaggggttctttttcactttatagcagagacactgggctccctggatgtcagagcagcctgctgcgacaagatcttggcctgggttcaccggcccagctgagctctagcggtaagcctgggactgcgtactattccttctcagcaacgtcttctagacgaaggcctctgcatgacagcgcagcactggatccactccaggccaagaaagtccggaaggtcccgccggggcttccaagtagtgtctatgcacctagccccaattctgatgatttcaaccgcgagtcacccagctatccctcccccaagccgccaacgtcaatgttcgcatctacttttttcatgcaggacggcacacataattcctctgacctttggagcagcagcaacggaatgagtcagccaggcttcgggggcatcctcggaacaagcacatcccatatgtcccagtcgtctagctacggcaatctccattctcacgatcggctgtcttatccaccacattccgttagtcccactgatatcaatacctctctcccccccatgtcttcctttcacagaggctcgacctctagtagtccatatgtggcagctagccacacacctcccattaacgggagcgactccatcctcggcacccgaggaaacgcagctggaagcagccagacaggtgacgccctgggtaaggccttggcctccatctattccccagaccacactagctccagcttcccatctaatcctagtacccctgtaggctcgccctctccactgactggcaccagtcaatggcccaggccaggaggccaagctccctccagccctagctacgaaaatagcttacactctctccagtccaggatggaagatcgacttgaccgactcgatgacgccatccatgttctgcgcaaccacgctgttggcccttccaccagcctgcccgcggggcactccgacatccactcactgctcggcccctctcataatgcccctatcgggtctctgaactccaattacggcgggagcagcctcgtggcaagtagtcggagcgcgtccatggtggggactcaccgcgaagattctgtgtccctgaatggaaatcattcggtactatcgagtaccgtgacaacctctagcacagatctaaatcataaaacccaggagaattatcgcggcggcctgcagtcccaaagcggaaccgtcgttactactgagataaaaacggaaaacaaggagaaggacgaaaacctgcacgagccccccagctctgatgatatgaaatctgacgatgaatcttcccagaaagatataaaggtgtcttctagaggaaggacctccagcactaacgaggatgaggatctgaaccctgaacagaaaatcgaaagagagaaggagagacggatggccaacaacgcacgggagcgcctcagggttagggatattaatgaagcctttaaggagctcggtcggatgtgccagctgcacctaaaatccgaaaaacctcagacaaaacttctgatcctgcatcaggcggtggctgtgatattgagtttagaacagcaggttcgtgagcggaacctgaacccgaaagccgcgtgcctgaagaggcgggaggaagagaaagtgtctgccgtgtccgctgaaccgcctaccacacttcctgggacacatcctgggttgtccgaaactacgaatcccatgggccacatgtag

SEQ ID NO: 136204 - DNA, 2046 bp, Artificial Sequence
  derived and/or modified sequence
atggccgccttcagcgtgctgcggccccgggtgcccggcagcagcgggacgtgggccgccgaccccgacgcatcaacagcggtgagcccctctttgaggtttggcgggcgcgagccagctcgccctacccggggtggtgcaacaaagtggcctaaaatgaatccccagcagcaacgaatggccgcgatcggcacagacaaggaactatctgacttactggactttagcgccatgttttccccccctgtgaacagcggaaaaaccaggcccactacactaggttcaagtcagttctctgggtcaggaattgatgaaagaggaggaaccacgagttggggtacatccggtcagccaagcccatcttatgacagcagccgagggttcacagactcaccccactacagcgatcacctgaacgattcacgcctaggcgcccatgaaggcctttcccctaccccttttatgaactctaatttaatggggaagaccagcgagagaggctcattttccctgtactcacgagatactgggttacctggctgccagtcaagtctgcttcgccaggatctgggactcgggtctccagctcaactctctagctccggtaagcctggcaccgcttattattcattcagtgctacctccagccggcgtagacccttgcatgactccgctgctctggacccactccaagccaagaaggttaggaaggtaccgccaggtctgccctcctcagtttacgctccgagccctaattccgacgacttcaatcgggaatctccgtcatacccttcaccaaagccgccgacctcaatgttcgcatctaccttctttatgcaggatggcacccataattcatcagatctgtggtctagttctaacggaatgagccagccagggtttgggggtattctgggaacgtcaacaagtcacatgtcccagtccagctcgtacgggaacttgcattcccacgatcgactgagctacccaccacactcggtgagtccaaccgatattaacacttccttgcctccaatgtcttcctttcaccgcgggtctacatctagctccccatatgttgctgcctctcacacacctcccatcaatggatcagacagcatcctagggactaggggcaacgctgctggctcatctcagactggcgacgctctaggcaaggcccttgctagcatttactcgcctgaccatacaagtagctcctttccttctaatccaagcacccccgtgggatcccccagtccccttaccggaacttcccagtggcccaggccgggggggcaggcacccagcagcccatcatatgaaaatagtttgcacagcctgcagtcacggatggaggacagactcgataggttggacgatgccatccatgtgctgcggaatcacgccgtggggccctccacttctttaccagcaggccattccgatatccactccttgctcggccctagccacaatgcacctatcggatcactgaattccaattacgggggtagcagcctggtcgcgtcttccaggtcagccagcatggtgggaacgcatagagaggacagcgtgtcactgaatggaaaccattctgtcctgagtagtaccgtcaccacatcgtctacagatcttaaccataaaacccaggaaaactacaggggaggcctgcagtctcaatccggcactgtggtcacgacagagatcaagacggagaataaggagaaagacgagaatctccacgagcccccctcctctgacgacatgaaaagtgacgacgaaagtagccaaaaggacattaaggtgtccagcaggggccgtacttcatcgactaacgaggatgaggacttgaatccagaacagaaaatcgagcgcgagaaggaacgaaggatggcaaacaatgccagggaaagactacgcgtaagggacatcaacgaagcttttaaagaactcggccgtatgtgccagttgcatctaaagtcagagaaaccgcagacaaaactgctgatcttacatcaagccgttaccactattggcccttag

SEQ ID NO: 136205 - DNA, 2049 bp, Artificial Sequence
  derived and/or modified sequence
atgaacccccagcagcagcggatggccgccatcggcaccgacaaggagctgtctgacctgttggacttttcagctatgttttcccccccagtgaactcaggcaaaacgagaccgactacactcggctcctcccagttttccggtagcggcatcgacgagagaggaggaaccaccagctgggggactagcgggcagccctcacctagctacgattccagtcgcggattcacagatagtccccactactctgaccacctgaatgatagtaggctcggggcccacgagggactgtccccgaccccatttatgaactccaacctaatgggtaagactagcgaacgaggatcattcagcctttattcaagagacacaggcttacccggctgtcagagctccctgcttcggcaggacttaggcctggggagccctgcccagctgagctcttctggaaaaccaggtacagcctactacagctttagcgccaccagcagcaggcgacgaccgctgcatgactccgccgcattggaccctttacaggctaaaaaggtccggaaagtccccccaggcctgccgtcctcagtctatgcacctagcccaaacagcgatgattttaatagagaatcaccatcatatcctagccccaaaccacctacttccatgttcgcttccaccttcttcatgcaagacggtacccacaacagctcggacctttggtctagcagtaacggtatgtcacagcctggtttcggtggaatccttggaaccagcacttcacacatgtctcaatcttcatcttatggcaacttgcattcgcacgaccggctgtcctaccctcctcatagtgtatctcccactgacatcaatacctccctacctcccatgtcaagtttccacagaggctcgacaagcagttccccctacgtggccgcctctcataccccaccaatcaatggatccgatagcatcctgggcacacggggaaatgctgccgggagtagtcagacgggagacgccctgggaaaggcgctggcgagcatttacagtcctgatcatacaagctccagtttcccttccaacccttctacacctgttgggtcgccatcacccttgacaggtactagccagtggccccgacctggcggccaagctccaagcagcccaagctacgaaaattcgctgcatagcctgcaatctcggatggaagatcgactggatagattggacgatgccatccatgtcctgcggaatcacgccgtcggtccctccaccagcctgccagccgggcattccgacattcacagtctgctcggacccagtcacaacgctccaataggcagtctaaactctaactacggaggaagttcgctcgtcgcatccagtcggtccgcctccatggtggggacgcacagagaggattcagtgagccttaatggaaatcactctgtgctttcatccactgtcactacttcctcgacagacctgaaccacaagacacaggaaaattatagaggtgggttgcaatcacagtctggcacggtagttactacagaaattaaaaccgaaaataaagagaaagatgagaatttgcacgagccaccttccagtgacgatatgaagagcgacgacgagtccagccaaaaggacattaaagtgtcttcccgagggcggacttctagcaccaacgaggacgaggatctgaaccctgaacagaaaatcgagcgggagaaagaaagaaggatggcaaataatgccagggaacgcctccgcgtgagggatatcaatgaggcattcaaagagctggggcggatgtgccagctgcacctcaagtcggagaagccacagactaagttacttatactgcaccaggctgttgctgtcattctgtcactggagcagcaggtaagagaacgtaatcttaaccccaaggctgcttgcctgaagagacgggaagaagaaaaagtttccgcagtatccgctgaacctcctacgaccctgcctggcacacaccccgggctaagcgaaaccaccaaccctatgggtcacatgtag

SEQ ID NO: 136206 - DNA, 2049 bp, Artificial Sequence
  derived and/or modified sequence
atgaatccacagcagcagcgaatggcagctataggtaccgataaagagctttccgacctgctggacttttccgccatgtttagtccgcctgtcaattctggaaagactagaccgacaaccttgggctccagccagttctctgggagtggcatcgatgaacggggagggacaacctcctggggtacgagtggtcagcctagcccgagctacgattcttccagaggtttcaccgattccccccattacagcgaccatctcaatgactcacgactgggggctcatgaaggcctaagcccaaccccctttatgaacagcaatctaatggggaagacttccgagcggggatccttcagcctgtattctagagatactgggcttcccggatgccaaagctccctgctgcgccaggatctgggtctgggcagtcctgcccagttaagctccagcgggaagcccggaactgcttactatagcttctcagccacctcatctaggagacgccctttgcacgactccgctgccctcgatcctcttcaggccaagaaagttcgaaaggtgcccccaggcctgccctcgagcgtctacgcgccatcacctaattccgacgatttcaacagagagtccccatcctatccatctcctaagcctccaaccagcatgttcgcctccaccttctttatgcaggatggaacccataactcttcagacttgtggtcaagttcaaacggaatgtcacaacccggatttggcggaattctcggcacatccactagtcacatgtcccagtcttcaagctatggcaacttgcattcccacgataggctatcatacccgccacattctgtatcacccactgatattaacacaagtcttcctcctatgagcagcttccaccgtggttctacgtcttcctccccttacgtggccgcttctcatacccctccaattaacggtagcgattcaatcttgggcacacggggaaacgctgcagggtcaagtcagaccggagatgcattagggaaggccctcgccagcatttactcacccgatcatacctcctcaagcttcccctcaaaccctagtacaccagtcgggagtcctagcccactgacaggtacgagccagtggccaagaccgggagggcaagccccttcttccccctcttatgagaacagcctacactccctgcaatcacgcatggaagatcgactggatagactggatgacgcaattcacgtcctgaggaaccatgctgtgggcccaagcacaagtcttcctgctggccactccgacattcactcgctgcttggcccttcccataatgcgcctatcgggagcctcaactccaactatgggggttcaagtctggtcgccagcagtcggagcgcgtcgatggtggggacccatagagaggactccgtttctcttaacggaaatcactctgtcttaagctccacagtgactacaagtagtaccgatctcaaccataaaacccaggaaaactatagaggaggcctgcagtctcaaagcggcacggtggtgacgaccgagattaaaactgagaataaggaaaaagatgagaaccttcacgagccgccaagttctgatgacatgaaatcagatgatgagagtagccagaaggacatcaaggtgtctagtcggggtaggaccagctcaacaaacgaggacgaggatctgaatcctgagcagaagatagaacgggaaaaagagcgaaggatggctaataacgctagagagcgactgagggttcgagacatcaacgaggcgtttaaagaactcgggaggatgtgtcagctgcacttaaagtcagagaaaccacagaccaagttgctgattcttcatcaagctgttgcggtgattcttagcctggagcaacaggtcagggaaagaaacctgaatcccaaggccgcatgtctcaagcggagagaggaggagaaggtatccgccgtctctgcggaaccccctacaactctccctggcacgcaccctggcctgtctgaaacaacaaaccctatgggtcatatgtag

SEQ ID NO: 136207 - DNA, 2046 bp, Artificial Sequence
  derived and/or modified sequence
atggccgcattcagcgtgctgcgccctcgagtgcccggaagctctggaacctgggcggcagaccccgatgcctccacagcagtcagccctagcctgagatttggtgggagggagcctgcaagacctacacggggtggagccaccaaatggcccaagatgaatccccagcagcagcggatggcggctatcgggacagacaaagagctgtctgacctactggatttcagcgccatgttctcacctcccgtgaacagcggaaagacgcgacctaccactttagggagctctcagttctctggttctggaattgacgaacgtgggggtactacttcctggggtacctccgggcaacccagtccgtcctatgacagttctcgcggatttaccgattctccccactattcagaccatttgaacgacagtaggttaggagctcacgaggggctatcccccaccccttttatgaatagtaacctgatggggaaaacttccgagcgtggatcattcagcctgtactccagggataccggtctccccggatgtcagagtagcttactgaggcaggacctaggattgggttcgccagcccaacttagcagctctggcaaaccaggaactgcttactactccttctcagcaaccagctccagacgccgaccactgcacgatagtgccgctctggatcccctccaagccaagaaggtccgtaaagtaccgcctggactccctagctctgtttacgccccatctccgaattctgacgactttaaccgagagtcaccaagctatcctagcccgaagccacctacctccatgttcgcatccacatttttcatgcaggatggaactcataattcctccgacctatggagctcaagcaacggcatgtcccagcccggattcggcggtatcttgggtacctcaaccagtcacatgtcgcagagctctagctacggcaacctgcatagccatgaccgcctctcctaccccccacacagtgtgtcacctacagacattaacacttcactgccaccaatgagctccttccacagaggcagcacatccagcagtccgtatgtcgccgctagccacactccacctatcaacgggagcgatagcatacttggcactcgcggaaacgccgctgggtcatcccagactggggatgccctgggaaaagcactcgccagtatatattcaccagatcataccagtagtagctttccctccaatccctccacaccagttggatcgccctctccactcactggaacatcccagtggccaaggccaggcggacaagcccctagttcaccctcctacgagaattcattgcattcattgcagtccaggatggaggatagactggaccgcctggacgatgccatccacgttttgagaaaccatgcggtaggaccaagtacaagtctgcccgcaggtcacagcgacatccacagcctgctcgggccatcccacaatgccccaataggctccttgaattccaactatggaggcagctcacttgtggcctcgtctaggtccgcaagcatggtggggactcatagagaggacagtgtgtctttgaatggaaatcactcagtcctgtcctcgactgttacgacttcctccaccgacctaaaccataagacacaggaaaattaccggggaggtctacagtcccagtcagggacggtggtcactacagagatcaagacagagaacaaggagaaagatgagaacctgcatgaacctccttccagtgatgatatgaaatcagatgacgagtccagccaaaaagacatcaaagtgtctagtcgcggtcgcacaagttcaaccaatgaggatgaagacctaaaccccgaacagaagatcgagcgggaaaaagagaggcgaatggcaaataacgcacgggagcgccttcgcgtgcgagatatcaacgaggccttcaaggagcttggtcggatgtgtcaattgcacctgaaaagtgaaaaaccacagaccaaattactgatcctgcaccaggcagtgacaaccatcggcccttag

SEQ ID NO: 136208 - DNA, 2049 bp, Artificial Sequence
  derived and/or modified sequence
atgaaccctcagcaacagcgaatggctgcaattggaactgataaggaactctcagacctgcttgacttttccgctatgtttagtccccctgttaactcaggcaaaaccaggcctactaccctaggatcttcacagttcagcggtagcggcatagacgaacggggaggcactaccagctggggcacctcggggcaacctagtccttcctacgactctagtcgcggattcacagatagtcctcactattccgatcatttgaacgatagtcgactgggcgcacacgaagggctgtctccaacgccctttatgaattcaaacctgatgggcaagacctcggagagaggatcattcagtctgtacagtagggacactgggctcccaggatgtcagtcctctctattgagacaagacttagggctcggctcccctgcacagctgagcagcagtgggaagcccggaactgcatactatagcttttcggctacgagttcccgcagaagacccttgcacgattccgctgctctggatccactgcaggcaaagaaggtgcgcaaggtgccacccggtttgccttcttctgtgtatgcgccttctcccaacagtgatgattttaaccgcgagagccccagttacccttcgcctaaaccccctacttccatgttcgcctccacatttttcatgcaggatggcacccacaactccagtgacctgtggtcttcttccaatggcatgagccagcctggattcgggggtatcttagggacgtccactagccacatgtcccagtctagcagttacgggaacctgcactctcacgatcggctgagctacccccctcattctgtctctccaactgacattaatacttccctgccccctatgagttctttccataggggcagcacatcttcatctccatatgttgccgcaagtcatacgcctccaatcaacgggtcagactccattttgggcacgcggggaaatgctgcaggctcttcgcagactggcgatgccctcggcaaagccttggccagcatctattcacccgaccatacatcgtcttcattccccagtaacccttcaaccccggtgggcagcccgtcaccccttactggcacatcacagtggcccagaccaggcggacaggcgccaagctcaccttcttacgagaacagcctccactctcttcaatcccggatggaggatcgcctagatcgactggatgatgcaattcacgtgttgcgcaaccatgcggttggaccatccacttctcttcctgctggccactcagacatccacagcctgctgggcccaagccacaatgcacccatcggctcactcaacagcaattatggtggttcaagtctggtggcttcctcacggtcagcctccatggtgggcactcatcgagaggactccgtgtcattgaacggcaatcattctgtgctgtcttccactgttactacatcaagtacagacttaaatcacaagacccaagagaattataggggtggcttacagagccaaagcggaacggttgtcacaactgagattaagacagaaaacaaagagaaggacgagaatctgcatgaaccaccctcctcggacgatatgaaaagtgacgatgaaagttctcagaaggacatcaaagtcagcagccggggaagaactagctccacaaatgaggacgaggatctgaacccggagcaaaagatcgagcgggaaaaagaacgcaggatggcgaataatgccagggagaggctgcgagtgagagacatcaacgaagcttttaaagagctgggacggatgtgtcagttgcatcttaaatcagaaaagccgcagaccaaacttttgatcctgcaccaggctgtggctgtgattctgtcccttgaacaacaggttagggagagaaatcttaatccaaaggcggcttgtctgaaacgtcgagaagaagaaaaggtcagtgcagtgagcgcggaaccacccaccaccctccctggcacacaccctggactgagtgaaactacaaacccgatgggccatatgtag

SEQ ID NO: 136209 - DNA, 6061 bp, Artificial Sequence
  derived and/or modified sequence
cgcggagggatccggaggcgagccgagcgcggtggtgaggccgcctcagcgaaaaaaatgtccgcctgaagagacccacaagttctattcggggggaccgacagcccgccccgggaggaaggggcggccaggcccgaaagccgcctccccctcccagacccgagagctcgtgcggggcaaagtgaaccgagccgctgggcggtgcaaggggaagcccaagcccgttctcccggccaaagtgaactttaatcggggtggttggatgcggagacggggcggcaggacctgctagaagtggccgaagatgaatccccagcaacaacgcatggccgctatagggaccgacaaggagctgagcgacctactggacttcagtgcgatgttttccccacctgttaatagtgggaaaactagaccaactacactgggaagcagtcaattcagtggatcaggtattgatgaaagaggaggtacaacatcttggggaacaagtggtcaaccaagtccttcctatgattcatctagaggttttacagacagccctcattacagtgatcacttgaatgacagtcgattaggagcccatgaaggcttgtccccaacacctttcatgaactcaaatctgatgggaaaaacatcagagagaggctcattttccctgtacagcagagatactggattaccaggctgtcaatctagtctcctgagacaagatctggggcttgggagcccagcacagctatcttcttcaggaaaacctgggacagcatactattcattctctgctacaagttccaggaggagaccactccatgactctgcagcgcttgatcccttgcaagcaaaaaaagtcagaaaggtgcctcctggtttgccttcttctgtatatgcaccatccccaaattcagatgatttcaaccgtgaatctcctagttatccatctcctaagccaccaaccagtatgttcgctagcactttctttatgcaagatgggacccacaattcttctgacctttggagttcatcaaatgggatgagccagcctggttttggtggaattctggggacctccacttcccacatgtctcaatccagtagttatggcaaccttcattcacatgaccgcttgagttatcctccacactcagtttcaccaacagacataaacacgagtcttccaccaatgtccagctttcatcgcggcagtaccagcagttcaccttacgttgctgcctcacacactcctcccatcaatggatcagacagcattctaggaaccagagggaatgctgctggaagctcacagacaggtgatgcacttggaaaggctttggcatctatttattctcctgaccataccagcagtagttttccgtcaaatccatcaacaccagttggatcaccttcacctctcacaggtaccagtcagtggccaagacctggagggcaagcaccttcatccccaagctatgaaaactcactccactccctgcagtctcgaatggaggatcgtttagacagactggatgatgcaatccatgtgctgcggaaccatgctgtgggaccttccaccagtttgcctgctggtcacagtgatatacatagtttattgggaccatcccataatgcaccaattggaagcctcaattcaaactatggaggatcaagccttgttgcaagcagtcgatcagcttcaatggttggaactcatcgggaagactctgtcagtctcaatggcaatcattcagtcctgtctagtacagtcactacttcaagcacagacctgaaccataaaacacaagaaaattatagaggtggcttgcaaagtcagtctggaactgttgttacaacagaaatcaagactgaaaacaaagaaaaggatgaaaaccttcatgaacctccttcatcagatgacatgaagtcagatgatgaatcctcccaaaaagatatcaaggtttcatctagaggcagaacaagcagtactaatgaagatgaggatttgaaccctgaacagaagatagaaagggagaaggagaggcggatggctaacaatgccagagaacgcttacgcgtgcgggatattaatgaagcattcaaagagcttggccgaatgtgtcagcttcacttgaagagtgaaaaaccccaaacaaaactccttattcttcatcaagccgtggcagtcatccttagtctagaacagcaagtcagagagaggaaccttaaccccaaagcagcctgccttaagagaagggaagaagaaaaagtttctgccgtatcggcagagccgccaaccacactgccaggaacccatcctgggcttagtgaaactaccaaccctatgggtcatatgtaaacatcagccagttccagagttatcagtaggctagatagaaggtgacctctcctcataaggacttggacaactcagattatctgaagacacaaacctgacaggagggagaagaaaaaacaaaacacttgaaccaagaaactcaaatgtaatcctacgatcaaagcaactggtcaacacttccatcagaagtgaagataggaagctcatcagatagaacatcagcccatgagatgtttgcaacaaatcttttgttgcaagcagtgtgtcgcttctgcacaatcagagactgtctcgatctctccactcaccgtggaagttgccttgtgcctaaactgaattgacaaatgcattgtaactacaaattttatttattgttatgaaactgtaaggtctacatataaagggaaaaagttaatgtggaaagctgatctacactcagctgatgccagcatacattaaagcggttcacgtgcagagaacaaagcagtgacaaccattggcccttagcattcccggcatacctattagtgtcttaaaaaggaagggaaaagtcttttgttgccctctcctatcctcttgccatatgaatagcgttttccatgaaataggaaaatattacttggtatagcatttctcttgctctcattttttgatttatttttattttctctttgtgggtgttatatttgatctctaaatctgaacagtttatggtcacagtccagcctcctccgtgcagccctgtgtgctttgcacatttaccttacagtggtaagcagagaccatctgtgaccatagcctagctagcattttaaaaggggaaattttgttctctaggttttcccccaaataaacattgctttatttctaataataaccaagacttttcaagcttctagatctcataggaaagcttgtaatagcaaaattgtaaattacaagggaagaatctactttttagaaatcgctttgttttccaagcagtaagtactacatacagtacttgtaaagtgttagctgtaagtaagcacaaaatacatttaaaatacaaagacgattttttcaggctgtgattatggtgaacataacaaaacccagtagtcaccaaggcaggtagtgtgataaatgaacacaccactctgaggctaattacctaatggaatacaagagcaatggtcacccgtatttccttatcctagcctttatttctctgtcatttggatggctggtcaatggggaagaattgagtgggtgatttaatcaactgcaaaccatctgcccctgtcccaaaatgatgagccagattagcattaaaccagtacttgtcagtccatcttaatactgttcattaaggcactctctgtctctaatccttaggagttgttttaaaagacataatcactttgaacttccatgaaacctgtcttccaccacaacaaccctgggagagaaaaacatgctaaaggaggtatcttggcttaataattccttatagccaatatcaacagtggcaatcagcacacagaggaaaggacccaaatcactatgtagcttaaagatttctgttaatttgaaagaacaaaaacaagacagaacttctggtactctaatcaggatgattcctaacaagtcagtcatttgtgaacttagtggactttttggttactttaatttgcatatattctccagttacatcggactctatctgtggccttgttcttcatttcagtgttaatcagctaaacagaagttgttgcttatgatgtgtgagtgaacatatgccactgcctggcctttttttcttcagagcttgttgtctttttcgctatattagactttgcagtatgcccagaagctttccttcataaaatagaaagaaaaaaacatttggcttatttttcactgtagctagtcttttatacaataatcttgtaagaaaatttcttgaattctaaatattactctttctagatttttgaaatcaaaaagttttcagtaaaaagtttcttactttattttattatattaggtagtaaaaaatgtagggttatttaccataacctgttcattaatatcagaaatttacaatagcattttaagaccatagtaggattctagcataccgtgtagtacctatggagtattgtaagagctaattgttggagatgaattgcttctcatcttgttctccagtttccattgttggtttattgcagatttgtatcctgtgtcaaattcaaggtattattgataaaccttttcaaccagcagcaagaagttcaaatttttttctgtcactgtaacagaaaacacaatatgtatataacatttatgtagcaataaatgtgccatcttttttttaacacagtaaaatagtgagttttttacatttctctttctcaaataataatgtattttgttttattttctccatctcattcgtcccagaaacactcacactgcttttcctaactgcattaccgacattatctgggaaacccttcaggacagaatcaggcttgtggagctaagttggcaatctggtctagagcttctctagcttgtgcttttctcctcttgccctcactactgacggtggccttttaaccttttcctaaagattgaccaaacagcaactagtagttatagaaaatctactcatttgtagatacagagaaaaatgaagaagatggaaaaagactcaaaagaggctttttaagttattcttcaaagcacttttcacatttccccataccctttctcacaaaaaaagtgtcataattaagtaatggtattgtttactgtttaaaagttaaaagatcaaaaatttgcttttatcccagtttttaaccacaaaaaaaagcgtagggattatccatgaggacttcatgccaagcaagaacctcaaacaaactagacaaactttttttttgacagtgaatgactttttgtaggacctgtgcgtgcgaaacccatggcaattgtcacatcctcttggtatgctggcagattgcttctcttggtgaattatgaaatccactgttcacattgggtgcctaacagaacattttgcttcttgtgggatttagtgaaaactattaaacttgttaagttgattttatacaaaacgataaataaaaagctctaagaagaaaatgtataatcttagagctgaaataaaatatagagaccatctagtaaatgacctcattaatatatctgtgaaaactgagactcagattgtatgtctctaagaacacataattagtaacagatcaagacacttaaaactttccctacaaaacctccctgccttgactttctctttctctttgcagatttctaggccgcttctgctcagtgtcttcattttcttccatatttgttttatttcatttttcttttctatagttcatgttttctttttccttggaaactcaaaatttaaacacacgtcgtgtgtgtgtgtgtgtgtgtgtctgtgtgtgtgtgacttaaagaatcttaagctttggcattaaatagtcctcgattcaaatctaagctcaacatctgattaacttcattttcctatctgaaaaatggagataacattagaattgtgtaagtattgaatgaaacaatgtatggaaagctcttatggttcttgtcacctaagaagtacttaataaatgataaatatttttaaataaataatattataaccaa

SEQ ID NO: 136210 - DNA, 2474 bp, Artificial Sequence
  derived and/or modified sequence
acgcgcggtgtctgcgccgactgcagccctcctggacgggagcctctgggcccagcttagggtggcgtccagcgtgacctactcgggaatggcagccttcagtgtcctgcggcctcgggttccgggaagctcggggacctgggcagcggatccagatgcttccacagctgtgtctccgtcgctccgcttcgggggccgagaaccagcaagaccaacgcgaggaggcgccacgaagtggccgaagatgaatccccagcaacaacgcatggccgctatagggaccgacaaggagctgagcgacctactggacttcagtgcgatgttttccccacctgttaatagtgggaaaactagaccaactacactgggaagcagtcaattcagtggatcaggtattgatgaaagaggaggtacaacatcttggggaacaagtggtcaaccaagtccttcctatgattcatctagaggttttacagacagccctcattacagtgatcacttgaatgacagtcgattaggagcccatgaaggcttgtccccaacacctttcatgaactcaaatctgatgggaaaaacatcagagagaggctcattttccctgtacagcagagatactggattaccaggctgtcaatctagtctcctgagacaagatctggggcttgggagcccagcacagctatcttcttcaggaaaacctgggacagcatactattcattctctgctacaagttccaggaggagaccactccatgactctgcagcgcttgatcccttgcaagcaaaaaaagtcagaaaggtgcctcctggtttgccttcttctgtatatgcaccatccccaaattcagatgatttcaaccgtgaatctcctagttatccatctcctaagccaccaaccagtatgttcgctagcactttctttatgcaagatgggacccacaattcttctgacctttggagttcatcaaatgggatgagccagcctggttttggtggaattctggggacctccacttcccacatgtctcaatccagtagttatggcaaccttcattcacatgaccgcttgagttatcctccacactcagtttcaccaacagacataaacacgagtcttccaccaatgtccagctttcatcgcggcagtaccagcagttcaccttacgttgctgcctcacacactcctcccatcaatggatcagacagcattctaggaaccagagggaatgctgctggaagctcacagacaggtgatgcacttggaaaggctttggcatctatttattctcctgaccataccagcagtagttttccgtcaaatccatcaacaccagttggatcaccttcacctctcacaggtaccagtcagtggccaagacctggagggcaagcaccttcatccccaagctatgaaaactcactccactccctgcagtctcgaatggaggatcgtttagacagactggatgatgcaatccatgtgctgcggaaccatgctgtgggaccttccaccagtttgcctgctggtcacagtgatatacatagtttattgggaccatcccataatgcaccaattggaagcctcaattcaaactatggaggatcaagccttgttgcaagcagtcgatcagcttcaatggttggaactcatcgggaagactctgtcagtctcaatggcaatcattcagtcctgtctagtacagtcactacttcaagcacagacctgaaccataaaacacaagaaaattatagaggtggcttgcaaagtcagtctggaactgttgttacaacagaaatcaagactgaaaacaaagaaaaggatgaaaaccttcatgaacctccttcatcagatgacatgaagtcagatgatgaatcctcccaaaaagatatcaaggtttcatctagaggcagaacaagcagtactaatgaagatgaggatttgaaccctgaacagaagatagaaagggagaaggagaggcggatggctaacaatgccagagaacgcttacgcgtgcgggatattaatgaagcattcaaagagcttggccgaatgtgtcagcttcacttgaagagtgaaaaaccccaaacaaaactccttattcttcatcaagcagtgacaaccattggcccttagcattcccggcatacctattagtgtcttaaaaaggaagggaaaagtcttttgttgccctctcctatcctcttgccatatgaatagcgttttccatgaaataggaaaatattacttggtatagcatttctcttgctctcattttttgatttatttttattttctctttgtgggtgttatatttgatctctaaatctgaacagtttatggtcacagtccagcctcctccgtgcagccctgtgtgctttgcacatttaccttacagtggtaagcagagaccatctgtgaccatagcctagctagcattttaaaaggggaaattttgttctctaggttttccccc

SEQ ID NO: 136211 - DNA, 4076 bp, Artificial Sequence
  derived and/or modified sequence
ggggaagcccaagcccgttctcccggccaaagtgaactttaatcggggtggttggatgcggagacggggcggcagaagtggccgaagatgaatccccagcaacaacgcatggccgctatagggaccgacaaggagctgagcgacctactggacttcagtgcgatgttttccccacctgttaatagtgggaaaactagaccaactacactgggaagcagtcaattcagtggatcaggtattgatgaaagaggaggtacaacatcttggggaacaagtggtcaaccaagtccttcctatgattcatctagaggttttacagacagccctcattacagtgatcacttgaatgacagtcgattaggagcccatgaaggcttgtccccaacacctttcatgaactcaaatctgatgggaaaaacatcagagagaggctcattttccctgtacagcagagatactggattaccaggctgtcaatctagtctcctgagacaagatctggggcttgggagcccagcacagctatcttcttcaggaaaacctgggacagcatactattcattctctgctacaagttccaggaggagaccactccatgactctgcagcgcttgatcccttgcaagcaaaaaaagtcagaaaggtgcctcctggtttgccttcttctgtatatgcaccatccccaaattcagatgatttcaaccgtgaatctcctagttatccatctcctaagccaccaaccagtatgttcgctagcactttctttatgcaagatgggacccacaattcttctgacctttggagttcatcaaatgggatgagccagcctggttttggtggaattctggggacctccacttcccacatgtctcaatccagtagttatggcaaccttcattcacatgaccgcttgagttatcctccacactcagtttcaccaacagacataaacacgagtcttccaccaatgtccagctttcatcgcggcagtaccagcagttcaccttacgttgctgcctcacacactcctcccatcaatggatcagacagcattctaggaaccagagggaatgctgctggaagctcacagacaggtgatgcacttggaaaggctttggcatctatttattctcctgaccataccagcagtagttttccgtcaaatccatcaacaccagttggatcaccttcacctctcacaggtaccagtcagtggccaagacctggagggcaagcaccttcatccccaagctatgaaaactcactccactccctgcagtctcgaatggaggatcgtttagacagactggatgatgcaatccatgtgctgcggaaccatgctgtgggaccttccaccagtttgcctgctggtcacagtgatatacatagtttattgggaccatcccataatgcaccaattggaagcctcaattcaaactatggaggatcaagccttgttgcaagcagtcgatcagcttcaatggttggaactcatcgggaagactctgtcagtctcaatggcaatcattcagtcctgtctagtacagtcactacttcaagcacagacctgaaccataaaacacaagaaaattatagaggtggcttgcaaagtcagtctggaactgttgttacaacagaaatcaagactgaaaacaaagaaaaggatgaaaaccttcatgaacctccttcatcagatgacatgaagtcagatgatgaatcctcccaaaaagatatcaaggtttcatctagaggcagaacaagcagtactaatgaagatgaggatttgaaccctgaacagaagatagaaagggagaaggagaggcggatggctaacaatgccagagaacgcttacgcgtgcgggatattaatgaagcattcaaagagcttggccgaatgtgtcagcttcacttgaagagtgaaaaaccccaaacaaaactccttattcttcatcaagccgtggcagtcatccttagtctagaacagcaagtcagagagaggaaccttaaccccaaagcagcctgccttaagagaagggaagaagaaaaagtttctgccgtatcggcagagccgccaaccacactgccaggaacccatcctgggcttagtgaaactaccaaccctatgggtcatatgtaaacatcagccagttccagagttatcagtaggctagatagaaggtgacctctcctcataaggacttggacaactcagattatctgaagacacaaacctgacaggagggagaagaaaaaacaaaacacttgaaccaagaaactcaaatgtaatcctacgatcaaagcaactggtcaacacttccatcagaagtgaagataggaagctcatcagatagaacatcagcccatgagatgtttgcaacaaatcttttgttgcaagcagtgtgtcgcttctgcacaatcagagactgtctcgatctctccactcaccgtggaagttgccttgtgcctaaactgaattgacaaatgcattgtaactacaaattttatttattgttatgaaactgtaaggtctacatataaagggaaaaagttaatgtggaaagctgatctacactcagctgatgccagcatacattaaagcggttcacgtgcagagaacaaagcagtgacaaccattggcccttagcattcccggcatacctattagtgtcttaaaaaggaagggaaaagtcttttgttgccctctcctatcctcttgccatatgaatagcgttttccatgaaataggaaaatattacttggtatagcatttctcttgctctcattttttgatttatttttattttctctttgtgggtgttatatttgatctctaaatctgaacagtttatggtcacagtccagcctcctccgtgcagccctgtgtgctttgcacatttaccttacagtggtaagcagagaccatctgtgaccatagcctagctagcattttaaaaggggaaattttgttctctaggttttcccccaaataaacattgctttatttctaataataaccaagacttttcaagcttctagatctcataggaaagcttgtaatagcaaaattgtaaattacaagggaagaatctactttttagaaatcgctttgttttccaagcagtaagtactacatacagtacttgtaaagtgttagctgtaagtaagcacaaaatacatttaaaatacaaagacgattttttcaggctgtgattatggtgaacataacaaaacccagtagtcaccaaggcaggtagtgtgataaatgaacacaccactctgaggctaattacctaatggaatacaagagcaatggtcacccgtatttccttatcctagcctttatttctctgtcatttggatggctggtcaatggggaagaattgagtgggtgatttaatcaactgcaaaccatctgcccctgtcccaaaatgatgagccagattagcattaaaccagtacttgtcagtccatcttaatactgttcattaaggcactctctgtctctaatccttaggagttgttttaaaagacataatcactttgaacttccatgaaacctgtcttccaccacaacaaccctgggagagaaaaacatgctaaaggaggtatcttggcttaataattccttatagccaatatcaacagtggcaatcagcacacagaggaaaggacccaaatcactatgtagcttaaagatttctgttaatttgaaagaacaaaaacaagacagaacttctggtactctaatcaggatgattcctaacaagtcagtcatttgtgaacttagtggactttttggttactttaatttgcatatattctccagttacatcggactctatctgtggccttgttcttcatttcagtgttaatcagctaaacagaagttgttgcttatgatgtgtgagtgaacatatgccactgcctggcctttttttcttcagagcttgttgtctttttcgctatattagactttgcagtatgcccagaagctttccttcataaaatagaaagaaaaaaacatttggcttatttttcactgtagctagtcttttatacaataatcttgtaagaaaa

SEQ ID NO: 136212 - protein, 179 aa, Artificial Sequence
  derived and/or modified sequence
MSTGSLSDVEDLQEVEMLECDGLKMDSNKEFVTSNESTEESSNCENGSPQKGRGGLGKRRKAPTKKSPLSGVSQEGKQVQRNAANARERARMRVLSKAFSRLKTTLPWVPPDTKLSKLDTLRLASSYIAHLRQILANDKYENGYIHPVNLTWPFMVAGKPESDLKEVVTASRLCGTTAS

SEQ ID NO: 136213 - DNA, 540 bp, Artificial Sequence
  derived and/or modified sequence
atgagcaccggcagcctgagcgacgtggaggacctgcaggaggtggagatgctggagtgcgacggcctgaagatggacagcaacaaggagttcgtgaccagcaacgagagcaccgaggagagcagcaactgcgagaacggcagcccccagaagggcagaggcggcctgggcaagagaagaaaggcccccaccaagaagagccccctgagcggcgtgagccaggagggcaagcaggtgcagagaaacgccgccaacgccagagagagagccagaatgagagtgctgagcaaggccttcagcagactgaagaccaccctgccctgggtgccccccgacaccaagctgagcaagctggacaccctgagactggccagcagctacatcgcccacctgagacagatcctggccaacgacaagtacgagaacggctacatccaccccgtgaacctgacctggcccttcatggtggccggcaagcccgagagcgacctgaaggaggtggtgaccgccagcagactgtgcggcaccaccgccagctag

SEQ ID NO: 136214 - DNA, 540 bp, Artificial Sequence
  derived and/or modified sequence
atgagtaccggcagcctctccgatgttgaagacctgcaggaagtggaaatgctggagtgcgatggcctcaagatggactctaacaaagagttcgtgacctccaatgagtctacagaggagtcctccaactgcgagaacggcagcccccaaaagggacgaggaggtctgggaaaaagaaggaaagctccgacaaagaagagtccactctctggcgtgtcacaggaggggaaacaagttcagcgcaacgcggccaatgctagagaacgggctaggatgcgcgtgctcagtaaagcattctcccggctgaaaacgacgctgccgtgggttcccccggataccaagctttctaaactcgataccctgcgcctggcctctagctatattgcccacttaagacagattctggcaaatgacaagtacgaaaatgggtatattcatcctgtgaatcttacgtggccttttatggtagccggcaagccagagtctgacctgaaggaagtggtgaccgccagtcgtctgtgtgggacgacagcctcctag

SEQ ID NO: 136215 - DNA, 540 bp, Artificial Sequence
  derived and/or modified sequence
atgagcaccggatctctgtcagatgtcgaagatctccaggaggtggagatgctcgagtgcgatgggttaaagatggattcgaacaaggagtttgttacctctaatgagtccaccgaggagagttcaaattgcgaaaacggaagccctcagaaaggcagaggcggcctgggaaagaggcgaaaggctcctaccaaaaagtccccactgtcaggagtgtctcaagaggggaagcaagtgcagcggaacgcggcgaatgcaagggaaagggctcgcatgagggttctaagtaaagctttcagccgactcaagacaacactcccttgggttccccctgataccaagctgagcaaactggataccctacggctggcaagcagctacatagctcacctccggcagatcttggcaaacgacaaatacgaaaacgggtacatccatcctgtaaacctcacgtggcctttcatggttgccgggaaacccgaatccgacctgaaggaggttgtgaccgctagccgcctgtgtggcacaaccgcctcttag

SEQ ID NO: 136216 - DNA, 540 bp, Artificial Sequence
  derived and/or modified sequence
atgagcacaggcagcctgagtgatgtggaggacctgcaggaggtggagatgctggagtgtgatggcctgaagatggacagcaacaaggagtttgtgaccagcaatgaaagcacagaggagagcagcaactgtgaaaatggcagcccccagaagggccggggcggcctgggcaagaggaggaaggcccccaccaagaagagccccctgagcggcgtgtcccaggagggcaagcaggtgcagagaaatgctgccaatgcccgggagcgggccaggatgagggtgctgagcaaggccttcagccggctgaagaccaccctgccctgggtgcccccagacaccaagctgagcaagctggacaccctgcggctggccagcagctacatcgcccacctgcggcagatcctggccaatgacaagtatgaaaatggctacatccaccctgtgaacctgacctggcccttcatggtggccggcaagccagagagtgacctgaaggaggtggtgacagccagccggctgtgtggcaccacagccagctag

SEQ ID NO: 136217 - DNA, 540 bp, Artificial Sequence
  derived and/or modified sequence
atgagcaccggcagcctgagcgacgtggaggacctgcaggaggtggaaatgctggaatgtgacggactcaagatggattccaataaagaattcgtcacttcaaatgagagtaccgaggagtcgtcaaactgcgagaatggctccccacaaaaggggcgggggggactaggaaagcgaagaaaagcccctacaaaaaagagcccactcagtggtgtgagccaggagggcaagcaggtgcagcgaaatgctgctaatgcccgggaacgcgcgcgaatgcgtgtcctcagtaaagcgttctctagacttaaaaccacactgccatgggttcctccagatactaaactgtccaaactcgatactttgcgccttgcctcctcttatatagcgcacctaagacaaatcctggcaaacgacaagtatgagaatggttacatacatcctgtgaacttaacctggcctttcatggtcgcgggtaaaccagagagtgacctgaaggaggtagttaccgcctcccgcctctgcggcaccaccgctagctag

SEQ ID NO: 136218 - DNA, 540 bp, Artificial Sequence
  derived and/or modified sequence
atgagcaccggcagcctgagcgacgtggaggacctgcaggaggtggagatgctggagtgtgacggtctgaagatggacagcaataaagaattcgtcacctctaatgagtctactgaagagtcgtctaattgcgaaaatgggtccccacagaaggggaggggcggtcttgggaagcgcagaaaggcaccaacgaagaaaagcccactcagtggcgtgtcacaggagggcaagcaagttcagcggaatgcggccaatgccagagagagggcccgaatgagggtgcttagtaaggccttctcgcgtctgaagactacgctgccatgggtccctccggacaccaagttgtctaagctagatacactgcgtctagccagctcctacattgcccatctgcgccagatcctagcaaacgacaaatacgagaacggatatatccaccccgttaatctgacatggccttttatggtagccggcaagcccgagtcagacctcaaggaggtggtgacagcgagcagactttgcggcactactgctagctag

SEQ ID NO: 136219 - DNA, 540 bp, Artificial Sequence
  derived and/or modified sequence
atgtcaacagggagcctttcagatgtggaggacctgcaggaggtcgaaatgctggagtgcgacggattgaagatggactccaataaagagttcgtgacctccaacgagagcacggaggaatcctccaactgtgagaatggtagtcctcagaaaggcaggggcggtctggggaagcgccgaaaggccccaactaagaagtctcccctttccggagttagtcaggagggtaagcaagtccaaaggaatgctgctaatgccagagaaagggctaggatgagagtgttgtcgaaagcctttagccgcctgaagaccacactgccttgggttcctccagacaccaagcttagtaaactggatactttgcgtttagcatccagctatatcgctcacctccgacagatcctggctaatgacaaatacgagaacggctatatccatcctgtaaatctgacatggccattcatggtggcaggaaagcccgaaagcgaccttaaagaggtggtgacagcatcgcggctatgtgggaccacagctagctag

SEQ ID NO: 136220 - DNA, 540 bp, Artificial Sequence
  derived and/or modified sequence
atgagcactggctccctctccgacgtcgaggatttgcaggaagtggagatgctggaatgtgatgggctgaagatggattctaataaagaattcgtgacaagcaacgagtcaacggaagagtccagcaactgcgaaaacggcagcccccagaaaggaaggggcggattgggcaagcgcaggaaagccccaactaagaagtctcccctgtctggtgtcagtcaagagggcaagcaggtgcaaaggaatgccgcaaacgcgagagaaagggcccgaatgcgagtgctgagcaaggccttctcacggctgaagactaccctgccttgggtgccaccagacaccaagctgagtaaattggacacgctcaggctggcttcatcatacattgcacatttgcgacaaatcctcgctaatgacaagtacgaaaacggctacatacaccctgtgaaccttacctggccatttatggttgctggaaagcctgagtccgacctgaaggaggttgtaacagcatcaaggctgtgcggaactacagcttcatag

SEQ ID NO: 136221 - DNA, 3010 bp, Artificial Sequence
  derived and/or modified sequence
cttcctcgctttctctgtctctctgtctctctctctctctctccctcgtccactcccccaaacatgtccaccggctccctcagcgatgtggaggaccttcaagaggtggagatgttggaatgtgacgggttgaaaatggattcgaacaaggaatttgtgacttccaacgagagcaccgaggagagctccaactgcgagaatgggtctccccagaagggccgcggcggcctgggcaagaggaggaaggcgcccaccaagaagagccccctgagcggggtcagccaggaggggaagcaggtccagcgcaacgccgccaacgcgcgagagcgggcccgcatgcgagtgctgagcaaggccttctccagactcaagaccaccctgccctgggtgccccccgacaccaagctctccaagctggacacgctcaggctggcgtccagctacatcgcccacttgaggcagatcctggctaacgacaaatacgagaacgggtacattcacccggtcaacctgacgtggccctttatggtggccgggaaacccgagagtgacctgaaagaagtggtgaccgcgagccgcttatgtggaaccaccgcgtcctgaccttggagtttggtacctggagcgagagcttctccgcccttccaccaaccccacaggccgcttcgcgggtggagccctctgcctggccatggaggaaggatcccgctaggctggtcccgactggagaagctgctctgccaggtgtgctctctgtcagcaatagtgacctcattaccaaggggtggcgaccacattaccaagcgcaattccccattctccaagggctgagaacttcggtgacttcatccacctgtctatttgcacatggaggacttttcaagatgtcaggatacccttccatcaccccaccaccgccaccccaacttgactttcaagaacacatttcaagctctggccagagtcccgttcctcaaattcatgtgttctctcctttctaccagagggatagagcccatgcctcaacctatccagagttcaaatcaaagagtccccagtgtgattcaattgattgcctttcacgtttcgcaaattttccaatctcccactcacgtttttacaaaacgaatgctctaaattctgaggattccaggcaggccatccatagagaaataactttttcttgctcattcccttacaaccccaatctatacatggatttttagaaagtcttcatggctatctatagttccctaccaataatttgaagcctttgctttaggcaggaggcatgtggctatgaatagggaacacgtagatttgaccctggttctgcatccaactagctgtttcttgaaagagcctggatcctcagttttcccatctctgcaagcagggataacggtaatgagaatgataataatcattatatgcagaccttcctctttcatcttacagaggcttagtgaggctcagatgagattatatctgtaaaatcccttggtaaaggaaaagctccgtgaaaatgtcagttacttttactaagtggcgggtagtgaattatctgtgcctagacccaaactgaaagtgtctcaggcaggaagttccaagggatgtatgtttatagcatccaggcaatgatctttttttttccacgaactaaaatacctctttttggtatctattgactctttctctctctctttctgtctctctttcaccttgcacctctccctaatgctctctaaatttgtccagagctttctttttcctagaaatccagagagcaaagtcagagcctggcacctgcagataggataacactggtgtctgatggtgaggctgcccagtcccatcaggagcctcagccaaggaggggcctgggcacactcaggtccccatggttgtccattgaatggagtgaggatcaaggtgggaatgactgggtggtggctgccactagcccaggaacatgacaacgtgaccacaccacacatgcctccaacacacacccacagtctaaacatctctccttctcagtgagcccttctcccattccagatcatcagcacacccacacccaccataggtctctctcctccggtcttcccagaagggtaaaactcccagcctaccctgctccagcttcagcccaggtagttggtgtgtctcaatatgaatagggggtgagtagcttcatagaaagaatggggaactcccttggcctcaagccagtatagtttggaagttgggggtcggggatgttaagggtggggagtatcctgcctgtgacctctaggttatgaaaactatcttagaaggtgcttttagaaagaaccaggagaacaaccaaagcagcttacagacgcctgaacggagaatgaagtgtttcaagtaagcgagtctgcaagttctcagaagcagacagatatccaatctggactgcagccagggaagtcctctctctcgctctctctctctctctctctctctctcattgcttgtatgacttcacaagcaactcaggatcattctagcaggctttcccactgtcaaacagagacttcattctaaaaagagaagtgataaacagagctccagctctgctagctctatatatttactgattagtggaaagcactgaccaaggagacttttaagccagtggttcttcagaatcacctagatgcctccaccctccagagatcctgagtccaggagtctgaagtggggccccaggtgatgtcattgctgctggtcccaggaccacattttaacaatcaatgttttcaggtgtctcatgaggaacactacttaatgcagtgggaaagaaaatatttcagaggagaattttttcttaaagaagctgcatattctggactctaatttagtttaattcactccaggatggcacgcaggattcctaattcttaaatgccattcagtctggacttcaaatcacttgtcttcagaaaataaaagatttgttccacccgggtgtgtggacatg

SEQ ID NO: 136222 - DNA, 4551 bp, Artificial Sequence
  derived and/or modified sequence
ccacgactctgggagtggggaaacagagagccggttcctctgctgcagaagtcctcggggttccttctcacaactctgcgaaggggaaagggttgtgagacccaaccagaccccaactccagctcccagcaggaggtggctgcgccacactcgggaggcctcttggtttcagggtctctctgtctctctctcaccctcttcctcgctttctctgtctctctgtctctctctctctctctccctcgtccactcccccaaacatgtccaccggctccctcagcgatgtggaggaccttcaagaggtggagatgttggaatgtgacgggttgaaaatggattcgaacaaggaatttgtgacttccaacgagagcaccgaggagagctccaactgcgagaatgggtctccccagaagggccgcggcggcctgggcaagaggaggaaggcgcccaccaagaagagccccctgagcggggtcagccaggaggggaagcaggtccagcgcaacgccgccaacgcgcgagagcgggcccgcatgcgagtgctgagcaaggccttctccagactcaagaccaccctgccctgggtgccccccgacaccaagctctccaagctggacacgctcaggctggcgtccagctacatcgcccacttgaggcagatcctggctaacgacaaatacgagaacgggtacattcacccggtcaacctgacgtggccctttatggtggccgggaaacccgagagtgacctgaaagaagtggtgaccgcgagccgcttatgtggaaccaccgcgtcctgaccttggaggtgcgagtctgggaaaggcgcgctcccggggggagcgggccccgggaaggcgacccctgccctcagtgctctctgtctctgcttccccctcgcaatgctcctctctctgtcccaccccgcgagaacactttacaacgacgaggagattcgtttccaaaccagaggagatcaattgtacttacaaagattcccatctatttaactttattaacttctaccgtgaatgactctgcaagccttgctggtccaagtgcaatatgtaattataaatatataaatagataagagcctatcaatgtatcttttgtacaatatgttgtaaaatgtagatcataggatagctgactttgacagtcacatttataaagtaattcacttaaagatatatatttttttcaaacaagttttgctacttttgaaaataaatctttctttatattgctaaaagctctgatatttggagtgatttttaaaaatatttggaataagaaagtgggaaactatggggaagcttgataatgaaaatggttcttttaaacctcaatctaaacttctagagatagaagaaaattgcatatgagtttcataatgaagatgcagattatgttttatactgaaaccttaaaaaagaaatatatcggttacttttaaggctaatagaaattatataactgaaaacaaagaatgggcagtattaaagttatccacagttatacagttcaagagtaaaacgcaccagaaaaaggaaatccaattttcatggattccaccgtatgactgctgacacgggcgagaaagtaaactccaccttttgtcaccttccaggtgtgagcatagctgcaaactagtgaagaaataatagaagctatgaaagatgtaaattccataacccttagggtgtgtttcaggattttcaaagctctgcagcatacattatctacatttcttattaatagtccattaattaattctaacaataaacccgcatgcctgccttttggttgctgttagcgggtgcgtttagctcccgccacgacttccggcggactgggtttaatttaaacattttccaggctacggaacagctcctaagggaagattaagttgagataaacagagaagcaaggccgaggagcctgcgacccgggtccctcactgccccagcgcagcccgcggcggccgatgcgccagatgccaccggggctgtttaatgttcggggttatgaccgcagtgtttacaagacgtcttcggttatttatactgttattcctcgcagagagccttgaaacttccgcttcatttgctctttcttttcgattttttacccttttttctcggcttagtttggtacctggagcgagagcttctccgcccttccaccaaccccacaggccgcttcgcgggtggagccctctgcctggccatggaggaaggatcccgctaggctggtcccgactggagaagctgctctgccaggtgtgctctctgtcagcaatagtgacctcattaccaaggggtggcgaccacattaccaagcgcaattccccattctccaagggctgagaacttcggtgacttcatccacctgtctatttgcacatggaggacttttcaagatgtcaggatacccttccatcaccccaccaccgccaccccaacttgactttcaagaacacatttcaagctctggccagagtcccgttcctcaaattcatgtgttctctcctttctaccagagggatagagcccatgcctcaacctatccagagttcaaatcaaagagtccccagtgtgattcaattgattgcctttcacgtttcgcaaattttccaatctcccactcacgtttttacaaaacgaatgctctaaattctgaggattccaggcaggccatccatagagaaataactttttcttgctcattcccttacaaccccaatctatacatggatttttagaaagtcttcatggctatctatagttccctaccaataatttgaagcctttgctttaggcaggaggcatgtggctatgaatagggaacacgtagatttgaccctggttctgcatccaactagctgtttcttgaaagagcctggatcctcagttttcccatctctgcaagcagggataacggtaatgagaatgataataatcattatatgcagaccttcctctttcatcttacagaggcttagtgaggctcagatgagattatatctgtaaaatcccttggtaaaggaaaagctccgtgaaaatgtcagttacttttactaagtggcgggtagtgaattatctgtgcctagacccaaactgaaagtgtctcaggcaggaagttccaagggatgtatgtttatagcatccaggcaatgatctttttttttccacgaactaaaatacctctttttggtatctattgactctttctctctctctttctgtctctctttcaccttgcacctctccctaatgctctctaaatttgtccagagctttctttttcctagaaatccagagagcaaagtcagagcctggcacctgcagataggataacactggtgtctgatggtgaggctgcccagtcccatcaggagcctcagccaaggaggggcctgggcacactcaggtccccatggttgtccattgaatggagtgaggatcaaggtgggaatgactgggtggtggctgccactagcccaggaacatgacaacgtgaccacaccacacatgcctccaacacacacccacagtctaaacatctctccttctcagtgagcccttctcccattccagatcatcagcacacccacacccaccataggtctctctcctccggtcttcccagaagggtaaaactcccagcctaccctgctccagcttcagcccaggtagttggtgtgtctcaatatgaatagggggtgagtagcttcatagaaagaatggggaactcccttggcctcaagccagtatagtttggaagttgggggtcggggatgttaagggtggggagtatcctgcctgtgacctctaggttatgaaaactatcttagaaggtgcttttagaaagaaccaggagaacaaccaaagcagcttacagacgcctgaacggagaatgaagtgtttcaagtaagcgagtctgcaagttctcagaagcagacagatatccaatctggactgcagccagggaagtcctctctctcgctctctctctctctctctctctctctcattgcttgtatgacttcacaagcaactcaggatcattctagcaggctttcccactgtcaaacagagacttcattctaaaaagagaagtgataaacagagctccagctctgctagctctatatatttactgattagtggaaagcactgaccaaggagacttttaagccagtggttcttcagaatcacctagatgcctccaccctccagagatcctgagtccaggagtctgaagtggggccccaggtgatgtcattgctgctggtcccaggaccacattttaacaatcaatgttttcaggtgtctcatgaggaacactacttaatgcagtgggaaagaaaatatttcagaggagaattttttcttaaagaagctgcatattctggactctaatttagtttaattcactccaggatggcacgcaggattcctaattcttaaatgccattcagtctggacttcaaatcacttgtcttcagaaaataaaagatttgttccacccgggtgtgtggacatg

SEQ ID NO: 136223 - protein, 410 aa, Artificial Sequence
  derived and/or modified sequence
MEAENAGSYSLQQAQAFYTFPFQQLMAEAPNMAVVNEQQMPEEVPAPAPAQEPVQEAPKGRKRKPRTTEPKQPVEPKKPVESKKSGKSAKSKEKQEKITDTFKVKRKVDRFNGVSEAELLTKTLPDILTFNLDIVIIGINPGLMAAYKGHHYPGPGNHFWKCLFMSGLSEVQLNHMDDHTLPGKYGIGFTNMVERTTPGSKDLSSKEFREGGRILVQKLQKYQPRIAVFNGKCIYEIFSKEVFGVKVKNLEFGLQPHKIPDTETLCYVMPSSSARCAQFPRAQDKVHYYIKLKDLRDQLKGIERNMDVQEVQYTFDLQLAQEDAKKMAVKEEKYDPGYEAAYGGAYGENPCSSEPCGFSSNGLIESVELRGESAFSGIPNGQWMTQSFTDQIPSFSNHCGTQEQEEESHA

SEQ ID NO: 136224 - DNA, 1233 bp, Artificial Sequence
  derived and/or modified sequence
atggaggccgagaacgccggcagctacagcctgcagcaggcccaggccttctacaccttccccttccagcagctgatggccgaggcccccaacatggccgtggtgaacgagcagcagatgcccgaggaggtgcccgcccccgcccccgcccaggagcccgtgcaggaggcccccaagggcagaaagagaaagcccagaaccaccgagcccaagcagcccgtggagcccaagaagcccgtggagagcaagaagagcggcaagagcgccaagagcaaggagaagcaggagaagatcaccgacaccttcaaggtgaagagaaaggtggacagattcaacggcgtgagcgaggccgagctgctgaccaagaccctgcccgacatcctgaccttcaacctggacatcgtgatcatcggcatcaaccccggcctgatggccgcctacaagggccaccactaccccggccccggcaaccacttctggaagtgcctgttcatgagcggcctgagcgaggtgcagctgaaccacatggacgaccacaccctgcccggcaagtacggcatcggcttcaccaacatggtggagagaaccacccccggcagcaaggacctgagcagcaaggagttcagagagggcggcagaatcctggtgcagaagctgcagaagtaccagcccagaatcgccgtgttcaacggcaagtgcatctacgagatcttcagcaaggaggtgttcggcgtgaaggtgaagaacctggagttcggcctgcagccccacaagatccccgacaccgagaccctgtgctacgtgatgcccagcagcagcgccagatgcgcccagttccccagagcccaggacaaggtgcactactacatcaagctgaaggacctgagagaccagctgaagggcatcgagagaaacatggacgtgcaggaggtgcagtacaccttcgacctgcagctggcccaggaggacgccaagaagatggccgtgaaggaggagaagtacgaccccggctacgaggccgcctacggcggcgcctacggcgagaacccctgcagcagcgagccctgcggcttcagcagcaacggcctgatcgagagcgtggagctgagaggcgagagcgccttcagcggcatccccaacggccagtggatgacccagagcttcaccgaccagatccccagcttcagcaaccactgcggcacccaggagcaggaggaggagagccacgcctag

SEQ ID NO: 136225 - DNA, 1233 bp, Artificial Sequence
  derived and/or modified sequence
atggaagctgaaaacgctggcagctatagcttgcagcaggcccaggctttttatacgtttccatttcagcagctgatggccgaggcacccaatatggccgtagtgaatgagcagcagatgcccgaagaagtgcccgccccagcacccgcacaggagccggtccaggaggcccctaagggcagaaagcggaagccacggaccactgaacccaagcaacctgtcgagccaaagaagccagtcgagtcgaagaaatccggaaagagtgctaagtccaaggagaaacaggaaaaaatcaccgatacctttaaggtcaaaagaaaggtggacagattcaacggtgtaagtgaggcggagttactgactaagacactgccagatatcctgaccttcaacctcgatattgtcattatagggattaacccaggccttatggctgcatacaaaggacaccattatcccggaccaggcaatcacttttggaaatgtttgtttatgtccggactgtccgaagtgcagcttaatcatatggatgatcacaccctccctggaaagtacggaattggctttactaacatggtggagagaacaactccaggttccaaggacctatcgtcgaaagaatttcgggaagggggtagaattctagtgcagaagcttcagaaataccagccgcgcatagcagtgttcaacggaaagtgcatttacgagatcttctctaaggaagtgtttggagtgaaagtgaaaaacttagagtttggtctgcagccccataagataccagacactgagacactatgttacgtgatgccatcatcttcggcccggtgtgcccagtttcccagagcgcaggataaagtacattattatattaagcttaaagacctacgcgaccagctgaaagggatcgagcggaacatggatgtccaagaagttcagtatacctttgaccttcagcttgcacaggaagacgcgaagaaaatggcagttaaggaagagaagtatgatcctggttatgaagctgcctatggcggtgcctacggtgaaaatccatgtagttcggaaccctgtggcttttcctctaacggcctgattgaatccgtagaacttcgcggcgagagcgctttttcaggcatccctaatgggcagtggatgacccagagcttcacggaccaaatacccagcttttctaatcattgcggcacacaagaacaggaagaagaatcccacgcgtag

SEQ ID NO: 136226 - DNA, 1233 bp, Artificial Sequence
  derived and/or modified sequence
atggaggccgagaatgccggcagctacagcctgcagcaggcccaggccttctacaccttccccttccagcagctgatggccgaggcccccaacatggctgtggtgaatgagcagcagatgcctgaggaggtgcctgccccagccccagcccaggagcctgtgcaggaggcccccaagggcaggaagaggaagcccaggaccacagagcccaagcagcctgtggagcccaagaagcctgtggagagcaagaagagcggcaagagcgccaagagcaaggagaagcaggagaagatcacagacaccttcaaggtgaagaggaaggtggaccgcttcaacggggtgtctgaggccgagctgctgaccaagaccctgcctgacatcctgaccttcaacctggacatcgtcatcatcggcatcaaccctggcctgatggccgcctacaagggccaccactacccaggccctggcaaccacttctggaagtgcctcttcatgagcggcctgtctgaggtgcagctgaaccacatggatgaccacaccctgcccgggaagtatggaattggcttcaccaacatggtggagaggaccaccccaggcagcaaggacctgagcagcaaggagttccgggagggcggccgcatcctggtgcagaagctgcagaagtaccagcccagaattgctgtgttcaacgggaagtgcatctatgagatcttcagcaaggaggtgtttggagtgaaggtgaagaacctggagtttggcctgcagccccacaagatcccagacacagagaccctgtgctacgtgatgcccagcagcagcgcccgctgtgcccagttcccccgggcccaggacaaggtgcactactacatcaagctgaaggacctgcgggaccagctgaagggcatcgagaggaacatggatgtgcaggaggtgcagtacacctttgacctgcagctggcccaggaggatgccaagaagatggctgtgaaggaggagaagtatgaccccggctatgaggccgcctacggcggggcctacggggagaacccctgcagcagcgagccctgtggcttcagcagcaatggcctcatcgagagcgtggagctgcggggggagagcgccttcagcggcatccccaacggccagtggatgacccagagcttcacagaccagatccccagcttcagcaaccactgcggcacccaggagcaggaggaggagagccacgcctag

SEQ ID NO: 136227 - DNA, 1233 bp, Artificial Sequence
  derived and/or modified sequence
atggaggccgagaacgccggcagctacagcctgcagcaggcccaggccttctatacgtttccctttcagcagcttatggccgaagcccccaatatggctgtagtgaacgaacagcagatgcctgaagaagttcccgcaccagcccctgcccaggaacctgtgcaggaggccccaaaagggaggaagcgtaagccccgcaccaccgaacctaagcagcctgtagagcctaaaaaacccgtcgagtccaaaaaaagtggaaagagtgccaagtccaaagaaaaacaggaaaagatcacggatacctttaaggtcaaacggaaagtggataggttcaacggcgtttcagaagccgagctcttgactaagacacttcccgacattctcacatttaatcttgacattgtcatcattggcatcaatcctggcctcatggcagcctataaggggcaccactatcccggtccaggaaaccacttttggaagtgcctattcatgtccggcttaagcgaggtgcagctgaatcacatggatgaccatacacttccaggtaaatacggcataggttttactaacatggtcgaaagaaccactcctggctccaaggatctcagctctaaagagttccgggaaggaggcagaattctggtgcagaaattgcagaaatatcagcctcgcatcgccgtgtttaatgggaagtgcatctacgaaatcttcagcaaggaggtctttggagtcaaggtgaagaacttggagtttgggttgcagccgcataagatccccgacaccgaaacgttgtgctatgttatgccgtccagtagcgcaagatgcgcacagttccctcgagcgcaagataaggttcactattatatcaagctgaaggatctccgagatcaactgaaggggatagagaggaatatggacgtacaagaagttcagtataccttcgaccttcagctcgctcaagaagatgcgaagaaaatggccgtgaaggaggaaaaatacgatcctgggtacgaagccgcatacggtggagcatatggcgaaaatccgtgcagtagcgagccctgtgggtttagcagcaacggtttaattgaatcagttgagttgaggggggagtcagccttttcaggcatcccaaacggtcagtggatgacccagtcctttaccgatcagatcccctctttcagtaaccattgtggaactcaagagcaggaggaagagtcccacgcctag

SEQ ID NO: 136228 - DNA, 1233 bp, Artificial Sequence
  derived and/or modified sequence
atggaagcagaaaatgccggaagctactccctgcaacaggcgcaggccttttatacattcccttttcaacagttgatggccgaagcgcctaacatggcagttgtgaatgagcagcagatgccagaggaggttccagccccagcccctgctcaggaacccgtccaggaggcacccaagggtaggaaacgcaagccaagaaccacagaacccaagcagccagtggagcccaaaaagcctgtggagagcaagaaatcaggcaagtccgcaaagtctaaagagaagcaggaaaaaatcacagacacattcaaagtgaagagaaaggtggatcgcttcaatggcgtcagcgaggccgagctcctcactaagacacttcccgatatcctcacttttaacctggatatagtaattattgggattaatcccggacttatggccgcttataagggccatcactatccaggtccaggcaaccatttttggaaatgtctttttatgtccggactctcagaagtgcagcttaaccatatggacgaccacactctccctggtaagtatggaatcgggttcacaaatatggtggagagaaccacccctggatcaaaggacttgagctccaaagagtttagggaaggaggcaggatacttgtccagaaattgcaaaaatatcaaccacgcatcgccgtcttcaatggcaaatgtatctacgagatctttagtaaggaggtgttcggcgtgaaagtgaagaacctggagttcggtctccagccacataaaatccccgatacagagacactctgttatgtcatgccttcgagcagcgccagatgcgctcaattccctcgagcacaggataaggtgcactactacattaagctcaaggacctcagagaccagctcaaagggatcgaaagaaacatggatgtgcaggaagtgcagtacacgttcgacttgcagctcgcacaggaggacgcaaagaagatggcagtgaaagaggagaagtacgaccctgggtatgaagcggcttatgggggtgcctacggagaaaacccatgttcatcagagccctgcggatttagttcaaatggtttgattgaaagcgtcgaactccggggagagtccgccttcagcgggatacccaatggccagtggatgacacagagcttcaccgatcaaattccctctttctccaatcattgtggcacccaggagcaagaagaggagagtcacgcctag

SEQ ID NO: 136229 - DNA, 3251 bp, Artificial Sequence
  derived and/or modified sequence
agtacgcgtgggatttggctccgaggaggcggaagtgcagcacagaaagggggtccgtgggggacggtagaagcctggaggaggagcttgagtccagccactgtctgggtactgccagccatcgggcccaggtctctggggttgtcttaccgcagtgagtaccacgcggtactacagagaccggctgcccgtgtgcccggcaggtggagccgcccgcatcagcggcctcggggaatggaagcggagaacgcgggcagctattcccttcagcaagctcaagctttttatacgtttccatttcaacaactgatggctgaagctcctaatatggcagttgtgaatgaacagcaaatgccagaagaagttccagccccagctcctgctcaggaaccagtgcaagaggctccaaaaggaagaaaaagaaaacccagaacaacagaaccaaaacaaccagtggaacccaaaaaacctgttgagtcaaaaaaatctggcaagtctgcaaaatcaaaagaaaaacaagaaaaaattacagacacatttaaagtaaaaagaaaagtagaccgttttaatggtgtttcagaagctgaacttctgaccaagactctccccgatattttgaccttcaatctggacattgtcattattggcataaacccgggactaatggctgcttacaaagggcatcattaccctggacctggaaaccatttttggaagtgtttgtttatgtcagggctcagtgaggtccagctgaaccatatggatgatcacactctaccagggaagtatggtattggatttaccaacatggtggaaaggaccacgcccggcagcaaagatctctccagtaaagaatttcgtgaaggaggacgtattctagtacagaaattacagaaatatcagccacgaatagcagtgtttaatggaaaatgtatttatgaaatttttagtaaagaagtttttggagtaaaggttaagaacttggaatttgggcttcagccccataagattccagacacagaaactctctgctatgttatgccatcatccagtgcaagatgtgctcagtttcctcgagcccaagacaaagttcattactacataaaactgaaggacttaagagatcagttgaaaggcattgaacgaaatatggacgttcaagaggtgcaatatacatttgacctacagcttgcccaagaggatgcaaagaagatggctgttaaggaagaaaaatatgatccaggttatgaggcagcatatggtggtgcttacggagaaaatccatgcagcagtgaaccttgtggcttctcttcaaatgggctaattgagagcgtggagttaagaggagaatcagctttcagtggcattcctaatgggcagtggatgacccagtcatttacagaccaaattccttcctttagtaatcactgtggaacacaagaacaggaagaagaaagccatgcttaagaatggtgcttctcagctctgcttaaatgctgcagttttaatgcagttgtcaacaagtagaacctcagtttgctaactgaagtgttttattagtattttactctagtggtgtaattgtaatgtagaacagttgtgtggtagtgtgaaccgtatgaacctaagtagtttggaagaaaaagtagggtttttgtatactagcttttgtatttgaattaattatcattccagctttttatatactatatttcatttatgaagaaattgattttcttttgggagtcacttttaatctgtaattttaaaatacaagtctgaatatttatagttgattcttaactgcataaacctagatataccattatcccttttatacctaagaagggcatgctaataattaccactgtcaaagaggcaaaggtgttgatttttgtatatgaagttaagcctcagtggagtctcatttgttagtttttagtggtaactaagggtaaactcagggttccctgagctatatgcacactcagacctctttgctttaccagtggtgtttgtgagttgctcagtagtaaaaactggcccttacctgacagagccctggctttgacctgctcagccctgtgtgttaatcctctagtagccaattaactactctggggtggcaggttccagagaatgcagtagaccttttgccactcatctgtgttttacttgagacatgtaaatatgatagggaaggaactgaatttctccattcatatttataaccattctagttttatcttccttggctttaagagtgtgccatggaaagtgataagaaatgaacttctaggctaagcaaaaagatgctggagatatttgatactctcatttaaactggtgctttatgtacatgagatgtactaaaataagtaatatagaatttttcttgctaggtaaatccagtaagccaataattttaaagattctttatctgcatcattgctgtttgttactataaattaaatgaacctcatggaaaggttgaggtgtatacctttgtgattttctaatgagttttccatggtgctacaaataatccagactaccaggtctggtagatattaaagctgggtactaagaaatgttatttgcatcctctcagttactcctgaatattctgatttcatacgtacccagggagcatgctgttttgtcaatcaatataaaatatttatgaggtctcccccacccccaggaggttatatgattgctcttctctttataataagagaaacaaattcttattgtgaatcttaacatgctttttagctgtggctatgatggattttattttttcctaggtcaagctgtgtaaaagtcatttatgttatttaaatgatgtactgtactgctgtttacatggacgttttgtgcgggtgctttgaagtgccttgcatcagggattaggagcaattaaattattttttcacgggactgtgtaaagcatgtaactaggtattgctttggtatataactattgtagctttacaagagattgttttatttgaatggggaaaataccctttaaattatgacggacatccactagagatgggtttgaggattttccaagcgtgtaataatgatgtttttcctaacatgacagatgagtagtaaatgttgatatatcctatacatgacagtgtgagactttttcattaaataatattgaaagattttaaaattcatttgaaagtctgatggcttttacaataaaagatattaagaattgttatccttaa

SEQ ID NO: 136230 - DNA, 1014 bp, Artificial Sequence
  derived and/or modified sequence
aattacagacacatttaaagtaaaaagaaaagtagaccgttttaatggtgtttcagaagctgaacttctgaccaagactctccccgatattttgaccttcaatctggacattgtcattattggcataaacccgggactaatggctgcttacaaagggcatcattaccctggacctggaaaccatttttggaagtgtttgtttatgtcagggctcagtgaggtccagctgaaccatatggatgatcacactctaccagggaagtatggtattggatttaccaacatggtggaaaggaccacgcccggcagcaaagatctctccaggtatttatgaaatttttagtaaagaagtttttggagtaaaggttaagaacttggaatttgggcttcagccccataagattccagacacagaaactctctgctatgttatgccatcatccagtgcaagatgtgctcagtttcctcgagcccaagacaaagttcattactacataaaactgaaggacttaagagatcagttgaaaggcattgaacgaaatatggacgttcaagaggtgcaatatacatttgacctacagcttgcccaagaggatgcaaagaagatggctgttaaggaagaaaaatatgatccaggttatgaggcagcatatggtggtgcttacggagaaaatccatgcagcagtgaaccttgtggcttctcttcaaatgggctaattgagagcgtggagttaagaggagaatcagctttcagtggcattcctaatgggcagtggatgacccagtcatttacagaccaaattccttcctttagtaatcactgtggaacacaagaacaggaagaagaaagccatgcttaagaatggtgcttctcagctctgcttaaatgctgcagttttaatgcagttgtcaacaagtagaacctcagtttgctaactgaagtgttttattagtattttactctagtggtgtaattgtaatgtagaacagttgtgtggtagtgtgaaccgtatg

SEQ ID NO: 136231 - protein, 188 aa, Artificial Sequence
  derived and/or modified sequence
MDCRKMARFSYSVIWIMAISKVFELGLVAGLGHQEFARPSRGYLAFRDDSIWPQEEPAIRPRSSQRVPPMGIQHSKELNRTCCLNGGTCMLGSFCACPPSFYGRNCEHDVRKENCGSVPHDTWLPKKCSLCKCWHGQLRCFPQAFLPGCDGLVMDEHLVASRTPELPPSARTTTFMLVGICLSIQSYY

SEQ ID NO: 136232 - protein, 172 aa, Artificial Sequence
  derived and/or modified sequence
MAISKVFELGLVAGLGHQEFARPSRGYLAFRDDSIWPQEEPAIRPRSSQRVPPMGIQHSKELNRTCCLNGGTCMLGSFCACPPSFYGRNCEHDVRKENCGSVPHDTWLPKKCSLCKCWHGQLRCFPQAFLPGCDGLVMDEHLVASRTPELPPSARTTTFMLVGICLSIQSYY

SEQ ID NO: 136233 - DNA, 2174 bp, Artificial Sequence
  derived and/or modified sequence
aatgatagagatattagggctagttaaccacagttttacaagactcctcttcccgcgtgtgggccattgtcatgctggtgggcgtcccgcccacctgaaaggtctccccgccccgactggggtttgttgttgaagaaggagaatccccggaaaggctgagtctccagctcaaggtcaaaacgtccaaggccgaaagccctccagtttcccctggacgccttgctcctgcttctgctacgaccttctggggaaaacgaatttctcattttcttcttaaattgccattttcgctttaggagatgaatgttttcctttggctgttttggcaatgactctgaattaaagcgatgctaacgcctcttttccccctaattgttaaaagctatggactgcaggaagatggcccgcttctcttacagtgtgatttggatcatggccatttctaaagtctttgaactgggattagttgccgggctgggccatcaggaatttgctcgtccatctcggggatacctggccttcagagatgacagcatttggccccaggaggagcctgcaattcggcctcggtcttcccagcgtgtgccgcccatggggatacagcacagtaaggagctaaacagaacctgctgcctgaatgggggaacctgcatgctggggtccttttgtgcctgccctccctccttctacggacggaactgtgagcacgatgtgcgcaaagagaactgtgggtctgtgccccatgacacctggctgcccaagaagtgttccctgtgtaaatgctggcacggtcagctccgctgctttcctcaggcatttctacccggctgtgatggccttgtgatggatgagcacctcgtggcttccaggactccagaactaccaccgtctgcacgtactaccacttttatgctagttggcatctgcctttctatacaaagctactattaatcgacattgacctatttccagaaatacaattttagatatcatgcaaatttcatgaccagtaaaggctgctgctacaatgtcctaactgaaagatgatcatttgtagttgccttaaaataatgaatacatttccaaaatggtctctaacatttccttacagaactacttcttacttctttgccctgccctctcccaaaaaactacttcttttttcaaaagaaagtcagccatatctccattgtgcctaagtccagtgtttctttttttttttttttttgagacggagtctcactctgtcacccaggctggactgcaatgacgcgatcttggttcactgcaacctccgcatccggggttcaagccattctcctgcctcagcctcccaagtaactgggattacaggcatgtgtcaccatgcccagctaatttttttgtatttttagtagagatgggggtttcaccatattggccagtctggtctcgaactcctgaccttgtgatccactcgcctcagcctctcgaagtgctgagattacacacgtgagcaactgtgcaaggcctggtgtttcttgatacatgtaattctaccaaggtcttcttaatatgttcttttaaatgattgaattatatgttcagattattggagactaattctaatgtggaccttagaatacagttttgagtagagttgatcaaaatcaattaaaatagtctctttaaaaggaaagaaaacatctttaaggggaggaaccagagtgctgaaggaatggaagtccatctgcgtgtgtgcagggagactgggtaggaaagaggaagcaaatagaagagagaggttgaaaaacaaaatgggttacttgattggtgattaggtggtggtagagaagcaagtaaaaaggctaaatggaagggcaagtttccatcatctatagaaagctatataagacaagaactcccctttttttcccaaaggcattataaaaagaatgaagcctccttagaaaaaaaattatacctcaatgtccccaacaagattgcttaataaattgtgtttcctccaagctattcaattcttttaactgttgtagaagacaaaatgttcacaatatatttagttgtaaaccaagtgatcaaactacatattgtaaagcccatttttaaaatacattgtatatatgtgtatgcacagtaaaaatggaaactatattgacctaaaaaaaaaaaaa

SEQ ID NO: 136234 - DNA, 1784 bp, Artificial Sequence
  derived and/or modified sequence
cctggatgttcaagggaacaatgacagagtgtgatttggatcatggccatttctaaagtctttgaactgggattagttgccgggctgggccatcaggaatttgctcgtccatctcggggatacctggccttcagagatgacagcatttggccccaggaggagcctgcaattcggcctcggtcttcccagcgtgtgccgcccatggggatacagcacagtaaggagctaaacagaacctgctgcctgaatgggggaacctgcatgctggggtccttttgtgcctgccctccctccttctacggacggaactgtgagcacgatgtgcgcaaagagaactgtgggtctgtgccccatgacacctggctgcccaagaagtgttccctgtgtaaatgctggcacggtcagctccgctgctttcctcaggcatttctacccggctgtgatggccttgtgatggatgagcacctcgtggcttccaggactccagaactaccaccgtctgcacgtactaccacttttatgctagttggcatctgcctttctatacaaagctactattaatcgacattgacctatttccagaaatacaattttagatatcatgcaaatttcatgaccagtaaaggctgctgctacaatgtcctaactgaaagatgatcatttgtagttgccttaaaataatgaatacatttccaaaatggtctctaacatttccttacagaactacttcttacttctttgccctgccctctcccaaaaaactacttcttttttcaaaagaaagtcagccatatctccattgtgcctaagtccagtgtttctttttttttttttttttgagacggagtctcactctgtcacccaggctggactgcaatgacgcgatcttggttcactgcaacctccgcatccggggttcaagccattctcctgcctcagcctcccaagtaactgggattacaggcatgtgtcaccatgcccagctaatttttttgtatttttagtagagatgggggtttcaccatattggccagtctggtctcgaactcctgaccttgtgatccactcgcctcagcctctcgaagtgctgagattacacacgtgagcaactgtgcaaggcctggtgtttcttgatacatgtaattctaccaaggtcttcttaatatgttcttttaaatgattgaattatatgttcagattattggagactaattctaatgtggaccttagaatacagttttgagtagagttgatcaaaatcaattaaaatagtctctttaaaaggaaagaaaacatctttaaggggaggaaccagagtgctgaaggaatggaagtccatctgcgtgtgtgcagggagactgggtaggaaagaggaagcaaatagaagagagaggttgaaaaacaaaatgggttacttgattggtgattaggtggtggtagagaagcaagtaaaaaggctaaatggaagggcaagtttccatcatctatagaaagctatataagacaagaactcccctttttttcccaaaggcattataaaaagaatgaagcctccttagaaaaaaaattatacctcaatgtccccaacaagattgcttaataaattgtgtttcctccaagctattcaattcttttaactgttgtagaagacaaaatgttcacaatatatttagttgtaaaccaagtgatcaaactacatattgtaaagcccatttttaaaatacattgtatatatgtgtatgcacagtaaaaatggaaactatattgacctaaaaaaaaaaaaa

SEQ ID NO: 136235 - DNA, 567 bp, Artificial Sequence
  derived and/or modified sequence
atggactgcagaaagatggccagattcagctacagcgtgatctggatcatggccatcagcaaggtgttcgagctgggcctggtggccggcctgggccaccaggagttcgccagacccagcagaggctacctggccttcagagacgacagcatctggccccaggaggagcccgccatcagacccagaagcagccagagagtgccccccatgggcatccagcacagcaaggagctgaacagaacctgctgcctgaacggcggcacctgcatgctgggcagcttctgcgcctgcccccccagcttctacggcagaaactgcgagcacgacgtgagaaaggagaactgcggcagcgtgccccacgacacctggctgcccaagaagtgcagcctgtgcaagtgctggcacggccagctgagatgcttcccccaggccttcctgcccggctgcgacggcctggtgatggacgagcacctggtggccagcagaacccccgagctgccccccagcgccagaaccaccaccttcatgctggtgggcatctgcctgagcatccagagctactactag

SEQ ID NO: 136236 - DNA, 567 bp, Artificial Sequence
  derived and/or modified sequence
atggattgccgtaaaatggctagatttagttattctgtcatctggatcatggcaatcagtaaggtgttcgagctgggtcttgtggccggactgggacaccaggaatttgcccgacctagcagggggtacctggcttttcgcgatgatagtatttggcctcaggaagaacccgctataaggcctaggtcatcacagcgggtgccgcctatgggaatacaacattcaaaagagttgaatagaacttgttgtctcaacggcggtacttgtatgcttgggagtttctgcgcctgcccgccctcgttttatgggagaaattgcgagcacgacgtgaggaaagagaattgcggcagtgttccgcatgacacgtggttgccaaaaaagtgttcgctgtgtaaatgttggcatggccagctgagatgctttccccaagcttttctcccggggtgtgacggcctcgtcatggatgaacacctggttgcctccaggacccctgagctccccccaagcgcacggaccaccactttcatgctggtgggtatttgtctctccattcagagttattactag

SEQ ID NO: 136237 - DNA, 567 bp, Artificial Sequence
  derived and/or modified sequence
atggactgcaggaagatggcccgcttctcctacagcgtcatctggatcatggccatcagcaaggtgtttgagctgggcctggtggccggcctgggccaccaggagtttgcccggcccagccggggctacctggccttcagagatgacagcatctggccccaggaggagcccgccatccggcccaggagcagccagagggtgccccccatgggcatccagcacagcaaggagctgaacagaacctgctgcctgaatggaggcacctgcatgctgggcagcttctgtgcctgcccccccagcttctacggcaggaactgtgaacatgatgtgaggaaagaaaactgtggctctgtgccccatgacacctggctgcccaagaagtgcagcctgtgcaagtgctggcacggccagctgcgctgcttcccccaggccttcctgcccggctgtgatggcctggtgatggatgagcacctggtggccagcaggaccccagagctgcccccatctgcccggaccaccaccttcatgctggtgggcatctgcctgagcatccagagctactactag

SEQ ID NO: 136238 - DNA, 567 bp, Artificial Sequence
  derived and/or modified sequence
atggactgccggaagatggcccggttcagctacagcgtgatctggatcatggccatctcaaaggtgttcgaactcggcctggtcgccggtctcgggcaccaggagtttgccaggccttcaagaggctatctggccttcagagatgacagtatatggcctcaggaggagccagccattagacccagaagctctcagagagttccacctatggggatacagcacagtaaagagctaaacagaacgtgttgtctgaatgggggcacatgtatgctcggatcgttttgtgcttgcccaccatccttttacgggagaaactgcgagcacgacgtgcgcaaggaaaattgcgggtccgttccgcatgatacttggctgcctaagaagtgtagcttgtgcaagtgctggcatgggcagctgaggtgtttcccccaggcatttctgccagggtgcgacggcctcgtcatggatgaacatctggtggcatcacgaacccctgaactacctccgtcagcaaggacaaccaccttcatgctggtgggaatctgtctcagcattcagagttactattag

SEQ ID NO: 136239 - DNA, 567 bp, Artificial Sequence
  derived and/or modified sequence
atggattgccggaagatggctcggttttcctatagcgtgatctggataatggccatatctaaggtcttcgagctcggtttagtggccggactagggcaccaggagttcgcacggccaagtcggggttatttagcgtttagggatgattcaatttggcctcaggaggagccagcaattaggcctaggtcgtctcagcgcgtaccaccaatgggtatccagcactcaaaagaactgaacaggacctgttgcctgaacggtgggacatgcatgctgggctcattttgcgcctgcccccctagcttctatgggaggaattgcgagcacgacgtgcggaaagagaactgcggctctgtgccgcatgatacctggctccctaaaaaatgctcgctgtgtaaatgctggcacggccaacttagatgtttcccccaggcatttctcccgggatgcgatggacttgtgatggatgagcacctggtggctagtcggacccccgagcttcccccatctgccagaacgacaaccttcatgctcgtgggtatttgtctgtctatacagagctattactag

SEQ ID NO: 136240 - DNA, 2513 bp, Artificial Sequence
  derived and/or modified sequence
tctatctcagtttcaagcttcctagtcttccccacacacacacacctagctcctcaggcggagagcacccctttcttggccacccgggtatcccccagggggagtacggggctcaaaacacccttctggaaaaacaaaggtggaagcaaatttcaggaagtaaaacttcctgaaataaaataaaatatcgaatgccttgagacccatacattttcaggttttcctaattaaagcaattactttccaccacccctccaacctggaatcaccaacttgattagagaaactgatttttcttttttctttttttttcccaaaagagtacctctgatcattttagcctgcaactaatgatagagatattagggctagttaaccacagttttacaagactcctcttcccgcgtgtgggccattgtcatgctggtgggcgtcccgcccacctgaaaggtctccccgccccgactggggtttgttgttgaagaaggagaatccccggaaaggctgagtctccagctcaaggtcaaaacgtccaaggccgaaagccctccagtttcccctggacgccttgctcctgcttctgctacgaccttctggggaaaacgaatttctcattttcttcttaaattgccattttcgctttaggagatgaatgttttcctttggctgttttggcaatgactctgaattaaagcgatgctaacgcctcttttccccctaattgttaaaagctatggactgcaggaagatggcccgcttctcttacagtgtgatttggatcatggccatttctaaagtctttgaactgggattagttgccgggctgggccatcaggaatttgctcgtccatctcggggatacctggccttcagagatgacagcatttggccccaggaggagcctgcaattcggcctcggtcttcccagcgtgtgccgcccatggggatacagcacagtaaggagctaaacagaacctgctgcctgaatgggggaacctgcatgctggggtccttttgtgcctgccctccctccttctacggacggaactgtgagcacgatgtgcgcaaagagaactgtgggtctgtgccccatgacacctggctgcccaagaagtgttccctgtgtaaatgctggcacggtcagctccgctgctttcctcaggcatttctacccggctgtgatggccttgtgatggatgagcacctcgtggcttccaggactccagaactaccaccgtctgcacgtactaccacttttatgctagttggcatctgcctttctatacaaagctactattaatcgacattgacctatttccagaaatacaattttagatatcatgcaaatttcatgaccagtaaaggctgctgctacaatgtcctaactgaaagatgatcatttgtagttgccttaaaataatgaatacatttccaaaatggtctctaacatttccttacagaactacttcttacttctttgccctgccctctcccaaaaaactacttcttttttcaaaagaaagtcagccatatctccattgtgcctaagtccagtgtttctttttttttttttttttgagacggagtctcactctgtcacccaggctggactgcaatgacgcgatcttggttcactgcaacctccgcatccggggttcaagccattctcctgcctcagcctcccaagtaactgggattacaggcatgtgtcaccatgcccagctaatttttttgtatttttagtagagatgggggtttcaccatattggccagtctggtctcgaactcctgaccttgtgatccactcgcctcagcctctcgaagtgctgagattacacacgtgagcaactgtgcaaggcctggtgtttcttgatacatgtaattctaccaaggtcttcttaatatgttcttttaaatgattgaattatatgttcagattattggagactaattctaatgtggaccttagaatacagttttgagtagagttgatcaaaatcaattaaaatagtctctttaaaaggaaagaaaacatctttaaggggaggaaccagagtgctgaaggaatggaagtccatctgcgtgtgtgcagggagactgggtaggaaagaggaagcaaatagaagagagaggttgaaaaacaaaatgggttacttgattggtgattaggtggtggtagagaagcaagtaaaaaggctaaatggaagggcaagtttccatcatctatagaaagctatataagacaagaactcccctttttttcccaaaggcattataaaaagaatgaagcctccttagaaaaaaaattatacctcaatgtccccaacaagattgcttaataaattgtgtttcctccaagctattcaattcttttaactgttgtagaagacaaaatgttcacaatatatttagttgtaaaccaagtgatcaaactacatattgtaaagcccatttttaaaatacattgtatatatgtgtatgcacagtaaaaatggaaactatattgacctaaa

SEQ ID NO: 136241 - DNA, 1771 bp, Artificial Sequence
  derived and/or modified sequence
cctggatgttcaagggaacaatgacagagtgtgatttggatcatggccatttctaaagtctttgaactgggattagttgccgggctgggccatcaggaatttgctcgtccatctcggggatacctggccttcagagatgacagcatttggccccaggaggagcctgcaattcggcctcggtcttcccagcgtgtgccgcccatggggatacagcacagtaaggagctaaacagaacctgctgcctgaatgggggaacctgcatgctggggtccttttgtgcctgccctccctccttctacggacggaactgtgagcacgatgtgcgcaaagagaactgtgggtctgtgccccatgacacctggctgcccaagaagtgttccctgtgtaaatgctggcacggtcagctccgctgctttcctcaggcatttctacccggctgtgatggccttgtgatggatgagcacctcgtggcttccaggactccagaactaccaccgtctgcacgtactaccacttttatgctagttggcatctgcctttctatacaaagctactattaatcgacattgacctatttccagaaatacaattttagatatcatgcaaatttcatgaccagtaaaggctgctgctacaatgtcctaactgaaagatgatcatttgtagttgccttaaaataatgaatacatttccaaaatggtctctaacatttccttacagaactacttcttacttctttgccctgccctctcccaaaaaactacttcttttttcaaaagaaagtcagccatatctccattgtgcctaagtccagtgtttctttttttttttttttttgagacggagtctcactctgtcacccaggctggactgcaatgacgcgatcttggttcactgcaacctccgcatccggggttcaagccattctcctgcctcagcctcccaagtaactgggattacaggcatgtgtcaccatgcccagctaatttttttgtatttttagtagagatgggggtttcaccatattggccagtctggtctcgaactcctgaccttgtgatccactcgcctcagcctctcgaagtgctgagattacacacgtgagcaactgtgcaaggcctggtgtttcttgatacatgtaattctaccaaggtcttcttaatatgttcttttaaatgattgaattatatgttcagattattggagactaattctaatgtggaccttagaatacagttttgagtagagttgatcaaaatcaattaaaatagtctctttaaaaggaaagaaaacatctttaaggggaggaaccagagtgctgaaggaatggaagtccatctgcgtgtgtgcagggagactgggtaggaaagaggaagcaaatagaagagagaggttgaaaaacaaaatgggttacttgattggtgattaggtggtggtagagaagcaagtaaaaaggctaaatggaagggcaagtttccatcatctatagaaagctatataagacaagaactcccctttttttcccaaaggcattataaaaagaatgaagcctccttagaaaaaaaattatacctcaatgtccccaacaagattgcttaataaattgtgtttcctccaagctattcaattcttttaactgttgtagaagacaaaatgttcacaatatatttagttgtaaaccaagtgatcaaactacatattgtaaagcccatttttaaaatacattgtatatatgtgtatgcacagtaaaaatggaaactatattgacct

SEQ ID NO: 136242 - protein, 434 aa, Artificial Sequence
  derived and/or modified sequence
LEGTAGTITSNEWSSPTSPEGSTASGGSQALDKPIDNDAEGVWSPDIEQSFQEALAIYPPCGRRKIILSDEGKMYGRNELIARYIKLRTGKTRTRKQVSSHIQVLARRKAREIQAKLKDQAAKDKALQSMAAMSSAQIISATAFHSSMALARGPGRPAVSGFWQGALPGQAGTSHDVKPFSQQTYAVQPPLPLPGFESPAGPAPSPSAPPAPPWQGRSVASSKLWMLEFSAFLEQQQDPDTYNKHLFVHIGQSSPSYSDPYLEAVDIRQIYDKFPEKKGGLKDLFERGPSNAFFLVKFWADLNTNIEDEGSSFYGVSSQYESPENMIITCSTKVCSFGKQVVEKVETEYARYENGHYSYRIHRSPLCEYMINFIHKLKHLPEKYMMNSVLENFTILQVVTNRDTQETLLCIAYVFEVSASEHGAQHHIYRLVKE

SEQ ID NO: 136243 - protein, 305 aa, Artificial Sequence
  derived and/or modified sequence
MAAMSSAQIISATAFHSSMALARGPGRPAVSGFWQGALPGQAGTSHDVKPFSQQTYAVQPPLPLPGFESPAGPAPSPSAPPAPPWQGRSVASSKLWMLEFSAFLEQQQDPDTYNKHLFVHIGQSSPSYSDPYLEAVDIRQIYDKFPEKKGGLKDLFERGPSNAFFLVKFWADLNTNIEDEGSSFYGVSSQYESPENMIITCSTKVCSFGKQVVEKVETEYARYENGHYSYRIHRSPLCEYMINFIHKLKHLPEKYMMNSVLENFTILQVVTNRDTQETLLCIAYVFEVSASEHGAQHHIYRLVKE

SEQ ID NO: 136244 - protein, 72 aa, Artificial Sequence
  derived and/or modified sequence
LEGTAGTITSNEWSSPTSPEGSTASGGSQALDKPIDNDAEGVWSPDIEQSFQEALAIYPPCGRRKIILSDEG

SEQ ID NO: 136245 - protein, 22 aa, Artificial Sequence
  derived and/or modified sequence
LEGTAGTITSNEWSSPTSPEGS

SEQ ID NO: 136246 - protein, 175 aa, Artificial Sequence
  derived and/or modified sequence
LEGTAGTITSNEWSSPTSPEGSTASGGSQALDKPIDNDAEGVWSPDIEQSFQEALAIYPPCGRRKIILSDEGKMYGRNELIARYIKLRTGKTRTRKQVSSHIQVLARRKAREIQAKLKDQAAKDKALQSMAAMSSAQIISATAFHSSMALARGPGRPAVSGFWQGALPGQAGTSH

SEQ ID NO: 136247 - DNA, 1780 bp, Artificial Sequence
  derived and/or modified sequence
gtggccccgccgccactccctccggctccctccctcccgccgcggcgcgcatctcattccagccctcattccgcgcattccagcgtcctcctcgcacactcgaggccagggggcgggagggccgcagctccggcgccgccgcgtcccgccagaacgatcgccgcggccggaagagttggcgctcggggcggactccttggaactggcttagcgcacccatcccaccttcccgcaccctgggaccggtccaacgagcgctcctccaagcggagccttggagggcacggccggcaccattacctccaacgagtggagctctcccacctcccctgaggggagcaccgcctctgggggcagtcaggcactggacaagcccatcgacaatgacgcagagggcgtgtggagcccggatattgagcagagtttccaggaggccctcgccatctacccgccctgtggcaggcgcaaaatcatcctgtcggacgagggcaagatgtatggtcggaacgagctgattgcccgctacatcaagctccggacagggaagacccgcaccaggaagcaggtctccagccacatccaggtgctggctcgtcgcaaagctcgcgagatccaggccaagctaaaggaccaggcagctaaggacaaggccctgcagagcatggctgccatgtcgtctgcacagatcatctccgccacggccttccacagtagcatggccctcgcccggggccccggccgcccagcagtctcagggttttggcaaggagctttgccaggccaagccggaacgtcccatgatgtgaagcctttctctcagcaaacctatgctgtccagcctccgctgcctctgccagggtttgagtctcctgcagggcccgccccatcgccctctgcgcccccggcacccccatggcagggccgcagcgtggccagctccaagctctggatgttggagttctctgccttcctggagcagcagcaggacccggacacgtacaacaagcacctgttcgtgcacattggccagtccagcccaagctacagcgacccctacctcgaagccgtggacatccgccaaatctatgacaaattcccggagaaaaagggtggactcaaggatctcttcgaacggggaccctccaatgccttttttcttgtgaagttctgggcagacctcaacaccaacatcgaggatgaaggcagctccttctatggggtctccagccagtatgagagccccgagaacatgatcatcacctgctccacgaaggtctgctctttcggcaagcaggtggtggagaaagttgagacagagtatgctcgctatgagaatggacactactcttaccgcatccaccggtccccgctctgtgagtacatgatcaacttcatccacaagctcaagcacctccctgagaagtacatgatgaacagcgtgctggagaacttcaccatcctgcaggtggtcaccaacagagacacacaggagaccttgctgtgcattgcctatgtctttgaggtgtcagccagtgagcacggggctcagcaccacatctacaggctggtgaaagaatgagagactcggggagcagggaggggggaagagacgtgtgtgcaggaaacggggacgtggggaggggacctgcaggggcagccccctgaagtgccaagagagctgagaggagcagttgtgactctacccaggaacaaactgtgcctgaacctgaggtgcccaaccccaaataaacccaagatgctgtgtattttcagaggaaaa

SEQ ID NO: 136248 - DNA, 1305 bp, Artificial Sequence
  derived and/or modified sequence
ctggagggcaccgccggcaccatcaccagcaacgagtggagcagccccaccagccccgagggcagcaccgccagcggcggcagccaggccctggacaagcccatcgacaacgacgccgagggcgtgtggagccccgacatcgagcagagcttccaggaggccctggccatctaccccccctgcggcagaagaaagatcatcctgagcgacgagggcaagatgtacggcagaaacgagctgatcgccagatacatcaagctgagaaccggcaagaccagaaccagaaagcaggtgagcagccacatccaggtgctggccagaagaaaggccagagagatccaggccaagctgaaggaccaggccgccaaggacaaggccctgcagagcatggccgccatgagcagcgcccagatcatcagcgccaccgccttccacagcagcatggccctggccagaggccccggcagacccgccgtgagcggcttctggcagggcgccctgcccggccaggccggcaccagccacgacgtgaagcccttcagccagcagacctacgccgtgcagccccccctgcccctgcccggcttcgagagccccgccggccccgcccccagccccagcgccccccccgcccccccctggcagggcagaagcgtggccagcagcaagctgtggatgctggagttcagcgccttcctggagcagcagcaggaccccgacacctacaacaagcacctgttcgtgcacatcggccagagcagccccagctacagcgacccctacctggaggccgtggacatcagacagatctacgacaagttccccgagaagaagggcggcctgaaggacctgttcgagagaggccccagcaacgccttcttcctggtgaagttctgggccgacctgaacaccaacatcgaggacgagggcagcagcttctacggcgtgagcagccagtacgagagccccgagaacatgatcatcacctgcagcaccaaggtgtgcagcttcggcaagcaggtggtggagaaggtggagaccgagtacgccagatacgagaacggccactacagctacagaatccacagaagccccctgtgcgagtacatgatcaacttcatccacaagctgaagcacctgcccgagaagtacatgatgaacagcgtgctggagaacttcaccatcctgcaggtggtgaccaacagagacacccaggagaccctgctgtgcatcgcctacgtgttcgaggtgagcgccagcgagcacggcgcccagcaccacatctacagactggtgaaggagtag

SEQ ID NO: 136249 - DNA, 69 bp, Artificial Sequence
  derived and/or modified sequence
ctggagggcaccgccggcaccatcaccagcaacgagtggagcagccccaccagccccgagggcagctag

SEQ ID NO: 136250 - DNA, 528 bp, Artificial Sequence
  derived and/or modified sequence
ctggagggcaccgccggcaccatcaccagcaacgagtggagcagccccaccagccccgagggcagcaccgccagcggcggcagccaggccctggacaagcccatcgacaacgacgccgagggcgtgtggagccccgacatcgagcagagcttccaggaggccctggccatctaccccccctgcggcagaagaaagatcatcctgagcgacgagggcaagatgtacggcagaaacgagctgatcgccagatacatcaagctgagaaccggcaagaccagaaccagaaagcaggtgagcagccacatccaggtgctggccagaagaaaggccagagagatccaggccaagctgaaggaccaggccgccaaggacaaggccctgcagagcatggccgccatgagcagcgcccagatcatcagcgccaccgccttccacagcagcatggccctggccagaggccccggcagacccgccgtgagcggcttctggcagggcgccctgcccggccaggccggcaccagccactag

SEQ ID NO: 136251 - DNA, 1305 bp, Artificial Sequence
  derived and/or modified sequence
ctagagggcaccgctggaactatcacatcaaacgaatggtcctcacccacctcccccgaggggtccacggctagcggtggtagccaggctctcgataagcccatcgataatgacgcggaaggggtatggtcccctgatatcgaacaatcattccaggaggctctggcgatttaccccccctgcggtcggcgtaaaattattctaagtgacgaagggaagatgtacggcaggaatgagctgatagcgcgatacattaaactgcgcactggcaaaacccgaactaggaaacaggtatctagtcacattcaagtacttgctcgacgcaaagccagggagattcaggctaagctgaaagaccaagccgccaaggataaagcccttcaatcaatggcggctatgagttctgcccagatcatctctgcgaccgcttttcatagttccatggcccttgcacggggtcctggacgtcctgctgtgagcggtttttggcagggcgcattgcccggccaggctgggactagccatgacgtcaaacccttttcccagcagacttacgctgtccagccccccctgccactcccaggcttcgagagcccagcaggccctgctcctagcccatctgcgccgcctgctcccccttggcaaggccgtagtgttgcttccagtaaactgtggatgttggagtttagcgcctttcttgaacagcagcaagatccggatacttacaataaacacttgtttgtgcacatcggtcagtcaagcccatcctactccgacccttacctcgaggccgtggacattagacagatttatgataagtttcccgaaaagaagggcggactgaaagacctttttgagcggggccccagtaacgctttctttttggtgaaattttgggcagacctcaacaccaatatcgaagatgaggggagtagtttttatggcgtttcatcccagtatgagtcacctgagaacatgattattacctgttcaaccaaagtctgctcattcggaaagcaggtggtggaaaaggtagagactgagtatgcgcgttacgagaacggccactactcctatcggatccacagaagtccactttgcgaatacatgatcaacttcatacacaagttgaaacatctgcctgagaaatacatgatgaatagcgtgctggagaatttcacaatactccaagtggtgactaatcgggatacacaagaaacccttctgtgcattgcgtacgtgtttgaggtttccgcatcggagcacggagcacagcatcacatttataggctggtcaaagagtag

SEQ ID NO: 136252 - DNA, 69 bp, Artificial Sequence
  derived and/or modified sequence
ctggagggaaccgccggcacaataacatcgaacgaatggtcatccccaacctctcccgagggttcttag

SEQ ID NO: 136253 - DNA, 528 bp, Artificial Sequence
  derived and/or modified sequence
ctggagggtactgccgggactattacctcaaacgaatggagttctccaacctcaccagaggggagtacagctagtgggggctctcaggctttggacaaaccaatagataacgatgcagaaggagtttggagcccggacatcgagcagagttttcaggaagctctggccatctaccccccgtgcggcagacggaagatcatcctcagcgacgagggcaagatgtatgggcgcaatgagctgatagctcgctatatcaagttacggacaggcaagactcggactagaaagcaagtttcctctcatatacaggtgctcgccaggcgtaaggcccgcgagatccaggccaagctgaaggaccaggccgcaaaggacaaggctctgcagtcaatggcggccatgagcagcgcccagataatcagtgcaactgctttccattcgagtatggccttggcccgcgggcccggaagaccagccgtctctggcttctggcagggggctctccccggccaggccggcacatcccattag

SEQ ID NO: 136254 - DNA, 1305 bp, Artificial Sequence
  derived and/or modified sequence
ctggagggcacagctggcaccatcaccagcaatgagtggagcagccccaccagccctgagggcagcacagccagcggcggcagccaggccctggacaagcccatcgacaatgatgctgagggcgtgtggagcccagacatcgagcagagcttccaggaggccctggccatctacccaccctgtggccgcaggaagatcatcctgagtgatgagggcaagatgtatggaagaaatgagctgattgcccgctacatcaagctgaggacaggcaagaccaggaccaggaagcaggtgagcagccacatccaggtgctggcccggaggaaggcccgggagatccaggccaagctgaaggaccaggccgccaaggacaaggccctgcagagcatggccgccatgagcagcgcccagatcatcagcgccacagccttccacagctccatggccctggcccggggccctggccggcctgctgtgtctggcttctggcagggcgccctgcccggccaggccggcaccagccatgatgtgaagcccttcagccagcagacctatgctgtgcagccccccctgcccctgcccggctttgagagccctgctggccctgcccccagccccagcgcccccccagccccaccctggcagggccgctctgtggccagcagcaagctgtggatgctggagttcagcgccttcctggagcagcagcaggaccctgacacctacaacaagcacctgtttgtgcacatcggccagagcagccccagctacagcgacccctacctggaggccgtggacatccggcagatctatgacaagtttcctgagaagaagggcggcctgaaggacctgtttgagcggggccccagcaatgccttcttcctggtgaagttctgggccgacctgaacaccaacattgaagatgagggcagcagcttctacggcgtgagcagccagtatgagagccctgagaacatgatcatcacctgcagcaccaaggtgtgcagctttgggaagcaggtggtggagaaggtggagacagaatatgcccgctatgaaaatggccactacagctaccgcatccacaggagccccctgtgtgagtacatgatcaacttcatccacaagctgaagcacctgcctgagaagtacatgatgaacagcgtgctggagaacttcaccatcctgcaggtggtgaccaacagagacacccaggagaccctgctgtgcatcgcctacgtgtttgaggtgtctgccagcgagcacggggcccagcaccacatctaccgcctggtgaaggagtag

SEQ ID NO: 136255 - DNA, 69 bp, Artificial Sequence
  derived and/or modified sequence
ctggagggcacagctggcaccatcaccagcaatgagtggagcagccccaccagccctgagggcagctag

SEQ ID NO: 136256 - DNA, 528 bp, Artificial Sequence
  derived and/or modified sequence
ctggagggcacagctggcaccatcaccagcaatgagtggagcagccccaccagccctgagggcagcacagccagcggcggcagccaggccctggacaagcccatcgacaatgatgctgagggcgtgtggagcccagacatcgagcagagcttccaggaggccctggccatctacccaccctgtggccgcaggaagatcatcctgagtgatgagggcaagatgtatggaagaaatgagctgattgcccgctacatcaagctgaggacaggcaagaccaggaccaggaagcaggtgagcagccacatccaggtgctggcccggaggaaggcccgggagatccaggccaagctgaaggaccaggccgccaaggacaaggccctgcagagcatggccgccatgagcagcgcccagatcatcagcgccacagccttccacagctccatggccctggcccggggccctggccggcctgctgtgtctggcttctggcagggcgccctgcccggccaggccggcaccagccactag

SEQ ID NO: 136257 - DNA, 1305 bp, Artificial Sequence
  derived and/or modified sequence
ctggagggcaccgccggcaccatcaccagcaacgagtggagcagcccgacctccccagagggttccacggccagtggcggatctcaggccctggataaaccaattgacaatgacgctgagggggtgtggtcaccagacatcgagcagagttttcaagaagcactggcaatctacccaccgtgtggcagacgtaaaataatactgtccgatgagggaaaaatgtatgggaggaatgagctcatcgcaagatacatcaaactgcggaccggcaagacaaggactcgtaagcaggtctcgtcacatatccaggtgctcgctcgaagaaaagctagggagatccaggcaaaactgaaagatcaggcagcaaaagacaaagccctacaatctatggcggcaatgtcaagtgcacaaatcattagtgccactgctttccatagttccatggctctggcacgtggaccgggtcggcctgctgtgagcggcttctggcaaggcgccctgccgggtcaggctggtacctcacacgacgtgaaacctttttctcaacagacatacgccgtgcagccccccctgccactcccagggttcgagagcccagctggaccagcgccctctccctcggctcccccagcccccccctggcagggaaggtctgtcgcctcctccaagctgtggatgctggagtttagtgcctttctagaacaacagcaggaccccgacacgtataacaaacatttattcgtgcacattgggcagtcctcaccctcctactccgacccttacctcgaggcagtggatatccggcagatatatgacaagtttccagaaaaaaaaggaggcttgaaggatctattcgagcggggccccagcaatgccttcttcctggtgaaattctgggccgaccttaataccaacattgaagatgagggctcttcattttatggggtgtccagtcagtacgagtcaccggaaaacatgataattacatgtagtacgaaagtctgctcctttggaaagcaggtggtagaaaaagtggagactgaatacgcccggtacgagaatggacattactcatataggatccacaggtctcccctttgtgaatacatgatcaacttcatccacaagcttaagcacctgcctgaaaaatacatgatgaattcagttcttgagaatttcacaattctgcaggtcgttactaaccgggacactcaggagactctcctttgtattgcctacgtgtttgaggttagtgcttccgagcacggcgcgcaacaccatatctacagattagtaaaagaatag

SEQ ID NO: 136258 - DNA, 69 bp, Artificial Sequence
  derived and/or modified sequence
ctggagggcaccgccggcaccatcaccagcaacgagtggagcagcccaacttcaccagaagggtcctag

SEQ ID NO: 136259 - DNA, 528 bp, Artificial Sequence
  derived and/or modified sequence
ctggagggcaccgccggcaccatcaccagcaacgagtggagcagccccactagcccagaggggagtaccgcttccggtggctcccaagccctcgataaaccaatagataacgatgccgaaggagtttggtcaccggatattgaacagtcctttcaagaagcccttgccatctacccaccttgtggcaggcgcaagatcatcctgtcagacgaggggaagatgtatggtagaaatgaactgatcgccagatacattaaactgcggaccgggaaaactcgtactagaaagcaggtcagttcacatatacaggtattggcccggcgcaaggcgagagagattcaggctaagctgaaggaccaggcagctaaggacaaagccctgcaatctatggcagcgatgtcctcagcacagattatttcagcaacagctttccattcatctatggccctagcccggggacccggcaggccagccgtttctggtttctggcagggcgctctgcctggccaagccggcacaagccactag

SEQ ID NO: 136260 - DNA, 1305 bp, Artificial Sequence
  derived and/or modified sequence
ctcgagggcacagccggtactatcacttctaacgagtggtcatcccctaccagcccggaaggcagtaccgcttcaggtggtagccaagccttggacaagccgatcgacaacgatgctgaaggcgtttggagtccggatatcgagcagtcatttcaggaggccctagccatctatccaccatgtggacggaggaagatcatactgagcgacgaagggaagatgtacggtagaaacgagttaattgccaggtatataaaactgagaactgggaagacccgaaccaggaagcaggtgtcttcacacatacaggtgctggccaggaggaaagcccgagagattcaagccaaactaaaagaccaggccgcaaaagacaaagccctgcagtccatggctgcgatgagctccgctcaaattatctccgctactgctttccatagttctatggccctcgctagagggcctggccgacccgcagtctccggcttttggcagggcgcattgcccggacaggcagggacaagtcatgacgtcaaacccttcagccagcagacttacgcagtacagcctccgctgcctctgccaggctttgaatccccggcaggacccgcaccttcgccttctgccccacccgcaccaccctggcaaggccgatccgtcgctagcagcaagctgtggatgctggagttttccgctttcttagagcaacagcaggaccccgacacctataacaaacatctgttcgtccacattgggcagtccagccccagctattcagacccttatttggaagcggtggacatccggcagatctacgacaaatttccagagaagaagggcggtctcaaagacctgtttgaaaggggcccttccaacgccttctttttagttaagttttgggccgatctgaatacaaacatcgaagatgaaggatcctctttctacggggtcagcagtcagtatgaaagccctgaaaatatgatcattacctgctccacgaaggtgtgcagcttcgggaagcaggttgttgagaaggtggagactgagtatgctcgatacgagaatgggcactactcgtatcgcatccaccgcagtccgctatgtgaatatatgatcaacttcatccacaagttgaagcacctgccggagaagtacatgatgaattcagttctcgagaacttcactatcctacaggtggtgacgaaccgggatacccaggaaacgctgctttgtattgcttatgtattcgaggtgagcgcctccgagcacggggcacagcaccatatctatcgcctggttaaagagtag

SEQ ID NO: 136261 - DNA, 69 bp, Artificial Sequence
  derived and/or modified sequence
ctggaaggcactgccggtaccattacttcaaacgaatggagttcccctacttcacctgaaggaagctag

SEQ ID NO: 136262 - DNA, 528 bp, Artificial Sequence
  derived and/or modified sequence
ctggagggaactgcaggaacaattacgagtaacgagtggagctccccaacctctcccgagggttcaacggctagcggaggcagtcaggccttagataaaccgatcgacaacgacgcagagggcgtctggtctcccgatatagagcagtcattccaggaagccctggccatttatcctccatgcggtcgccgtaagatcatcctctccgatgagggcaagatgtatggacgaaacgagctgatagcacggtacataaagctccggactgggaaaaccaggaccaggaagcaggtgagctcacacatccaagttctggccaggagaaaagctcgtgaaattcaagcaaagctcaaagaccaagccgcaaaggataaggccttgcagtcgatggccgctatgagtagcgcccagatcatatccgccacagcgtttcatagcagcatggccctagctcgaggcccaggcaggcctgctgtctccggattttggcagggagctctccccggacaggcagggactagccattag

SEQ ID NO: 136263 - DNA, 1690 bp, Artificial Sequence
  derived and/or modified sequence
gtcctcctcgcacactcgaggccagggggcgggagggccgcagctccggcgccgccgcgtcccgccagaacgatcgccgcggccggaagagttggcgctcggggcggactccttggaactggcttagcgcacccatcccaccttcccgcaccctgggaccggtccaacgagcgctcctccaagcggagccttggagggcacggccggcaccattacctccaacgagtggagctctcccacctcccctgaggggagcaccgcctctgggggcagtcaggcactggacaagcccatcgacaatgacgcagagggcgtgtggagcccggatattgagcagagtttccaggaggccctcgccatctacccgccctgtggcaggcgcaaaatcatcctgtcggacgagggcaagatgtatggtcggaacgagctgattgcccgctacatcaagctccggacagggaagacccgcaccaggaagcaggtctccagccacatccaggtgctggctcgtcgcaaagctcgcgagatccaggccaagctaaaggaccaggcagctaaggacaaggccctgcagagcatggctgccatgtcgtctgcacagatcatctccgccacggccttccacagtagcatggccctcgcccggggccccggccgcccagcagtctcagggttttggcaaggagctttgccaggccaagccggaacgtcccatgatgtgaagcctttctctcagcaaacctatgctgtccagcctccgctgcctctgccagggtttgagtctcctgcagggcccgccccatcgccctctgcgcccccggcacccccatggcagggccgcagcgtggccagctccaagctctggatgttggagttctctgccttcctggagcagcagcaggacccggacacgtacaacaagcacctgttcgtgcacattggccagtccagcccaagctacagcgacccctacctcgaagccgtggacatccgccaaatctatgacaaattcccggagaaaaagggtggactcaaggatctcttcgaacggggaccctccaatgccttttttcttgtgaagttctgggcagacctcaacaccaacatcgaggatgaaggcagctccttctatggggtctccagccagtatgagagccccgagaacatgatcatcacctgctccacgaaggtctgctctttcggcaagcaggtggtggagaaagttgagacagagtatgctcgctatgagaatggacactactcttaccgcatccaccggtccccgctctgtgagtacatgatcaacttcatccacaagctcaagcacctccctgagaagtacatgatgaacagcgtgctggagaacttcaccatcctgcaggtggtcaccaacagagacacacaggagaccttgctgtgcattgcctatgtctttgaggtgtcagccagtgagcacggggctcagcaccacatctacaggctggtgaaagaatgagagactcggggagcagggaggggggaagagacgtgtgtgcaggaaacggggacgtggggaggggacctgcaggggcagccccctgaagtgccaagagagctgagaggagcagttgtgactctacccaggaacaaactgtgcctgaacctgaggtgcccaaccccaaataaacccaagatgctgtgtattttcaga

SEQ ID NO: 136264 - DNA, 1396 bp, Artificial Sequence
  derived and/or modified sequence
tctgcgcgctgacgccctgtcgtccccgcagaacgatcgccgcggccggaagagttggcgctcggggcggactccttggaactggcttagcgcacccatcccaccttcccgcaccctgggaccggtcggaacgagctgattgcccgctacatcaagctccggacagggaagacccgcaccaggaagcaggtctccagccacatccaggtgctggctcgtcgcaaagctcgcgagatccaggccaagctaaaggaccaggcagctaaggacaaggccctgcagagcatggctgccatgtcgtctgcacagatcatctccgccacggccttccacagtagcatggccctcgcccggggccccggccgcccagcagtctcagggttttggcaaggagctttgccaggccaagccggaacgtcccatgatgtgaagcctttctctcagcaaacctatgctgtccagcctccgctgcctctgccagggtttgagtctcctgcagggcccgccccatcgccctctgcgcccccggcacccccatggcagggccgcagcgtggccagctccaagctctggatgttggagttctctgccttcctggagcagcagcaggacccggacacgtacaacaagcacctgttcgtgcacattggccagtccagcccaagctacagcgacccctacctcgaagccgtggacatccgccaaatctatgacaaattcccggagaaaaagggtggactcaaggatctcttcgaacggggaccctccaatgccttttttcttgtgaagttctgggcagacctcaacaccaacatcgaggatgaaggcagctccttctatggggtctccagccagtatgagagccccgagaacatgatcatcacctgctccacgaaggtctgctctttcggcaagcaggtggtggagaaagttgagacagagtatgctcgctatgagaatggacactactcttaccgcatccaccggtccccgctctgtgagtacatgatcaacttcatccacaagctcaagcacctccctgagaagtacatgatgaacagcgtgctggagaacttcaccatcctgcaggtggtcaccaacagagacacacaggagaccttgctgtgcattgcctatgtctttgaggtgtcagccagtgagcacggggctcagcaccacatctacaggctggtgaaagaatgagagactcggggagcagggaggggggaagagacgtgtgtgcaggaaacggggacgtggggaggggacctgcaggggcagccccctgaagtgccaagagagctgagaggagcagttgtgactctacccaggaacaaactgtgcctgaacctgaggtgcccaaccccaaataaacccaagatgctgtgtattttca

SEQ ID NO: 136265 - DNA, 801 bp, Artificial Sequence
  derived and/or modified sequence
cctccctccgcgcgctccgctccgctccgctgggcgcaccggggccggtcggcgcggggtgggcttggccccgcggccccgccttcactgcgccgcccgtcggccccggccggagcccggctctgcgcgctgacgccctgtcgtccccgcagaacgatcgccgcggccggaagagttggcgctcggggcggactccttggaactggcttagcgcacccatcccaccttcccgcaccctgggaccggtccaacgagcgctcctccaagcggagccttggagggcacggccggcaccattacctccaacgagtggagctctcccacctcccctgaggggagcaccgcctctgggggcagtcaggcactggacaagcccatcgacaatgacgcagagggcgtgtggagcccggatattgagcagagtttccaggaggccctcgccatctacccgccctgtggcaggcgcaaaatcatcctgtcggacgagggcaagatgtatggtcggaacgagctgattgcccgctacatcaagctccggacagggaagacccgcaccaggaagcaggtctccagccacatccaggtgctggctcgtcgcaaagctcgcgagatccaggccaagctaaaggaccaggcagctaaggacaaggccctgcagagcatggctgccatgtcgtctgcacagatcatctccgccacggccttccacagtagcatggccctcgcccggggccccggccgcccagcagtctcagggttttggcaaggagctttgccaggccaagccggaacgtcccatga

SEQ ID NO: 136266 - protein, 357 aa, Artificial Sequence
  derived and/or modified sequence
MERMSDSADKPIDNDAEGVWSPDIEQSFQEALAIYPPCGRRKIILSDEGKMYGRNELIARYIKLRTGKTRTRKQVSSHIQVLARRKSRDFHSKLKVTSMDQTAKDKALQHMAAMSSAQIVSATAIHNKLGLPGIPRPTFPGAPGFWPGMIQTGQPGSSQDVKPFVQQAYPIQPAVTAPIPGFEPASAPAPSVPAWQGRSIGTTKLRLVEFSAFLEQQRDPDSADLNCNIQDDAGAFYGVTSQYESSENMTVTCSTKVCSFGKQVVEKVETEYARFENGRFVYRINRSPMCEYMINFIHKLKHLPEKYMMNSVLENFTILLVVTNRDTQETLLCMACVFEVSNSEHGAQHHIYRLVKD

SEQ ID NO: 136267 - protein, 435 aa, Artificial Sequence
  derived and/or modified sequence
IASNSWNASSSPGEAREDGPEGLDKGLDNDAEGVWSPDIEQSFQEALAIYPPCGRRKIILSDEGKMYGRNELIARYIKLRTGKTRTRKQVSSHIQVLARKKVREYQVGIKAMNLDQVSKDKALQSMASMSSAQIVSASVLQNKFSPPSPLPQAVFSTSSRFWSSPPLLGQQPGPSQDIKPFAQPAYPIQPPLPPTLSSYEPLAPLPSAAASVPVWQDRTIASSRLRLLEYSAFMEVQRDPDTYSKHLFVHIGQTNPAFSDPPLEAVDVRQIYDKFPEKKGGLKELYEKGPPNAFFLVKFWADLNSTIQEGPGAFYGVSSQYSSADSMTISVSTKVCSFGKQVVEKVETEYARLENGRFVYRIHRSPMCEYMINFIHKLKHLPEKYMMNSVLENFTILQVVTSRDSQETLLVIAFVFEVSTSEHGAQHHVYKLVKD

SEQ ID NO: 136268 - protein, 451 aa, Artificial Sequence
  derived and/or modified sequence
LSRPVGSGPEPRATSTIASNSWNASSSPGEAREDGPEGLDKGLDNDAEGVWSPDIEQSFQEALAIYPPCGRRKIILSDEGKMYGRNELIARYIKLRTGKTRTRKQVSSHLQVLARRKSREIQSKLKSSPQDQVSKDKALQSMASMSSAQIVSASVLQNKFSPPSPLPQAVFSTSSRFWSSPPLLGQQPGPSQDIKPFAQPAYPIQPPLPPTLSSYEPLAPLPSAAASVPVWQDRTIASSRLRLLEYSAFMEVQRDPDTYSKHLFVHIGQTNPAFSDPPLEAVDVRQIYDKFPEKKGGLKELYEKGPPNAFFLVKFWADLNSTIQEGPGAFYGVSSQYSSADSMTISVSTKVCSFGKQVVEKVETEYARLENGRFVYRIHRSPMCEYMINFIHKLKHLPEKYMMNSVLENFTILQVVTSRDSQETLLVIAFVFEVSTSEHGAQHHVYKLVKD

SEQ ID NO: 136269 - DNA, 3023 bp, Artificial Sequence
  derived and/or modified sequence
tcctcaacacaaactttccgtcccgctcgctccctcctccgcgctcggcgcctcccgctccagcccggctcattccgcacattccggccagccccctccccacgaccccccttccccggccccccttgcggctccctcgggcccggcggagcggcccggccggagcgcccccgcgagctcggaccaggctcagccgcccagtgggctcaggcccagagcccagagcaaccagcacaatagcgtccaacagctggaacgccagcagcagccccggggaggcccgggaggatgggcccgagggcctggacaaggggctggacaacgatgcggagggcgtgtggagcccggacatcgagcagagcttccaggaggccctggccatctacccgccctgcggccggcggaagatcatcctgtcagacgagggcaagatgtacggccgaaatgagttgattgcacgctatattaaactgaggacggggaagactcggacgagaaaacaggtgtccagccacatacaggttctagctcggaagaaggtgcgggagtaccaggttggcatcaaggccatgaacctggaccaggtctccaaggacaaagcccttcagagcatggcgtccatgtcctctgcccagatcgtctctgccagtgtcctgcagaacaagttcagcccaccttcccctctgccccaggccgtcttctccacttcctcgcggttctggagcagcccccctctcctgggacagcagcctggaccctctcaggacatcaagccctttgcacagccagcctaccccatccagccgcccctgccgccgacgctcagcagttatgagcccctggccccgctcccctcagctgctgcctctgtgcctgtgtggcaggaccgtaccattgcctcctcccggctgcggctcctggagtattcagccttcatggaggtgcagcgagaccctgacacgtacagcaaacacctgtttgtgcacatcggccagacgaaccccgccttctcagacccacccctggaggcagtagatgtgcgccagatctatgacaaattccccgagaaaaagggaggattgaaggagctctatgagaaggggccccctaatgccttcttccttgtcaagttctgggccgacctcaacagcaccatccaggagggcccgggagccttctatggggtcagctctcagtacagctctgctgatagcatgaccatcagcgtctccaccaaggtgtgctcctttggcaaacaggtggtagagaaggtggagactgagtatgccaggctggagaacgggcgctttgtgtaccgtatccaccgctcgcccatgtgcgagtacatgatcaacttcatccacaagctgaagcacctgcccgagaagtacatgatgaacagcgtgctggagaacttcaccatcctgcaggtggtcacgagccgggactcccaggagaccctgcttgtcattgcttttgtcttcgaagtctccaccagtgagcacggggcccagcaccatgtctacaagctcgtcaaagactagggtgccctctgcgcctccttaaggatgcagggtgagcatctcctctccacacctgcctggcacccctgggggggtccaggattgaggattcatctacctgccaggcctcaggcccaggacccaggaggcctccccacctaccccagcacacacactccctgccactgttctgcgctttaattgtgggagaagagaggagaggagggctcagcggtggggcagcctgtccggggcgctgacccaccatcaccctgctctgcccagcctcgcgtgacctcagagaggtggggataggggacaccttcagcctccagcatgtgtggccactgtacccccacccacccttgggggagcatgatgggcaggtgagggcaggatggagaccaagggagtcagtgagcagaggccctgggagtgtccggttggggttggactgaggacagaggggcccacacttccttgcccctttgtgtcccaggcctggtgcccagactccttgcatggcttgtgtggtcctcagactccgcacagcgagcgtaggtctctgggtttcagatgaagtgcccaggctccaggaagttgagggacccacaggagaggtgggcagagctggagttctcatccagggctgcttgtccccagagcccaggtttatactacctccctggggcgggggctggccgcagggtaggggagaggctctgcagtgtggagtggagcctcatcgaggggcgctgggttaggggagcacctgtttcagactgggcatgaagaagggagcacagcagctactagaccccattagcacctcattagcccacaagccagccaggggccccaggaagatggggcaccccccagcaccctccagattgagagcaaggtagaggaaggagtcccagcctctgggcagaccagaggcccagagggagagagtagcagaaggcttttgatttttctcttgcctgaggcttgaatctgacaaacccttggtgggcactgctcccttaggttcttccccacctcaatctacctgcctagagtagcagctcccagacccagttctgggactgaaggttaacccttcacctgctgtcccttcttaacacccaggcccccagagccagctgggcctgtccagcagccacctgtgggtatttatgagtttcatatgaagtactgtgccccttcccttcctcatcccgaccctgcccgagcttcctgaaggtcctcactgtttgcatatcgctcaggccacctccaaaccccacctaggttttataatgtatattatatatttttttgtgtatttttaaaatccagctgtgatgggttatatcataaatgcagcttggggttggagcaggggccctcaaaggcccagctcctgctcaaaaaaaaaaaaaaaaaaaaattaaagttatttgtttgtgggtcagtcatgtaaaaaaaaaaaaaaaaaaaaaaaaaaaaaaaaaa

SEQ ID NO: 136270 - DNA, 1308 bp, Artificial Sequence
  derived and/or modified sequence
atcgccagcaacagctggaacgccagcagcagccccggcgaggccagagaggacggccccgagggcctggacaagggcctggacaacgacgccgagggcgtgtggagccccgacatcgagcagagcttccaggaggccctggccatctaccccccctgcggcagaagaaagatcatcctgagcgacgagggcaagatgtacggcagaaacgagctgatcgccagatacatcaagctgagaaccggcaagaccagaaccagaaagcaggtgagcagccacatccaggtgctggccagaaagaaggtgagagagtaccaggtgggcatcaaggccatgaacctggaccaggtgagcaaggacaaggccctgcagagcatggccagcatgagcagcgcccagatcgtgagcgccagcgtgctgcagaacaagttcagcccccccagccccctgccccaggccgtgttcagcaccagcagcagattctggagcagcccccccctgctgggccagcagcccggccccagccaggacatcaagcccttcgcccagcccgcctaccccatccagccccccctgccccccaccctgagcagctacgagcccctggcccccctgcccagcgccgccgccagcgtgcccgtgtggcaggacagaaccatcgccagcagcagactgagactgctggagtacagcgccttcatggaggtgcagagagaccccgacacctacagcaagcacctgttcgtgcacatcggccagaccaaccccgccttcagcgacccccccctggaggccgtggacgtgagacagatctacgacaagttccccgagaagaagggcggcctgaaggagctgtacgagaagggcccccccaacgccttcttcctggtgaagttctgggccgacctgaacagcaccatccaggagggccccggcgccttctacggcgtgagcagccagtacagcagcgccgacagcatgaccatcagcgtgagcaccaaggtgtgcagcttcggcaagcaggtggtggagaaggtggagaccgagtacgccagactggagaacggcagattcgtgtacagaatccacagaagccccatgtgcgagtacatgatcaacttcatccacaagctgaagcacctgcccgagaagtacatgatgaacagcgtgctggagaacttcaccatcctgcaggtggtgaccagcagagacagccaggagaccctgctggtgatcgccttcgtgttcgaggtgagcaccagcgagcacggcgcccagcaccacgtgtacaagctggtgaaggactag

SEQ ID NO: 136271 - DNA, 1356 bp, Artificial Sequence
  derived and/or modified sequence
ctgagcagacccgtgggcagcggccccgagcccagagccaccagcaccatcgccagcaacagctggaacgccagcagcagccccggcgaggccagagaggacggccccgagggcctggacaagggcctggacaacgacgccgagggcgtgtggagccccgacatcgagcagagcttccaggaggccctggccatctaccccccctgcggcagaagaaagatcatcctgagcgacgagggcaagatgtacggcagaaacgagctgatcgccagatacatcaagctgagaaccggcaagaccagaaccagaaagcaggtgagcagccacctgcaggtgctggccagaagaaagagcagagagatccagagcaagctgaagagcagcccccaggaccaggtgagcaaggacaaggccctgcagagcatggccagcatgagcagcgcccagatcgtgagcgccagcgtgctgcagaacaagttcagcccccccagccccctgccccaggccgtgttcagcaccagcagcagattctggagcagcccccccctgctgggccagcagcccggccccagccaggacatcaagcccttcgcccagcccgcctaccccatccagccccccctgccccccaccctgagcagctacgagcccctggcccccctgcccagcgccgccgccagcgtgcccgtgtggcaggacagaaccatcgccagcagcagactgagactgctggagtacagcgccttcatggaggtgcagagagaccccgacacctacagcaagcacctgttcgtgcacatcggccagaccaaccccgccttcagcgacccccccctggaggccgtggacgtgagacagatctacgacaagttccccgagaagaagggcggcctgaaggagctgtacgagaagggcccccccaacgccttcttcctggtgaagttctgggccgacctgaacagcaccatccaggagggccccggcgccttctacggcgtgagcagccagtacagcagcgccgacagcatgaccatcagcgtgagcaccaaggtgtgcagcttcggcaagcaggtggtggagaaggtggagaccgagtacgccagactggagaacggcagattcgtgtacagaatccacagaagccccatgtgcgagtacatgatcaacttcatccacaagctgaagcacctgcccgagaagtacatgatgaacagcgtgctggagaacttcaccatcctgcaggtggtgaccagcagagacagccaggagaccctgctggtgatcgccttcgtgttcgaggtgagcaccagcgagcacggcgcccagcaccacgtgtacaagctggtgaaggactag

SEQ ID NO: 136272 - DNA, 1308 bp, Artificial Sequence
  derived and/or modified sequence
atagcgagcaactcttggaacgcatcctcatcgccaggtgaagctagggaggatgggcccgaagggctggacaaaggactagataacgatgcagagggcgtctggagtcctgacattgagcagagctttcaagaggctctggccatttaccccccctgtggacgcagaaaaatcatactttccgacgaggggaagatgtatggcaggaacgagttaatcgctcggtacattaaactgaggacggggaaaacccgtacgcggaagcaggtgagctctcacatccaagtgttggctcgaaaaaaggtgcgcgagtatcaggtcggcattaaagccatgaacctggatcaagtaagtaaggataaggccctgcaatcgatggcctctatgagctcagcacagatcgtgtcagcatcagtactccagaacaagttctctcccccctcgccccttccacaggccgtgttttctacctccagccgcttctggagcagccccccactcctgggccagcagcctggcccctcgcaggatattaagccatttgctcagccggcctatccgattcagcctcccctgcctcctacactttcatcctatgaaccccttgccccactgccctccgccgcagcttcagtccctgtatggcaggacaggaccatcgcctcctcccggctgcggttgcttgagtacagtgcttttatggaagtccagagagatcccgatacgtattctaagcatctgtttgttcacatcggtcaaacgaaccccgccttctccgaccccccactggaagccgtggacgttcgacagatctatgacaagttcccagagaaaaaggggggcctaaaagagttgtacgaaaaggggccccccaacgcgttctttttggtgaagttctgggccgacttgaatagtactatccaagaaggtcccggcgccttctatggcgtgtcctctcagtattcctcagctgacagtatgacaataagcgtgagcacgaaggtttgctcctttggaaagcaggttgtcgagaaggttgaaaccgagtacgcgaggttagaaaatgggagattcgtataccggattcataggagcccgatgtgtgaatatatgatcaacttcattcacaaactgaagcatctgcccgagaaatacatgatgaactccgtcttggaaaacttcactatcttgcaggttgtgacgagccgagactcacaggaaacactgctcgtaattgccttcgtgttcgaagtgtcaacgagcgagcacggggcacagcaccatgtctacaaactggttaaagactag

SEQ ID NO: 136273 - DNA, 1356 bp, Artificial Sequence
  derived and/or modified sequence
ttatctaggcccgtcggctctggtcccgagcccagagccaccagtaccatcgcgagtaatagttggaatgcatccagcagccctggcgaggccagggaggatggacctgaaggcttggataaggggctagacaacgacgcggagggcgtgtggtcccctgatatagagcagtcattccaggaggctctggctatttaccctccctgcggtaggagaaaaataattctctccgatgagggtaagatgtatggacgcaatgagctcatcgcaagatacatcaaactgagaaccgggaagacacgaactcggaagcaggtgagcagtcacctgcaggtgctggcaagaaggaagagccgagaaattcagagtaagctgaaatccagtccccaggaccaggtatccaaagacaaggccttgcagtcgatggccagtatgtcaagcgctcagatcgtgagtgcgtccgtgctccagaataaatttagcccccccagtccactcccacaagccgtgttctcaacctcttctcgcttttggtccagccccccactattaggacagcagccagggccttctcaggacattaagccctttgcacagcccgcttaccctattcagccccccctgcctcctactctcagtagttacgaacctcttgctccactgcccagcgccgcagcatctgtgcccgtgtggcaagacaggactatcgcctcctctcgactgcgcctgctggagtatagtgctttcatggaagtccagagagacccagatacttactccaagcatctcttcgttcacattggccagaccaacccagctttttcagatccgccattagaagccgtcgatgtgcgacagatatacgataagttccccgagaagaagggtggcctgaaagagctgtacgaaaaagggccaccaaacgcattttttttagtcaagttttgggcggatcttaattctactatccaggaaggtcctggggccttctatggcgtatctagccagtactcctctgctgattctatgactatatcagtgagcacgaaagtatgcagcttcggcaagcaggtggtcgaaaaggtagaaaccgaatatgctagattagagaacggtcgattcgtctaccgaattcacaggagcccaatgtgtgaatacatgatcaattttatccataagctcaagcacctccctgaaaagtatatgatgaatagtgttctagagaacttcactattctgcaggtcgtgacatcgcgcgacagtcaggagaccctcctggttatcgcctttgtctttgaggtgagtacgtccgagcacggcgcccaacatcacgtgtataagcttgtgaaggattag

SEQ ID NO: 136274 - DNA, 1308 bp, Artificial Sequence
  derived and/or modified sequence
attgccagcaacagctggaatgccagcagcagccctggagaggccagagaagatggccctgagggcctggacaagggcctggacaatgatgctgagggcgtgtggagcccagacatcgagcagagcttccaggaggccctggccatctacccaccctgtggccgcaggaagatcatcctgagtgatgagggcaagatgtatggaagaaatgagctgattgcccgctacatcaagctgaggacaggcaagaccaggaccaggaagcaggtgagcagccacatccaggtgctggccaggaagaaggtgcgggagtaccaggtgggcatcaaggccatgaacctggaccaggtgtccaaggacaaggccctgcagagcatggcctccatgagcagcgcccagatcgtgtctgcctctgtgctgcagaacaagttcagcccccccagccccctgccccaggccgtgttcagcaccagcagccgcttctggagcagcccccccctgctgggccagcagcccggccccagccaggacatcaagccctttgcccagcctgcctaccccatccagccccccctgccccccaccctgagcagctatgagcccctggcccccctgcccagcgctgctgcctctgtgcctgtgtggcaggacaggaccatcgccagcagccggctgcggctgctggagtacagcgccttcatggaggtgcagagggaccctgacacctacagcaagcacctgtttgtgcacatcggccagaccaacccagccttcagtgacccccccctggaggccgtggatgtgcggcagatctatgacaagtttcctgagaagaagggcggcctgaaggagctgtatgagaagggccccccaaatgccttcttcctggtgaagttctgggccgacctgaacagcaccatccaggagggccctggggccttctatggagtgagcagccagtacagcagcgctgacagcatgaccatctctgtgtccaccaaggtgtgcagctttgggaagcaggtggtggagaaggtggagacagaatatgcccggctggagaatggccgctttgtgtaccgcatccacaggagccccatgtgtgagtacatgatcaacttcatccacaagctgaagcacctgcctgagaagtacatgatgaacagcgtgctggagaacttcaccatcctgcaggtggtgaccagccgggacagccaggagaccctgctggtgattgcctttgtgtttgaggtgtccaccagcgagcacggggcccagcaccacgtgtacaagctggtgaaggactag

SEQ ID NO: 136275 - DNA, 1356 bp, Artificial Sequence
  derived and/or modified sequence
ctgagcaggcctgtgggcagcggccctgagccccgggccaccagcaccatcgccagcaacagctggaatgccagcagcagccctggagaggccagagaagatggccctgagggcctggacaagggcctggacaatgatgctgagggcgtgtggagcccagacatcgagcagagcttccaggaggccctggccatctacccaccctgtggccgcaggaagatcatcctgagtgatgagggcaagatgtatggaagaaatgagctgattgcccgctacatcaagctgaggacaggcaagaccaggaccaggaagcaggtgagcagccacctgcaggtgctggcccggaggaagagccgggagatccagagcaagctgaagagcagcccccaggaccaggtgtccaaggacaaggccctgcagagcatggcctccatgagcagcgcccagatcgtgtctgcctctgtgctgcagaacaagttcagcccccccagccccctgccccaggccgtgttcagcaccagcagccgcttctggagcagcccccccctgctgggccagcagcccggccccagccaggacatcaagccctttgcccagcctgcctaccccatccagccccccctgccccccaccctgagcagctatgagcccctggcccccctgcccagcgctgctgcctctgtgcctgtgtggcaggacaggaccatcgccagcagccggctgcggctgctggagtacagcgccttcatggaggtgcagagggaccctgacacctacagcaagcacctgtttgtgcacatcggccagaccaacccagccttcagtgacccccccctggaggccgtggatgtgcggcagatctatgacaagtttcctgagaagaagggcggcctgaaggagctgtatgagaagggccccccaaatgccttcttcctggtgaagttctgggccgacctgaacagcaccatccaggagggccctggggccttctatggagtgagcagccagtacagcagcgctgacagcatgaccatctctgtgtccaccaaggtgtgcagctttgggaagcaggtggtggagaaggtggagacagaatatgcccggctggagaatggccgctttgtgtaccgcatccacaggagccccatgtgtgagtacatgatcaacttcatccacaagctgaagcacctgcctgagaagtacatgatgaacagcgtgctggagaacttcaccatcctgcaggtggtgaccagccgggacagccaggagaccctgctggtgattgcctttgtgtttgaggtgtccaccagcgagcacggggcccagcaccacgtgtacaagctggtgaaggactag

SEQ ID NO: 136276 - DNA, 1308 bp, Artificial Sequence
  derived and/or modified sequence
atcgccagcaacagctggaacgccagcagcagccccggcgaggcccgcgaggacgggcctgagggtctcgacaagggattggacaacgatgccgaaggcgtctggagccctgacatcgagcagagtttccaggaggccctggcgatatatcccccttgcgggcgaaggaagattattttgtctgatgaaggtaaaatgtacggacgaaatgagttaatagcccgatatatcaaattgcgaaccggaaagacccgcactcgtaagcaggtctcctcccatatacaggttctggctcgtaagaaagtgagggagtaccaagtcggcattaaagccatgaatcttgatcaggtgtccaaggacaaagccttgcagtccatggcatcaatgtcaagcgcacagatcgtcagcgccagcgtactgcagaacaagttttcccctccgtcaccactgccacaggcagttttctctacatcatctaggttctggtctagccctcccctgctgggccagcaacccggacccagtcaggacattaagccattcgcccagccagcctacccaatccaacctccactaccacccactctctccagctatgaacccctcgccccactgccaagcgccgccgcaagtgtccctgtgtggcaggaccgaacgatcgcatctagtcgcctccgtcttctcgagtactcggcctttatggaagtgcagagagatcctgatacctactccaaacacctgttcgttcacattggtcagaccaatcctgcattttcagatcccccactggaggccgtggacgtgagacagatctacgacaagttccccgaaaagaagggtggactcaaggagctctatgagaaggggccccccaatgccttctttctggtcaagttttgggctgatctgaacagcacaatccaggagggacccggcgcgttttacggcgtcagttcccaatactctagcgcagacagcatgaccattagcgtttctacaaaggtgtgctcttttggcaaacaggtggtcgagaaggttgaaacggagtatgcccgcctggagaacggaagattcgtataccggatccataggtcccctatgtgtgagtacatgattaacttcatccacaagctgaagcatctcccggaaaagtacatgatgaattctgtgctggagaactttaccattcttcaggtggtgactagcagagattcgcaggaaactctgctggttattgcattcgtgttcgaggtcagcacgagtgagcatggagcccagcatcacgtttacaaactggtgaaagactag

SEQ ID NO: 136277 - DNA, 1356 bp, Artificial Sequence
  derived and/or modified sequence
ctgagccggcccgtgggcagcggccccgagccccgggccaccagcaccatagcctctaatagctggaatgcgagcagttcccccggcgaagctcgggaggatggtcctgaggggttggataagggactagacaatgacgctgagggggtttggagcccggatatagagcaaagctttcaggaggcactggccatttaccccccttgtggccgacgaaaaattatcttgagcgacgagggtaagatgtacggcagaaatgagcttattgcccggtatattaaactgcgcacagggaagactaggacgcgtaaacaggtgagttctcatctccaggtactcgcccgtcgcaagagtagagagatccagtcgaaactcaaaagctcacctcaggaccaggtgtccaaggacaaagcgttgcaatccatggcaagcatgtccagcgctcagattgtttccgcttctgtgttacagaataaatttagcccgcccagccccttgcctcaggctgtgttttccaccagtagcaggttctggtcctcacctcccctcctcgggcaacagcctggtccttcccaggacatcaagcctttcgctcagccagcttatccaatacagccacccctgccgcctactctgtctagctacgaacctctagcccctttgccctcggctgccgcctcagtacctgtttggcaggatcggaccatcgcatcctcccgcctgaggctactcgagtacagcgcttttatggaagttcagcgggacccagatacatacagcaagcatctgtttgtgcacataggccagaccaaccccgctttcagtgacccgcccctagaagcggtggatgtcagacagatttatgataagttccccgagaagaagggaggcctgaaggagctctatgaaaagggccctccaaacgctttctttctggtcaagttctgggctgatctcaattcaacaatccaggaaggtcccggagcattctatggcgtcagctcccagtactcaagcgcagacagcatgacaattagtgttagcacaaaagtttgtagttttggcaagcaggtcgtcgaaaaggtggagactgagtatgctcgtctggagaatggtcggttcgtttacaggatccacaggagccccatgtgcgagtatatgattaattttatccacaagctcaagcacctgccagagaagtacatgatgaactctgtcctggaaaactttacaatcctgcaagtggtcacctctcgcgactctcaggagactctgctcgtgatcgcctttgtgttcgaagtttcaacgtcagagcacggcgcgcaacaccacgtgtacaaactcgtgaaggactag

SEQ ID NO: 136278 - DNA, 1308 bp, Artificial Sequence
  derived and/or modified sequence
atagcttccaacagttggaacgcttccagcagccccggagaggcccgagaggatgggccagaaggcttagacaaaggtctcgataacgatgctgagggcgtgtggagccctgatattgaacaaagtttccaggaggccctggccatctatcctccatgtggtcgtcggaaaattattctcagtgacgagggcaaaatgtatggaaggaatgaactcatcgctcggtatattaagctgcggactggcaagacaaggacacgcaaacaggtgagtagccacatacaggtgttggcacggaagaaggtaagggagtatcaagtgggaattaaagctatgaaccttgaccaagtctcaaaagacaaggctctacagtcaatggcctccatgagctccgcacagatcgtgtctgcttcagtgcttcagaataagttctcaccgccatctcccctcccacaggctgtgttttccacctcgagccgtttctggtctagtccccctctcctgggccaacagccaggaccatcccaagacattaagccatttgctcaacccgcatatccaattcagcctccgttgccgccaaccctgagtagctacgaacccctcgcacctcttccatccgcagccgctagcgtgccagtttggcaagataggacaatcgctagtagcagattaagactattggagtactccgcctttatggaggtacagcgcgatccagacacatactccaagcatctatttgtccacatcggacaaacgaatcctgctttctccgacccccctctagaagctgtagatgtgagacagatctatgataaatttcccgaaaagaagggcggtttgaaagagctctatgaaaaggggccacccaatgcctttttcctggtgaagttctgggccgatctgaattcaacaattcaggagggacccggagccttctacggcgtaagcagccagtactcctcagccgatagtatgactattagcgtgtcgaccaaggtgtgcagttttgggaaacaagtggtggaaaaggtcgagacagaatacgccaggctcgagaacggccgttttgtatatcggattcacagaagccccatgtgcgagtatatgatcaactttattcacaagcttaagcatctcccggagaaatatatgatgaattctgttttggagaacttcacaattctgcaggtggtaacttcccgggacagccaggagacgctgctggtgatcgcctttgtctttgaggtgtctacatccgagcacggggcacagcaccacgtatacaagctggtgaaagattag

SEQ ID NO: 136279 - DNA, 1356 bp, Artificial Sequence
  derived and/or modified sequence
ttgtcacgaccagtaggaagtgggcctgagcctcgggctacttctacaattgcatctaactcttggaacgcttctagttcccctggagaggctcgggaggatgggccagagggccttgataagggtttagataacgacgccgagggcgtctggtcgcccgacattgaacagagctttcaagaggccttggcaatttatccgccatgcggaagaaggaagatcattctctccgatgaagggaagatgtatgggcgaaatgagcttattgcgcgatacatcaagttgcgcacagggaaaacacgcactcggaaacaagttagctctcacctacaagttctggccagaagaaaatctagggaaatccaatccaagcttaagagttcgccacaggaccaggtgtcaaaagataaggccttacagagcatggctagtatgagtagtgcccagatcgtgtctgccagcgtgctccaaaacaaattcagcccacccagtcctctgcctcaggccgtcttttccacgagctctcggttctggagttctccccctctgttagggcagcagccaggacccagccaggatataaaacccttcgcacaaccggcttacccaattcagcccccacttcccccaactttgagttcctatgaacccctcgcccctttgccctccgctgccgcaagcgtcccggtatggcaagacagaacgatagcatcttctcgcctcagactattggagtatagcgcattcatggaagtacagagggatccagacacatactctaagcacctgttcgtccacattgggcagactaatcccgcattcagcgaccctccactggaggcagtggatgttcggcagatctacgataagtttccagaaaaaaagggagggctgaaggagttgtacgagaagggcccacctaacgccttctttttggttaagttctgggccgacctgaactccacgatacaagaaggtccgggagccttttacggagtcagcagtcaatatagcagcgccgactccatgaccatctccgtgtccaccaaggtgtgctcttttgggaagcaggtggtcgaaaaggtcgagactgaatacgcacgcttggaaaacggacgctttgtgtaccgtattcaccgcagtccaatgtgtgagtatatgataaatttcatccataaactgaaacatcttcccgaaaagtacatgatgaattccgtcctggagaactttactatacttcaggtggttacctctcgcgactcccaggagaccttgctggttatcgcttttgtatttgaagtctccactagcgagcatggcgctcagcatcatgtgtacaaactggttaaggattag

SEQ ID NO: 136280 - DNA, 2983 bp, Artificial Sequence
  derived and/or modified sequence
acaaactttccgtcccgctcgctccctcctccgcgctcggcgcctcccgctccagcccggctcattccgcacattccggccagccccctccccacgaccccccttccccggccccccttgcggctccctcgggcccggcggagcggcccggccggagcgcccccgcgagctcggaccaggctcagccgcccagtgggctcaggcccagagcccagagcaaccagcacaatagcgtccaacagctggaacgccagcagcagccccggggaggcccgggaggatgggcccgagggcctggacaaggggctggacaacgatgcggagggcgtgtggagcccggacatcgagcagagcttccaggaggccctggccatctacccgccctgcggccggcggaagatcatcctgtcagacgagggcaagatgtacggccgaaatgagttgattgcacgctatattaaactgaggacggggaagactcggacgagaaaacaggtgtccagccacatacaggttctagctcggaagaaggtgcgggagtaccaggttggcatcaaggccatgaacctggaccaggtctccaaggacaaagcccttcagagcatggcgtccatgtcctctgcccagatcgtctctgccagtgtcctgcagaacaagttcagcccaccttcccctctgccccaggccgtcttctccacttcctcgcggttctggagcagcccccctctcctgggacagcagcctggaccctctcaggacatcaagccctttgcacagccagcctaccccatccagccgcccctgccgccgacgctcagcagttatgagcccctggccccgctcccctcagctgctgcctctgtgcctgtgtggcaggaccgtaccattgcctcctcccggctgcggctcctggagtattcagccttcatggaggtgcagcgagaccctgacacgtacagcaaacacctgtttgtgcacatcggccagacgaaccccgccttctcagacccacccctggaggcagtagatgtgcgccagatctatgacaaattccccgagaaaaagggaggattgaaggagctctatgagaaggggccccctaatgccttcttccttgtcaagttctgggccgacctcaacagcaccatccaggagggcccgggagccttctatggggtcagctctcagtacagctctgctgatagcatgaccatcagcgtctccaccaaggtgtgctcctttggcaaacaggtggtagagaaggtggagactgagtatgccaggctggagaacgggcgctttgtgtaccgtatccaccgctcgcccatgtgcgagtacatgatcaacttcatccacaagctgaagcacctgcccgagaagtacatgatgaacagcgtgctggagaacttcaccatcctgcaggtggtcacgagccgggactcccaggagaccctgcttgtcattgcttttgtcttcgaagtctccaccagtgagcacggggcccagcaccatgtctacaagctcgtcaaagactagggtgccctctgcgcctccttaaggatgcagggtgagcatctcctctccacacctgcctggcacccctgggggggtccaggattgaggattcatctacctgccaggcctcaggcccaggacccaggaggcctccccacctaccccagcacacacactccctgccactgttctgcgctttaattgtgggagaagagaggagaggagggctcagcggtggggcagcctgtccggggcgctgacccaccatcaccctgctctgcccagcctcgcgtgacctcagagaggtggggataggggacaccttcagcctccagcatgtgtggccactgtacccccacccacccttgggggagcatgatgggcaggtgagggcaggatggagaccaagggagtcagtgagcagaggccctgggagtgtccggttggggttggactgaggacagaggggcccacacttccttgcccctttgtgtcccaggcctggtgcccagactccttgcatggcttgtgtggtcctcagactccgcacagcgagcgtaggtctctgggtttcagatgaagtgcccaggctccaggaagttgagggacccacaggagaggtgggcagagctggagttctcatccagggctgcttgtccccagagcccaggtttatactacctccctggggcgggggctggccgcagggtaggggagaggctctgcagtgtggagtggagcctcatcgaggggcgctgggttaggggagcacctgtttcagactgggcatgaagaagggagcacagcagctactagaccccattagcacctcattagcccacaagccagccaggggccccaggaagatggggcaccccccagcaccctccagattgagagcaaggtagaggaaggagtcccagcctctgggcagaccagaggcccagagggagagagtagcagaaggcttttgatttttctcttgcctgaggcttgaatctgacaaacccttggtgggcactgctcccttaggttcttccccacctcaatctacctgcctagagtagcagctcccagacccagttctgggactgaaggttaacccttcacctgctgtcccttcttaacacccaggcccccagagccagctgggcctgtccagcagccacctgtgggtatttatgagtttcatatgaagtactgtgccccttcccttcctcatcccgaccctgcccgagcttcctgaaggtcctcactgtttgcatatcgctcaggccacctccaaaccccacctaggttttataatgtatattatatatttttttgtgtatttttaaaatccagctgtgatgggttatatcataaatgcagcttggggttggagcaggggccctcaaaggcccagctcctgctcaaaaaaaaaaaaaaaaaaaaattaaagttatttgtttgtgggtcagtcatgtaa

SEQ ID NO: 136281 - DNA, 2989 bp, Artificial Sequence
  derived and/or modified sequence
tcctcaacacaaactttccgtcccgctcgctccctcctccgcgctcggcgcctcccgctccagcccggctcattccgcacattccggccagccccctccccacgaccccccttccccggccccccttgcggctccctcgggcccggcggagcggcccggccggagcgcccccgcgagctcggaccaggctcagccgcccagtgggctcaggcccagagcccagagcaaccagcacaatagcgtccaacagctggaacgccagcagcagccccggggaggcccgggaggatgggcccgagggcctggacaaggggctggacaacgatgcggagggcgtgtggagcccggacatcgagcagagcttccaggaggccctggccatctacccgccctgcggccggcggaagatcatcctgtcagacgagggcaagatgtacggccgaaatgagttgattgcacgctatattaaactgaggacggggaagactcggacgagaaaacaggtctctagccacttgcaagttctagccaggcggaaatctcgggagattcagtctaagctgaagtcctctccccaggaccaggtctccaaggacaaagcccttcagagcatggcgtccatgtcctctgcccagatcgtctctgccagtgtcctgcagaacaagttcagcccaccttcccctctgccccaggccgtcttctccacttcctcgcggttctggagcagcccccctctcctgggacagcagcctggaccctctcaggacatcaagccctttgcacagccagcctaccccatccagccgcccctgccgccgacgctcagcagttatgagcccctggccccgctcccctcagctgctgcctctgtgcctgtgtggcaggaccgtaccattgcctcctcccggctgcggctcctggagtattcagccttcatggaggtgcagcgagaccctgacacgtacagcaaacacctgtttgtgcacatcggccagacgaaccccgccttctcagacccacccctggaggcagtagatgtgcgccagatctatgacaaattccccgagaaaaagggaggattgaaggagctctatgagaaggggccccctaatgccttcttccttgtcaagttctgggccgacctcaacagcaccatccaggagggcccgggagccttctatggggtcagctctcagtacagctctgctgatagcatgaccatcagcgtctccaccaaggtgtgctcctttggcaaacaggtggtagagaaggtggagactgagtatgccaggctggagaacgggcgctttgtgtaccgtatccaccgctcgcccatgtgcgagtacatgatcaacttcatccacaagctgaagcacctgcccgagaagtacatgatgaacagcgtgctggagaacttcaccatcctgcaggtggtcacgagccgggactcccaggagaccctgcttgtcattgcttttgtcttcgaagtctccaccagtgagcacggggcccagcaccatgtctacaagctcgtcaaagactagggtgccctctgcgcctccttaaggatgcagggtgagcatctcctctccacacctgcctggcacccctgggggggtccaggattgaggattcatctacctgccaggcctcaggcccaggacccaggaggcctccccacctaccccagcacacacactccctgccactgttctgcgctttaattgtgggagaagagaggagaggagggctcagcggtggggcagcctgtccggggcgctgacccaccatcaccctgctctgcccagcctcgcgtgacctcagagaggtggggataggggacaccttcagcctccagcatgtgtggccactgtacccccacccacccttgggggagcatgatgggcaggtgagggcaggatggagaccaagggagtcagtgagcagaggccctgggagtgtccggttggggttggactgaggacagaggggcccacacttccttgcccctttgtgtcccaggcctggtgcccagactccttgcatggcttgtgtggtcctcagactccgcacagcgagcgtaggtctctgggtttcagatgaagtgcccaggctccaggaagttgagggacccacaggagaggtgggcagagctggagttctcatccagggctgcttgtccccagagcccaggtttatactacctccctggggcgggggctggccgcagggtaggggagaggctctgcagtgtggagtggagcctcatcgaggggcgctgggttaggggagcacctgtttcagactgggcatgaagaagggagcacagcagctactagaccccattagcacctcattagcccacaagccagccaggggccccaggaagatggggcaccccccagcaccctccagattgagagcaaggtagaggaaggagtcccagcctctgggcagaccagaggcccagagggagagagtagcagaaggcttttgatttttctcttgcctgaggcttgaatctgacaaacccttggtgggcactgctcccttaggttcttccccacctcaatctacctgcctagagtagcagctcccagacccagttctgggactgaaggttaacccttcacctgctgtcccttcttaacacccaggcccccagagccagctgggcctgtccagcagccacctgtgggtatttatgagtttcatatgaagtactgtgccccttcccttcctcatcccgaccctgcccgagcttcctgaaggtcctcactgtttgcatatcgctcaggccacctccaaaccccacctaggttttataatgtatattatatatttttttgtgtatttttaaaatccagctgtgatgggttatatcataaatgcagcttggggttggagcaggggccctcaaaggcccagctcctgctcaaaaaaaaaaaaaaaaaaaaattaaagttatttgtttgtgggtcagtcatgt

SEQ ID NO: 136282 - protein, 303 aa, Artificial Sequence
  derived and/or modified sequence
MSDAGGGKKPPVDPQAGPGPGPGRAAGERGLSGSFPLVLKKLMENPPREARLDKEKGKEKLEEDEAAAASTMAVSASLMPPIWDKTIPYDGESFHLEYMDLDEFLLENGIPASPTHLAHNLLLPVAELEGKESASSSTASPPSSSTAIFQPSETVSSTESSLEKERETPSPIDPNCVEVDVNFNPDPADLVLSSVPGGELFNPRKHKFAEEDLKPQPMIKKAKKVFVPDEQKDEKYWTRRKKNNVAAKRSRDARRLKENQITIRAAFLEKENTALRTEVAELRKEVGKCKTIVSKYETKYGPL

SEQ ID NO: 136283 - DNA, 4382 bp, Artificial Sequence
  derived and/or modified sequence
cggcagctgcagcgggtcgcacggctccggcccatctcggggggcgggcgggggaggcgaggtgcgcgagccgagtccggggcacgatgtccgacgcgggcggcggaaagaagccgcctgtggacccgcaggcaggacccggtccggggccggggcgcgcagctggggaaaggggcctgtcggggtccttccccctggtcctgaagaagctgatggagaaccccccgcgcgaggcgcgcctcgataaggaaaaggggaaggaaaagctggaggaggacgaggccgcagccgccagcaccatggctgtctcagcctccctcatgccacccatctgggacaagaccatcccatatgatggcgaatctttccacctggagtacatggacctggatgagttcctgctggagaatggcatccccgccagccccacccacctggcccacaacctgctgctgcctgtagcagagctagaagggaaggagtctgccagctcttccacagcatccccaccatcctcctccactgccatctttcagccctctgaaaccgtgtccagcacagaatcttccctggagaaggagagggagactcccagtcccatcgaccccaattgtgtggaagtggatgtgaacttcaatccggaccccgccgacctggtgctctccagtgtgccaggcggggagctcttcaaccctcggaagcacaagtttgctgaggaggacctgaagccccagcctatgatcaaaaaggccaagaaggtctttgtccccgacgagcagaaggatgaaaagtactggacaagacgcaagaagaacaacgtggcagctaaacggtcacgggatgcccggcgcctgaaagagaatcagatcaccatccgggcagccttcctggagaaggagaacacagccctgcggacggaggtggccgagctacgcaaggaggtgggcaagtgcaagaccatcgtgtccaagtatgagaccaaatacgggcccttgtaacccgtgccccccgcccgggcggggtactgcctgcacctcagacctctgcctgggggctccctgtaacccctcacacgcgtggagacttatgactcgtcgtgggcgcatggcggcgcacctgctgcaggagcggccacgtctcagcttcattataccatggcctgcgcacgtggcgacgtccctgaggggccagtctcctcactggtggggaacgcaagagaatctgcgtagatgggtgactcagccttagtttctattcttggatgtcccagttgaatcagaaggggacctctggagtacacacctctctcctgggcgctcagggtccctggactctccctcagtctccagcctgggctgccgagggctatctctgcagaatgagttgtgatcattgtcaccctatgtcttctcaggtagcagggcgcgtttccacttaaggtgtgtctgtcacgcacctcattctccccagacagtctttgagtaacatctgttcccatcttccttggaagcaggacacaccagctcctccgtcagtgtctgcatgggtagcaggctgcaggagtggggtctctgcacagcctgggatggggcttggggctggggcctgcagcagaagtgtgcccagcgtttctcggctcccgcaccccttttcccttatggctctgaggccatcggctgtctctgcatttcattggctgtggaggagagactcctaggatggctgctgtctgagccatgagtgccagggctgagagaggcctcttcatttcctctccaggctactcagaggccatgtgaagctcgtttgtcccactagaccaggcctctgggcctgctctttctttccacccaatgtccagtcttggatcatagatttaaaaggaaaacccctcttatctaggaggctttaacttcctggaccccaggattcaccttcctagtggtgtttagaaaatgcctccacagcccccttccaccatgggcatgagagctggggtgtgtttcttgagaagctcccttttttcttgctctgctcaccggtgtggcctgggctggagtgcactctccctgggggcagctggggcctcgcaattcttgcttcaggatctctcccatgcgagctgcccggagggtgtcagcagggcaagacacctagtctagagtcaccaaggtcacagtgccactttcacgggatagcaggctcttgggacttttacacaggcctagggtcccctcagtcttggtcccaggagatgggggccactcgtgaggctggccatgctgtggcttctcacagctgtggtctcccctgcctcacaacgactcctttctcttgtgtggcgggactcgcccttttgctgtgctcagaagattcactgaggaaactcatggaagcctctgctcatttgggtcactgggacacccctgagatgggtgtgtttatttgctcagggcgggcagcctatggtgaagaggagacagaggcgatgggcgtgcttcgtcctccgtaacactggctttatttaccgtggtggttcagagtcccaggccctgacctctaaagacttttcataacagacgttaagaccaagccgtggacctcaccccaggggaatgccacggccctttggggacctgcacacccacctctccgggggacttgacaaggggccctgaggccaagggaggtcactcctccctccaggcccctgacttttactttgtggttctctaaaaaccatgtacacactttcactctattgtaaccacacagggcaggcgcatccagcatgtcagtgtcctgccccgggcagctctccctcccgggcacgctccctctggcctggtggatcaccaagagggcggttctcattttgttattagtggaagagccttgagcttaaaagctcttcattttctttgccggaaagtatatggtttgtgtttttgcagttttatttttttaaggatggacactaaatctctggtgtccatgttccgagcccggtggctgggatggtggctcgatgtgtctcctctttatcccgccctctgcctgtttggtgccctcccttctttcccccaggcagtgggtatcgggttctttcccaaagtgcttacttggaaagagtgtggctgctggactcttttcgaaatgcccctctgagtcaggagcctggtggggacaagatggaggatgtccacagaggctgacctgtgggggaaaagaagtgctcaggtaaggttgtctcctctcctgtcctaaaaaaatccatgcttgcaggagagggttggtgcctgctcagtttctgtcgagggaatgggagtctcctcggctccctcctgggccctctgcttcttggaggccgaccgctggagactgcggctcctgtgcttggatctttgacatctgtcagtcactggaggctagagaagttgactttaccttggctttctgtgggttcccgatgggcttggaagtgccgtctacttcctaagcatcctgtctaaagctttgtggcaccctcagtgcaacctcagaacagacaaatcatgaatgagctggaactttgcaagaatattcatattataaatgtctcatctgatggaggaacgtgtgcatttagagagagggagagttttcaaggtttatggcaactttgtggaggacctgggtaactcttacccttggccaaaggaagaggttttcctgtctggcttctgaggttggagggggcacttagcagtgaaccttaagtctgggtacatgtaaccctgctgaggggctgtgcaggccgctcctacggtcctttggcctgaggcagggcgggaggcatgcaagccagtgggggaaaacccctctgaagctgggcagccctctacctgggccccgggagccgtgctccttggaacgcaaagggccgaggagcatctggttttcatggcaaagctctactccagagctcctttaacatctgctaattaagtgcaataaatttttctagaaaatggcaaagatgacttccaggtggatattgctctcttacggtgttggggatgccagaacaccacttggttttatttttctaagtgcatgtgatgtgatagagtgtgtggggctctgtgtccttccctgggagctggcattccagcgggcccctctctttacctttgttgggggaaggaggcaagagagaaattccttcttcccagccagagagggcagaagcagaccgtagcccattggccttatgtgcgtgtgtgcgtgcgagtgtgtcactgctggtgggccggagtgatgtggtgggagggaagccgggaatgtatccttttcagacaaaattaaatattttgaaatgagaaaaaaaaaaaaaaaaaaaa

SEQ ID NO: 136284 - DNA, 912 bp, Artificial Sequence
  derived and/or modified sequence
atgagcgacgccggcggcggcaagaagccccccgtggacccccaggccggccccggccccggccccggcagagccgccggcgagagaggcctgagcggcagcttccccctggtgctgaagaagctgatggagaacccccccagagaggccagactggacaaggagaagggcaaggagaagctggaggaggacgaggccgccgccgccagcaccatggccgtgagcgccagcctgatgccccccatctgggacaagaccatcccctacgacggcgagagcttccacctggagtacatggacctggacgagttcctgctggagaacggcatccccgccagccccacccacctggcccacaacctgctgctgcccgtggccgagctggagggcaaggagagcgccagcagcagcaccgccagcccccccagcagcagcaccgccatcttccagcccagcgagaccgtgagcagcaccgagagcagcctggagaaggagagagagacccccagccccatcgaccccaactgcgtggaggtggacgtgaacttcaaccccgaccccgccgacctggtgctgagcagcgtgcccggcggcgagctgttcaaccccagaaagcacaagttcgccgaggaggacctgaagccccagcccatgatcaagaaggccaagaaggtgttcgtgcccgacgagcagaaggacgagaagtactggaccagaagaaagaagaacaacgtggccgccaagagaagcagagacgccagaagactgaaggagaaccagatcaccatcagagccgccttcctggagaaggagaacaccgccctgagaaccgaggtggccgagctgagaaaggaggtgggcaagtgcaagaccatcgtgagcaagtacgagaccaagtacggccccctgtag

SEQ ID NO: 136285 - DNA, 912 bp, Artificial Sequence
  derived and/or modified sequence
atgagtgacgccgggggtggtaaaaagccacctgttgacccacaggcgggacccgggccgggaccaggacgggcagccggagagagagggttatccgggtcatttcctctggtcctaaagaagctaatggagaaccctcccagagaggccaggctggataaagaaaaagggaaggagaaattggaggaggatgaggccgcggctgcatctaccatggccgtgagtgcgtcactgatgccccctatttgggataaaacaattccgtatgatggggaatcttttcacttagaatatatggacctcgacgagttcctgctggagaatgggatccctgcttcccctacgcacttggcccacaacctcttgcttcccgtcgcggagctcgaaggtaaagaatcggcgtcatcttctactgcgtctcctccatcttccagcactgcaatcttccagcctagtgagacggtcagcagtaccgagtccagcttggaaaaggaacgggagaccccatctccaattgatccaaattgtgtagaagtggatgtgaactttaacccagatcccgcagatctagtattgtcaagcgtgccaggtggagagctgttcaaccctcgaaagcataagttcgcagaggaggacctgaagcctcaaccaatgatcaagaaagccaagaaggtattcgttcctgacgagcagaaagacgagaaatactggacacggagaaagaaaaataatgtggccgctaagcgcagccgagacgctaggcgcttaaaagagaaccagatcacaatcagggccgcatttctggaaaaggagaacaccgcgcttcggacagaagtggccgagttgaggaaagaggtcggcaagtgtaaaacgatcgtgagtaaatatgaaaccaagtatggaccattatag

SEQ ID NO: 136286 - DNA, 912 bp, Artificial Sequence
  derived and/or modified sequence
atgtctgatgctgggggcggcaagaagccccctgtggacccccaggccggccctggccctggccctggccgggccgccggggagcggggcctgagcggcagcttccccctggtgctgaagaagctgatggagaaccccccccgggaggcccggctggacaaggagaagggcaaggagaagctggaggaggatgaggccgccgccgccagcaccatggctgtgtctgccagcctgatgccacccatctgggacaagaccatcccctatgatggagagagcttccacctggagtacatggacctggatgagttcctgctggagaatggcatcccagccagccccacccacctggcccacaacctgctgctgcctgtggccgagctggagggcaaggagagcgccagcagcagcacagccagcccccccagcagcagcacagccatcttccagcccagcgagaccgtgagcagcacagagagcagcctggagaaggagcgggagacccccagccccatcgaccccaactgtgtggaggtggatgtgaacttcaacccagaccctgctgacctggtgctgagctctgtgcctggaggagagctgttcaaccccaggaagcacaagtttgctgaggaggacctgaagccccagcccatgatcaagaaggccaagaaggtgtttgtgcctgatgagcagaaggatgagaagtactggaccaggaggaagaagaacaacgtggccgccaagaggagcagagatgcccggcggctgaaggagaaccagatcaccatccgggccgccttcctggagaaggaaaatacagccctgaggacagaggtggccgagctgaggaaggaggtgggcaagtgcaagaccatcgtgtccaaatatgagaccaagtatggccccctgtag

SEQ ID NO: 136287 - DNA, 912 bp, Artificial Sequence
  derived and/or modified sequence
atgagcgacgccggcggcggcaagaagccccccgtggacccccaggctgggccggggccagggccgggaagggcagcgggcgagcgcggtttatcaggttctttccccttggtattgaaaaagttgatggagaatcctccccgagaggcacgccttgacaaggagaaggggaaggagaaactggaagaggatgaagcggcagctgcttcaaccatggctgtctcggcctctcttatgccgccaatctgggacaagacaataccgtacgacggggagtcatttcatcttgagtacatggatttagatgagtttctgcttgagaacggtatccctgcaagtccaacccatctcgcacataacctgttgttacctgttgcagaacttgaggggaaagagtcagcaagtagcagtactgcctcccctccttccagttcgactgcaatcttccagccttccgagaccgtaagctccaccgaaagctctctcgagaaggaaagagaaacaccgtctcccattgatcccaattgtgtcgaggtggatgtcaatttcaatcccgatccggcagaccttgtgctcagctcagtgccgggcggcgagctgttcaaccctcgaaagcacaagttcgccgaggaggatctcaaaccacaacccatgatcaaaaaagcaaagaaggttttcgtgcctgatgaacaaaaagatgaaaagtattggacccggagaaaaaagaataatgttgccgccaagcgatctcgagatgctcgacgtcttaaagaaaaccagatcactatcagagctgctttccttgaaaaggagaataccgcgctgcgaacagaggtcgctgagttaaggaaagaggtagggaagtgcaagactatcgtgagcaaatatgagaccaaatatggccccttatag

SEQ ID NO: 136288 - DNA, 912 bp, Artificial Sequence
  derived and/or modified sequence
atgtccgacgccggaggcggaaagaagcctcctgttgatcctcaagcaggccctggacccggtcccggaagagctgccggagaacgcggtttaagcggatccttccccctggtcctcaagaagcttatggaaaatcctccaagggaggctagattagataaagaaaaaggaaaagagaaactcgaagaagacgaagcagctgctgccagcacaatggctgtgagcgcctctctgatgcctcccatctgggacaaaacgattccatacgatggagaatcatttcacctcgagtacatggacctggacgagttcctgcttgagaatgggatcccagccagcccgactcatctcgcgcataacttactcctgcccgttgcggaacttgagggaaaggaatctgcgagcagctcaactgcttcacctccatccagctcaacggcgatctttcagcccagtgagactgtgagttctaccgaaagcagtctggagaaggagcgggagacaccctcacctatcgatccaaattgcgtggaggtcgacgttaacttcaaccccgacccagccgatctggttctgtcctccgtccccggaggggagctgttcaatcctaggaagcataaattcgcggaagaggatctcaagccgcaacccatgatcaagaaggccaaaaaggtgttcgtgcccgatgaacagaaggatgagaaatattggacacgccgtaagaaaaacaatgtggctgctaaacgcagccgggacgcgcgaagattgaaggaaaatcagataacaattcgagctgccttcctggaaaaagaaaacactgcccttcggacagaagtagccgaactccgcaaagaagtcgggaaatgcaagactatcgtgagcaagtacgaaaccaaatacggcccactgtag

SEQ ID NO: 136289 - DNA, 4394 bp, Artificial Sequence
  derived and/or modified sequence
attgggcgcctgcgcagtagctgcccgtgtcggcagctgcagcgggtcgcacggctccggcccatctcggggggcgggcgggggaggcgaggtgcgcgagccgagtccggggcacgatgtccgacgcgggcggcggaaagaagccgcctgtggacccgcaggcaggacccggtccggggccggggcgcgcagctggggaaaggggcctgtcggggtccttccccctggtcctgaagaagctgatggagaaccccccgcgcgaggcgcgcctcgataaggaaaaggggaaggaaaagctggaggaggacgaggccgcagccgccagcaccatggctgtctcagcctccctcatgccacccatctgggacaagaccatcccatatgatggcgaatctttccacctggagtacatggacctggatgagttcctgctggagaatggcatccccgccagccccacccacctggcccacaacctgctgctgcctgtagcagagctagaagggaaggagtctgccagctcttccacagcatccccaccatcctcctccactgccatctttcagccctctgaaaccgtgtccagcacagaatcttccctggagaaggagagggagactcccagtcccatcgaccccaattgtgtggaagtggatgtgaacttcaatccggaccccgccgacctggtgctctccagtgtgccaggcggggagctcttcaaccctcggaagcacaagtttgctgaggaggacctgaagccccagcctatgatcaaaaaggccaagaaggtctttgtccccgacgagcagaaggatgaaaagtactggacaagacgcaagaagaacaacgtggcagctaaacggtcacgggatgcccggcgcctgaaagagaatcagatcaccatccgggcagccttcctggagaaggagaacacagccctgcggacggaggtggccgagctacgcaaggaggtgggcaagtgcaagaccatcgtgtccaagtatgagaccaaatacgggcccttgtaacccgtgccccccgcccgggcggggtactgcctgcacctcagacctctgcctgggggctccctgtaacccctcacacgcgtggagacttatgactcgtcgtgggcgcatggcggcgcacctgctgcaggagcggccacgtctcagcttcattataccatggcctgcgcacgtggcgacgtccctgaggggccagtctcctcactggtggggaacgcaagagaatctgcgtagatgggtgactcagccttagtttctattcttggatgtcccagttgaatcagaaggggacctctggagtacacacctctctcctgggcgctcagggtccctggactctccctcagtctccagcctgggctgccgagggctatctctgcagaatgagttgtgatcattgtcaccctatgtcttctcaggtagcagggcgcgtttccacttaaggtgtgtctgtcacgcacctcattctccccagacagtctttgagtaacatctgttcccatcttccttggaagcaggacacaccagctcctccgtcagtgtctgcatgggtagcaggctgcaggagtggggtctctgcacagcctgggatggggcttggggctggggcctgcagcagaagtgtgcccagcgtttctcggctcccgcaccccttttcccttatggctctgaggccatcggctgtctctgcatttcattggctgtggaggagagactcctaggatggctgctgtctgagccatgagtgccagggctgagagaggcctcttcatttcctctccaggctactcagaggccatgtgaagctcgtttgtcccactagaccaggcctctgggcctgctctttctttccacccaatgtccagtcttggatcatagatttaaaaggaaaacccctcttatctaggaggctttaacttcctggaccccaggattcaccttcctagtggtgtttagaaaatgcctccacagcccccttccaccatgggcatgagagctggggtgtgtttcttgagaagctcccttttttcttgctctgctcaccggtgtggcctgggctggagtgcactctccctgggggcagctggggcctcgcaattcttgcttcaggatctctcccatgcgagctgcccggagggtgtcagcagggcaagacacctagtctagagtcaccaaggtcacagtgccactttcacgggatagcaggctcttgggacttttacacaggcctagggtcccctcagtcttggtcccaggagatgggggccactcgtgaggctggccatgctgtggcttctcacagctgtggtctcccctgcctcacaacgactcctttctcttgtgtggcgggactcgcccttttgctgtgctcagaagattcactgaggaaactcatggaagcctctgctcatttgggtcactgggacacccctgagatgggtgtgtttatttgctcagggcgggcagcctatggtgaagaggagacagaggcgatgggcgtgcttcgtcctccgtaacactggctttatttaccgtggtggttcagagtcccaggccctgacctctaaagacttttcataacagacgttaagaccaagccgtggacctcaccccaggggaatgccacggccctttggggacctgcacacccacctctccgggggacttgacaaggggccctgaggccaagggaggtcactcctccctccaggcccctgacttttactttgtggttctctaaaaaccatgtacacactttcactctattgtaaccacacagggcaggcgcatccagcatgtcagtgtcctgccccgggcagctctccctcccgggcacgctccctctggcctggtggatcaccaagagggcggttctcattttgttattagtggaagagccttgagcttaaaagctcttcattttctttgccggaaagtatatggtttgtgtttttgcagttttatttttttaaggatggacactaaatctctggtgtccatgttccgagcccggtggctgggatggtggctcgatgtgtctcctctttatcccgccctctgcctgtttggtgccctcccttctttcccccaggcagtgggtatcgggttctttcccaaagtgcttacttggaaagagtgtggctgctggactcttttcgaaatgcccctctgagtcaggagcctggtggggacaagatggaggatgtccacagaggctgacctgtgggggaaaagaagtgctcaggtaaggttgtctcctctcctgtcctaaaaaaatccatgcttgcaggagagggttggtgcctgctcagtttctgtcgagggaatgggagtctcctcggctccctcctgggccctctgcttcttggaggccgaccgctggagactgcggctcctgtgcttggatctttgacatctgtcagtcactggaggctagagaagttgactttaccttggctttctgtgggttcccgatgggcttggaagtgccgtctacttcctaagcatcctgtctaaagctttgtggcaccctcagtgcaacctcagaacagacaaatcatgaatgagctggaactttgcaagaatattcatattataaatgtctcatctgatggaggaacgtgtgcatttagagagagggagagttttcaaggtttatggcaactttgtggaggacctgggtaactcttacccttggccaaaggaagaggttttcctgtctggcttctgaggttggagggggcacttagcagtgaaccttaagtctgggtacatgtaaccctgctgaggggctgtgcaggccgctcctacggtcctttggcctgaggcagggcgggaggcatgcaagccagtgggggaaaacccctctgaagctgggcagccctctacctgggccccgggagccgtgctccttggaacgcaaagggccgaggagcatctggttttcatggcaaagctctactccagagctcctttaacatctgctaattaagtgcaataaatttttctagaaaatggcaaagatgacttccaggtggatattgctctcttacggtgttggggatgccagaacaccacttggttttatttttctaagtgcatgtgatgtgatagagtgtgtggggctctgtgtccttccctgggagctggcattccagcgggcccctctctttacctttgttgggggaaggaggcaagagagaaattccttcttcccagccagagagggcagaagcagaccgtagcccattggccttatgtgcgtgtgtgcgtgcgagtgtgtcactgctggtgggccggagtgatgtggtgggagggaagccgggaatgtatccttttcagacaaaattaaatattttgaaatgagaa

SEQ ID NO: 136290 - protein, 237 aa, Artificial Sequence
  derived and/or modified sequence
MNIFDRKINFDALLKFSHITPSTQQHLKKVYASFALCMFVAAAGAYVHMVTHFIQAGLLSALGSLILMIWLMATPHSHETEQKRLGLLAGFAFLTGVGLGPALEFCIAVNPSILPTAFMGTAMIFTCFTLSALYARRRSYLFLGGILMSALSLLLLSSLGNVFFGSIWLFQANLYVGLVVMCGFVLFDTQLIIEKAEHGDQDYIWHCIDLFLDFITVFRKLMMILAMNEKDKKKEKK

SEQ ID NO: 136291 - protein, 126 aa, Artificial Sequence [sequence omitted]

SEQ ID NO: 136292 - protein, 145 aa, Artificial Sequence
  derived and/or modified sequence
MNIFDRKINFDALLKFSHITPSTQQHLKKVYASFALCMFVAAAGAYVHMVTHFIQAGLLSALGSLILMIWLMATPHSHETEQKRLGLLAGFAFLTGVGLGPALEFCIAVNPSILPTAFMGTAMIFTCFTLSALYARRRSYLFLGG

SEQ ID NO: 136293 - protein, 96 aa, Artificial Sequence
  derived and/or modified sequence
MNIFDRKINFDALLKFSHITPSTQQHLKKVYASFALCMFVAAAGAYVHMVTHFIQAGLLSALGSLILMIWLMATPHSHETEQKRLGLLAGFAFLTG

SEQ ID NO: 136294 - protein, 138 aa, Artificial Sequence
  derived and/or modified sequence
MNIFDRKINFDALLKFSHITPSTQQHLKKVYASFALCMFVAAAGAYVHMVTHFIQAGLLSALGSLILMIWLMATPHSHETEQKRLGLLAGFAFLTGVGLGPALEFCIAVNPSILPTAFMGTAMIFTCFTLSALYARRR

SEQ ID NO: 136295 - protein, 130 aa, Artificial Sequence
  derived and/or modified sequence
MNIFDRKINFDALLKFSHITPSTQQHLKKVYASFALCMFVAAAGAYVHMVTHFIQAGLLSALGSLILMIWLMATPHSHETEQKRLGLLAGFAFLTGVGLGPALEFCIAVNPSILPTAFMGTAMIFTCFTL

SEQ ID NO: 136296 - protein, 89 aa, Artificial Sequence
  derived and/or modified sequence
MNIFDRKINFDALLKFSHITPSTQQHLKKVYASFALCMFVAAAGAYVHMVTHFIQAGLLSALGSLILMIWLMATPHSHETEQKRLGLLA

SEQ ID NO: 136297 - protein, 108 aa, Artificial Sequence
  derived and/or modified sequence
MNIFDRKINFDALLKFSHITPSTQQHLKKVYASFALCMFVAAAGAYVHMVTHFIQAGLLSALGSLILMIWLMATPHSHETEQKRLGLLAGFAFLTGVGLGPALEFCIA

SEQ ID NO: 136298 - protein, 41 aa, Artificial Sequence
  derived and/or modified sequence
MNIFDRKINFDALLKFSHITPSTQQHLKKVYASFALCMFVA

SEQ ID NO: 136299 - protein, 205 aa, Artificial Sequence
  derived and/or modified sequence
MNIFDRKINFDALLKFSHITPSTQQHLKKVYASFALCMFVAAAGAYVHMVTHFIQAGLLSALGSLILMIWLMATPHSHETEQKRLGLLAGFAFLTGVGLGPALEFCIAVNPSILPTAFMGTAMIFTCFTLSALYARRRSYLFLGGILMSALSLLLLSSLGNVFFGSIWLFQANLYVGLVVMCGFVLFDTQLIIEKAEHGDQDYIW

SEQ ID NO: 136300 - DNA, 714 bp, Artificial Sequence
  derived and/or modified sequence
atgaacatcttcgacagaaagatcaacttcgacgccctgctgaagttcagccacatcacccccagcacccagcagcacctgaagaaggtgtacgccagcttcgccctgtgcatgttcgtggccgccgccggcgcctacgtgcacatggtgacccacttcatccaggccggcctgctgagcgccctgggcagcctgatcctgatgatctggctgatggccaccccccacagccacgagaccgagcagaagagactgggcctgctggccggcttcgccttcctgaccggcgtgggcctgggccccgccctggagttctgcatcgccgtgaaccccagcatcctgcccaccgccttcatgggcaccgccatgatcttcacctgcttcaccctgagcgccctgtacgccagaagaagaagctacctgttcctgggcggcatcctgatgagcgccctgagcctgctgctgctgagcagcctgggcaacgtgttcttcggcagcatctggctgttccaggccaacctgtacgtgggcctggtggtgatgtgcggcttcgtgctgttcgacacccagctgatcatcgagaaggccgagcacggcgaccaggactacatctggcactgcatcgacctgttcctggacttcatcaccgtgttcagaaagctgatgatgatcctggccatgaacgagaaggacaagaagaaggagaagaagtag

SEQ ID NO: 136301 - DNA, 381 bp, Artificial Sequence
  derived and/or modified sequence
atgaacatcttcgacagaaagatcaacttcgacgccctgctgaagttcagccacatcacccccagcacccagcagcacctgaagaaggtgtacgccagcttcgccctgtgcatgttcgtggccgccgccggcgcctacgtgcacatggtgacccacttcatccaggccggcctgctgagcgccctgggcagcctgatcctgatgatctggctgatggccaccccccacagccacgagaccgagcagaagagactgggcctgctggccggcttcgccttcctgaccggcgtgggcctgggccccgccctggagttctgcatcgccgtgaaccccagcatcctgcccaccgccttcatgggcaccgccctgatcagcagctag

SEQ ID NO: 136302 - DNA, 438 bp, Artificial Sequence
  derived and/or modified sequence
atgaacatcttcgacagaaagatcaacttcgacgccctgctgaagttcagccacatcacccccagcacccagcagcacctgaagaaggtgtacgccagcttcgccctgtgcatgttcgtggccgccgccggcgcctacgtgcacatggtgacccacttcatccaggccggcctgctgagcgccctgggcagcctgatcctgatgatctggctgatggccaccccccacagccacgagaccgagcagaagagactgggcctgctggccggcttcgccttcctgaccggcgtgggcctgggccccgccctggagttctgcatcgccgtgaaccccagcatcctgcccaccgccttcatgggcaccgccatgatcttcacctgcttcaccctgagcgccctgtacgccagaagaagaagctacctgttcctgggcggctag

SEQ ID NO: 136303 - DNA, 291 bp, Artificial Sequence
  derived and/or modified sequence
atgaacatcttcgacagaaagatcaacttcgacgccctgctgaagttcagccacatcacccccagcacccagcagcacctgaagaaggtgtacgccagcttcgccctgtgcatgttcgtggccgccgccggcgcctacgtgcacatggtgacccacttcatccaggccggcctgctgagcgccctgggcagcctgatcctgatgatctggctgatggccaccccccacagccacgagaccgagcagaagagactgggcctgctggccggcttcgccttcctgaccggctag

SEQ ID NO: 136304 - DNA, 417 bp, Artificial Sequence
  derived and/or modified sequence
atgaacatcttcgacagaaagatcaacttcgacgccctgctgaagttcagccacatcacccccagcacccagcagcacctgaagaaggtgtacgccagcttcgccctgtgcatgttcgtggccgccgccggcgcctacgtgcacatggtgacccacttcatccaggccggcctgctgagcgccctgggcagcctgatcctgatgatctggctgatggccaccccccacagccacgagaccgagcagaagagactgggcctgctggccggcttcgccttcctgaccggcgtgggcctgggccccgccctggagttctgcatcgccgtgaaccccagcatcctgcccaccgccttcatgggcaccgccatgatcttcacctgcttcaccctgagcgccctgtacgccagaagaagatag

SEQ ID NO: 136305 - DNA, 393 bp, Artificial Sequence
  derived and/or modified sequence
atgaacatcttcgacagaaagatcaacttcgacgccctgctgaagttcagccacatcacccccagcacccagcagcacctgaagaaggtgtacgccagcttcgccctgtgcatgttcgtggccgccgccggcgcctacgtgcacatggtgacccacttcatccaggccggcctgctgagcgccctgggcagcctgatcctgatgatctggctgatggccaccccccacagccacgagaccgagcagaagagactgggcctgctggccggcttcgccttcctgaccggcgtgggcctgggccccgccctggagttctgcatcgccgtgaaccccagcatcctgcccaccgccttcatgggcaccgccatgatcttcacctgcttcaccctgtag

SEQ ID NO: 136306 - DNA, 270 bp, Artificial Sequence
  derived and/or modified sequence
atgaacatcttcgacagaaagatcaacttcgacgccctgctgaagttcagccacatcacccccagcacccagcagcacctgaagaaggtgtacgccagcttcgccctgtgcatgttcgtggccgccgccggcgcctacgtgcacatggtgacccacttcatccaggccggcctgctgagcgccctgggcagcctgatcctgatgatctggctgatggccaccccccacagccacgagaccgagcagaagagactgggcctgctggcctag

SEQ ID NO: 136307 - DNA, 327 bp, Artificial Sequence
  derived and/or modified sequence
atgaacatcttcgacagaaagatcaacttcgacgccctgctgaagttcagccacatcacccccagcacccagcagcacctgaagaaggtgtacgccagcttcgccctgtgcatgttcgtggccgccgccggcgcctacgtgcacatggtgacccacttcatccaggccggcctgctgagcgccctgggcagcctgatcctgatgatctggctgatggccaccccccacagccacgagaccgagcagaagagactgggcctgctggccggcttcgccttcctgaccggcgtgggcctgggccccgccctggagttctgcatcgcctag

SEQ ID NO: 136308 - DNA, 135 bp, Artificial Sequence
  derived and/or modified sequence
atgaacatcttcgacagaaagatcaacttcgacgccctgctgaagttcagccacatcacccccagcacccagcagcacctgaagaaggtgtacgccagcttcgccctgtgcatgttcgtggccgccgccggctag

SEQ ID NO: 136309 - DNA, 126 bp, Artificial Sequence
  derived and/or modified sequence
atgaacatcttcgacagaaagatcaacttcgacgccctgctgaagttcagccacatcacccccagcacccagcagcacctgaagaaggtgtacgccagcttcgccctgtgcatgttcgtggcctag

SEQ ID NO: 136310 - DNA, 618 bp, Artificial Sequence
  derived and/or modified sequence
atgaacatcttcgacagaaagatcaacttcgacgccctgctgaagttcagccacatcacccccagcacccagcagcacctgaagaaggtgtacgccagcttcgccctgtgcatgttcgtggccgccgccggcgcctacgtgcacatggtgacccacttcatccaggccggcctgctgagcgccctgggcagcctgatcctgatgatctggctgatggccaccccccacagccacgagaccgagcagaagagactgggcctgctggccggcttcgccttcctgaccggcgtgggcctgggccccgccctggagttctgcatcgccgtgaaccccagcatcctgcccaccgccttcatgggcaccgccatgatcttcacctgcttcaccctgagcgccctgtacgccagaagaagaagctacctgttcctgggcggcatcctgatgagcgccctgagcctgctgctgctgagcagcctgggcaacgtgttcttcggcagcatctggctgttccaggccaacctgtacgtgggcctggtggtgatgtgcggcttcgtgctgttcgacacccagctgatcatcgagaaggccgagcacggcgaccaggactacatctggtag

SEQ ID NO: 136311 - DNA, 714 bp, Artificial Sequence
  derived and/or modified sequence
atgaacatcttcgatagaaagatcaacttcgacgcgttgctgaagttcagtcacatcacccccagtactcagcaacatctcaaaaaggtctacgccagctttgcactttgcatgttcgtagccgctgcaggtgcgtacgtccacatggtgacacacttcatccaggcaggattactcagcgccttgggttctctgatcctgatgatctggctgatggcaacaccacattcgcatgagacggaacagaagcggctcggtttgctcgctggctttgcgttcctaaccggtgtgggtctggggcctgcactcgaattctgtatagccgtaaacccttctattctccctactgccttcatgggaaccgcgatgatttttacgtgttttacactgtctgccctttacgcccgaagaagaagctatctatttctgggaggaatcctgatgagcgctcttagtcttctgctgttgtcaagtttggggaacgtcttctttggttcgatttggttattccaagcgaatctctacgtgggcctcgtcgtgatgtgcgggttcgtgctgttcgatacccagctgattattgaaaaggcagaacacggggatcaagactatatttggcattgcattgatttgttcctggacttcatcactgtcttcagaaagctgatgatgatactggcaatgaacgagaaggacaagaagaaggaaaagaagtag

SEQ ID NO: 136312 - DNA, 714 bp, Artificial Sequence
  derived and/or modified sequence
atgaacatcttcgatagaaaaatcaatttcgacgcattgctgaaattttcacatattaccccatcaacacagcagcaccttaaaaaggtgtatgcttcattcgctctctgtatgtttgtcgccgctgcgggagcctacgtgcacatggtgactcattttatccaagctgggctcctgtccgcattggggagcttgatactgatgatctggctgatggcaacgccgcattctcacgaaaccgaacagaagcgcctcggcctgcttgccggtttcgctttcttaactggcgtgggacttggccctgcgttggaattttgcatcgccgtgaacccttccatccttcctactgcctttatgggcactgcaatgatatttacatgcttcactttgtccgccctgtatgctcgaaggcgatcttacttatttcttggagggatattgatgagcgcgttatctcttctgctgctatccagtctcggcaacgtatttttcggcagtatctggttgttccaggcgaacctctacgtaggcttggtcgtaatgtgtggcttcgtacttttcgacactcagttgatcatcgaaaaagctgaacatggagaccaagattatatctggcactgtattgacttgttcctggacttcatcactgtattccgaaagctaatgatgattcttgccatgaatgagaaagacaaaaaaaaggaaaagaaatag

SEQ ID NO: 136313 - DNA, 381 bp, Artificial Sequence
  derived and/or modified sequence
atgaatatttttgatagaaaaatcaacttcgacgccctgttaaagttcagccatatcactccatccacacagcagcacctgaaaaaggtttacgctagttttgctctctgtatgtttgtggctgccgctggagcgtacgtccatatggtgactcactttatccaagctgggcttctctccgccctggggtctctgatattgatgatctggctcatggccaccccccacagtcacgaaactgagcagaagcgccttggattactcgccgggtttgcattcctaactggagtgggcctgggacccgcattggaattttgtattgctgtgaacccttctattctgccaacggctttcatggggacagctctcatctcctcatag

SEQ ID NO: 136314 - DNA, 714 bp, Artificial Sequence
  derived and/or modified sequence
atgaacatttttgatcgaaagatcaacttcgacgctctcctgaaattctcgcacatcaccccttcaactcagcagcatctcaaaaaagtctatgcatcattcgccctgtgtatgttcgtggctgctgcaggtgcatatgtccatatggtgactcattttatccaggccggtcttctgtcagcactgggcagcttaatacttatgatttggctgatggcgactccacattcacacgagacagagcagaaaaggctggggctcctggccggtttcgctttcctcactggcgtggggctgggaccagccttagaattctgcattgcagtaaatcctagtatcctgcccactgcttttatggggactgcgatgatatttacgtgttttacactgagtgctctgtacgcgaggaggaggtcttacctatttctcggaggaatcctgatgtccgctctcagcctgctcctgctgagcagtctaggtaacgtgtttttcggatctatctggctgtttcaagctaatttgtacgttggactggtggttatgtgcggttttgtgctgttcgatacccagttaataatcgagaaggcagagcatggggaccaggactatatctggcattgtatcgatctctttttggactttatcactgttttccgtaagcttatgatgatcctggccatgaacgagaaggataagaaaaaggagaagaagtag

SEQ ID NO: 136315 - DNA, 438 bp, Artificial Sequence
  derived and/or modified sequence
atgaacatcttcgacagaaaaattaattttgatgccctgctaaaattctcccacataactcccagtacccagcagcatctgaagaaggtgtatgccagcttcgccctgtgtatgttcgtggccgcagcgggcgcatatgttcatatggtaactcactttattcaggctggtcttctttcagccctcggctccttgatcctgatgatctggctgatggcaaccccacacagccatgagaccgagcagaagagactggggctactggccggcttcgccttcttaacgggggttggactgggccctgcattggaattctgtattgccgttaatccgagtatcctacctactgcttttatgggaacggcaatgatattcacatgctttacgttgtctgcactgtatgccagacgcagaagctacctgtttcttggaggctag

SEQ ID NO: 136316 - DNA, 291 bp, Artificial Sequence
  derived and/or modified sequence
atgaatatctttgacaggaagattaacttcgacgctcttctcaaattttcacatatcacccctagtacccagcagcatttgaagaaggtttatgccagctttgcgctttgtatgtttgtggccgccgccggcgcctatgtccacatggtcacccattttatacaggctggtctcttgagcgccttaggaagcctcatactgatgatctggttgatggctaccccccattcccatgaaaccgagcaaaaaaggctgggccttctggccggcttcgcattccttaccggatag

SEQ ID NO: 136317 - DNA, 291 bp, Artificial Sequence
  derived and/or modified sequence
atgaacatttttgatcgtaagatcaattttgacgcactactgaagtttagccacatcacccctagcacgcaacagcatctgaagaaagtgtacgcttctttcgctctctgcatgttcgtggccgccgcaggggcctatgtccatatggtgacacacttcatccaggctggcttgctctctgcactcggttctcttattctcatgatctggctgatggcaacacctcatagccacgaaaccgaacaaaaaaggctgggcctgctcgcagggttcgcattcctcacaggctag

SEQ ID NO: 136318 - DNA, 417 bp, Artificial Sequence
  derived and/or modified sequence
atgaatatctttgaccgcaaaataaatttcgacgcactgctgaagttttcacacatcaccccttccactcagcaacacttgaagaaagtgtacgcaagcttcgccttgtgtatgttcgtggccgccgctggagcatatgtgcacatggtgactcactttattcaagccggcttactgagtgcactgggctcattgatactgatgatctggctaatggccactccccactctcacgaaactgaacaaaagcgactgggtttacttgccggctttgccttcctgaccggtgtgggtctcgggcccgcattagaattttgcatagcagtgaatccgtccattttaccaacagcctttatgggcactgctatgatctttacatgcttcaccctgtccgccctgtatgcaaggaggcggtag

SEQ ID NO: 136319 - DNA, 393 bp, Artificial Sequence
  derived and/or modified sequence
atgaatattttcgatcgaaaaattaactttgacgccctcctaaagtttagccacataacacctagtacgcaacagcacctgaagaaagtttatgcgagttttgcactctgcatgttcgtcgcagcagcaggagcttatgttcatatggtgactcacttcatacaggcaggtctgctttctgcattaggcagccttatcctcatgatttggttgatggctactcctcacagccacgaaaccgagcagaaaaggctgggactgttggcgggatttgcttttctcactggcgtaggtctcggcccggcactggagttttgcatcgctgttaatccatccatattgcctacagcctttatggggaccgcgatgatcttcacctgcttcaccctgtag

SEQ ID NO: 136320 - DNA, 270 bp, Artificial Sequence
  derived and/or modified sequence
atgaatattttcgataggaaaattaattttgacgcgctgttgaagttctctcatattacaccaagcactcaacaacacctgaaaaaggtgtacgcatcctttgccctctgcatgttcgttgctgccgccggcgcttacgtccacatggtgacgcattttatccaggcaggtctgttatctgcactgggctcattgatcctgatgatttggttaatggctacgcctcatagtcatgagactgaacaaaagaggctcggactgttggcatag

SEQ ID NO: 136321 - DNA, 714 bp, Artificial Sequence
  derived and/or modified sequence
atgaacattttcgatagaaagattaactttgacgcattgctgaagttttcccacattacgccatccactcagcagcatcttaaaaaggtttacgcctccttcgcactgtgtatgtttgttgccgccgcaggcgcatacgtacatatggttacacacttcattcaggctgggctcctgtctgccctaggctctcttatcctcatgatctggctcatggccaccccacactctcatgagacagagcagaagaggctggggttgcttgctgggtttgcctttctcacaggtgtgggcttgggaccagcactcgaattctgtatcgcggtaaatccctcaatcttgccaaccgcttttatgggcactgcgatgatttttacgtgtttcaccctaagcgctctttatgcgaggcgccgctcttatctctttctcggaggcatcctgatgtctgcccttagcttattgctgttatcatcgctcggcaatgtgtttttcggttctatctggctgtttcaagcaaatctgtacgtgggcctggttgtgatgtgtgggttcgtactcttcgatactcagttgataatcgagaaggccgagcatggcgaccaagattacatatggcattgtattgacctgtttctcgacttcatcacggtgtttcgaaagctcatgatgatcttggcaatgaacgaaaaggacaaaaaaaaggaaaagaaatag

SEQ ID NO: 136322 - DNA, 291 bp, Artificial Sequence
  derived and/or modified sequence
atgaatatctttgataggaagattaatttcgatgccttactgaaattttcccatatcacaccatccacccagcagcaccttaagaaggtgtacgccagctttgctctgtgtatgtttgtggccgccgccggggcctatgtccatatggtcacgcacttcatccaagctggattgctgagtgctctgggcagcttgatcctcatgatctggctcatggctacaccacacagccatgagaccgagcaaaaacgattaggattgttggccggcttcgctttcctgacaggttag

SEQ ID NO: 136323 - DNA, 327 bp, Artificial Sequence
  derived and/or modified sequence
atgaacatttttgaccggaagatcaatttcgacgccctacttaaatttagccatatcaccccatccacccagcaacatcttaagaaagtgtatgccagtttcgccttgtgcatgtttgtcgctgccgctggggcatacgtccatatggtcactcatttcattcaggcggggctgctgtcagctctcggaagcctaattttaatgatatggctcatggccacgccccattctcatgaaacagaacaaaagaggctgggcctgctcgccgggtttgctttcctcacgggagtgggccttggtcccgcactcgagttttgcatcgcctag

SEQ ID NO: 136324 - DNA, 438 bp, Artificial Sequence
  derived and/or modified sequence
atgaatatttttgaccgcaagataaacttcgatgccttacttaagttctctcatatcacacccagcacacagcagcacctgaagaaggtctacgccagtttcgccctgtgcatgtttgtggccgcagcgggagcctacgtgcatatggtcacgcatttcatacaggccgggcttctttctgccctggggtcactgattctaatgatctggctcatggcaaccccccattctcacgagacagagcagaagaggctgggattgctagcagggtttgcctttctgactggggtggggctggggcctgctctcgagttttgcattgcagttaaccccagtattctgcctacagctttcatgggtacagctatgatcttcacttgctttaccctgtctgcgttgtatgcacggcgtcggagctacttatttctgggtggctag

SEQ ID NO: 136325 - DNA, 135 bp, Artificial Sequence
  derived and/or modified sequence
atgaatatattcgatcgtaagattaattttgacgccctgctgaaattcagccatattactccttcaacccagcagcatttgaaaaaagtgtatgcatccttcgccctttgtatgtttgtagccgccgctgggtag

SEQ ID NO: 136326 - DNA, 126 bp, Artificial Sequence
  derived and/or modified sequence
atgaacatttttgaccgcaagatcaattttgacgccctcttgaagttttctcacattactcccagcactcaacagcacctgaaaaaggtttacgcgagttttgccctgtgtatgttcgtggcctag

SEQ ID NO: 136327 - DNA, 618 bp, Artificial Sequence
  derived and/or modified sequence
atgaacatttttgaccggaaaatcaattttgatgcactcctgaaattcagccatatcacacctagtacacagcagcacctaaagaaagtttatgcatctttcgctctgtgcatgttcgtcgcagcagccggcgcttacgttcatatggtaactcattttatccaagcagggctgcttagcgccctgggaagcctgatcctgatgatttggctgatggcgactccccactcccacgagaccgagcaaaaaaggctgggcctgttggccgggttcgcttttctgacaggagtaggcttaggacccgctctggagttttgtattgccgtcaatccaagcatcctaccaaccgccttcatggggactgccatgattttcacgtgttttacgctgtctgccctctacgctcgaaggcggtcctacctgttcttgggaggtattctgatgagtgcactgtccctgctgctgcttagcagcctcggcaacgtgttttttggttccatctggctgttccaagccaatctttatgttggcctggttgttatgtgcggattcgtgttgttcgatacccaactcatcattgaaaaggccgagcatggagatcaggattatatttggtag

SEQ ID NO: 136328 - DNA, 714 bp, Artificial Sequence
  derived and/or modified sequence
atgaacatctttgacaggaagatcaactttgatgccctgctgaagttcagccacatcacccccagcacccagcagcacctgaagaaggtgtatgccagctttgccctgtgcatgtttgtggccgctgctggggcctacgtgcacatggtgacccacttcatccaggccggcctgctgagcgccctgggcagcctcatcctgatgatctggctgatggccaccccccacagccatgaaacagagcagaagaggctgggcctgctggccggctttgccttcctgactggagtgggcctgggccctgccctggagttctgcatcgctgtgaaccccagcatcctgcccacagccttcatgggcacagccatgatcttcacctgcttcaccctgagcgccctgtatgccaggagaagaagctacctgttcctgggcggcatcctgatgtctgccctgagcctgctgctgctgagcagcctgggcaatgtgttcttcggcagcatctggctgttccaggccaacctgtatgtgggcctggtggtgatgtgtggctttgtgctgtttgacacccagctgatcatcgagaaggccgagcacggggaccaggactacatctggcactgcatcgacctcttcctggacttcatcaccgtcttcaggaagctgatgatgatcctggccatgaatgagaaggacaagaagaaggagaagaagtag

SEQ ID NO: 136329 - DNA, 381 bp, Artificial Sequence
  derived and/or modified sequence
atgaacatctttgacaggaagatcaactttgatgccctgctgaagttcagccacatcacccccagcacccagcagcacctgaagaaggtgtatgccagctttgccctgtgcatgtttgtggccgctgctggggcctacgtgcacatggtgacccacttcatccaggccggcctgctgagcgccctgggcagcctcatcctgatgatctggctgatggccaccccccacagccatgaaacagagcagaagaggctgggcctgctggccggctttgccttcctgactggagtgggcctgggccctgccctggagttctgcatcgctgtgaaccccagcatcctgcccacagccttcatgggcacagccctgatcagcagctag

SEQ ID NO: 136330 - DNA, 438 bp, Artificial Sequence
  derived and/or modified sequence
atgaacatctttgacaggaagatcaactttgatgccctgctgaagttcagccacatcacccccagcacccagcagcacctgaagaaggtgtatgccagctttgccctgtgcatgtttgtggccgctgctggggcctacgtgcacatggtgacccacttcatccaggccggcctgctgagcgccctgggcagcctcatcctgatgatctggctgatggccaccccccacagccatgaaacagagcagaagaggctgggcctgctggccggctttgccttcctgactggagtgggcctgggccctgccctggagttctgcatcgctgtgaaccccagcatcctgcccacagccttcatgggcacagccatgatcttcacctgcttcaccctgagcgccctgtatgccaggagaagaagctacctgttcctgggcggctag

SEQ ID NO: 136331 - DNA, 291 bp, Artificial Sequence
  derived and/or modified sequence
atgaacatctttgacaggaagatcaactttgatgccctgctgaagttcagccacatcacccccagcacccagcagcacctgaagaaggtgtatgccagctttgccctgtgcatgtttgtggccgctgctggggcctacgtgcacatggtgacccacttcatccaggccggcctgctgagcgccctgggcagcctcatcctgatgatctggctgatggccaccccccacagccatgaaacagagcagaagaggctgggcctgctggccggctttgccttcctgactggatag

SEQ ID NO: 136332 - DNA, 417 bp, Artificial Sequence
  derived and/or modified sequence
atgaacatctttgacaggaagatcaactttgatgccctgctgaagttcagccacatcacccccagcacccagcagcacctgaagaaggtgtatgccagctttgccctgtgcatgtttgtggccgctgctggggcctacgtgcacatggtgacccacttcatccaggccggcctgctgagcgccctgggcagcctcatcctgatgatctggctgatggccaccccccacagccatgaaacagagcagaagaggctgggcctgctggccggctttgccttcctgactggagtgggcctgggccctgccctggagttctgcatcgctgtgaaccccagcatcctgcccacagccttcatgggcacagccatgatcttcacctgcttcaccctgagcgccctgtatgccaggagaagatag

SEQ ID NO: 136333 - DNA, 393 bp, Artificial Sequence
  derived and/or modified sequence
atgaacatctttgacaggaagatcaactttgatgccctgctgaagttcagccacatcacccccagcacccagcagcacctgaagaaggtgtatgccagctttgccctgtgcatgtttgtggccgctgctggggcctacgtgcacatggtgacccacttcatccaggccggcctgctgagcgccctgggcagcctcatcctgatgatctggctgatggccaccccccacagccatgaaacagagcagaagaggctgggcctgctggccggctttgccttcctgactggagtgggcctgggccctgccctggagttctgcatcgctgtgaaccccagcatcctgcccacagccttcatgggcacagccatgatcttcacctgcttcaccctgtag

SEQ ID NO: 136334 - DNA, 270 bp, Artificial Sequence
  derived and/or modified sequence
atgaacatctttgacaggaagatcaactttgatgccctgctgaagttcagccacatcacccccagcacccagcagcacctgaagaaggtgtatgccagctttgccctgtgcatgtttgtggccgctgctggggcctacgtgcacatggtgacccacttcatccaggccggcctgctgagcgccctgggcagcctcatcctgatgatctggctgatggccaccccccacagccatgaaacagagcagaagaggctgggcctgctggcctag

SEQ ID NO: 136335 - DNA, 327 bp, Artificial Sequence
  derived and/or modified sequence
atgaacatctttgacaggaagatcaactttgatgccctgctgaagttcagccacatcacccccagcacccagcagcacctgaagaaggtgtatgccagctttgccctgtgcatgtttgtggccgctgctggggcctacgtgcacatggtgacccacttcatccaggccggcctgctgagcgccctgggcagcctcatcctgatgatctggctgatggccaccccccacagccatgaaacagagcagaagaggctgggcctgctggccggctttgccttcctgactggagtgggcctgggccctgccctggagttctgcatcgcctag

SEQ ID NO: 136336 - DNA, 135 bp, Artificial Sequence
  derived and/or modified sequence
atgaacatctttgacaggaagatcaactttgatgccctgctgaagttcagccacatcacccccagcacccagcagcacctgaagaaggtgtatgccagctttgccctgtgcatgtttgtggccgctgctggatag

SEQ ID NO: 136337 - DNA, 126 bp, Artificial Sequence
  derived and/or modified sequence
atgaacatctttgacaggaagatcaactttgatgccctgctgaagttcagccacatcacccccagcacccagcagcacctgaagaaggtgtatgccagctttgccctgtgcatgtttgtggcctag

SEQ ID NO: 136338 - DNA, 618 bp, Artificial Sequence
  derived and/or modified sequence
atgaacatctttgacaggaagatcaactttgatgccctgctgaagttcagccacatcacccccagcacccagcagcacctgaagaaggtgtatgccagctttgccctgtgcatgtttgtggccgctgctggggcctacgtgcacatggtgacccacttcatccaggccggcctgctgagcgccctgggcagcctcatcctgatgatctggctgatggccaccccccacagccatgaaacagagcagaagaggctgggcctgctggccggctttgccttcctgactggagtgggcctgggccctgccctggagttctgcatcgctgtgaaccccagcatcctgcccacagccttcatgggcacagccatgatcttcacctgcttcaccctgagcgccctgtatgccaggagaagaagctacctgttcctgggcggcatcctgatgtctgccctgagcctgctgctgctgagcagcctgggcaatgtgttcttcggcagcatctggctgttccaggccaacctgtatgtgggcctggtggtgatgtgtggctttgtgctgtttgacacccagctgatcatcgagaaggccgagcacggggaccaggactacatctggtag

SEQ ID NO: 136339 - DNA, 714 bp, Artificial Sequence
  derived and/or modified sequence
atgaacatcttcgaccggaagatcaacttcgacgccctgctgaagttttcacacataacgcccagtacgcagcaacacctgaagaaggtgtatgcctccttcgccctttgcatgtttgtggcggctgcaggagcctacgtacacatggttactcactttattcaggcgggtttgctctctgctttgggcagcctcatattgatgatatggcttatggcgaccccccactctcatgagacagagcaaaaaagacttggacttctcgccggatttgccttcctgactggtgttgggttgggacccgctctggagttctgcattgctgtcaatccatcgattcttcccaccgcctttatggggaccgccatgattttcacgtgttttaccttgtctgccttgtacgcaagaagaagatcctacctttttctggggggcatcctgatgagcgctctttctcttctcttgctgagcagtctgggaaacgtcttttttgggagcatttggctgttccaggcaaacctctacgtgggtctggtagttatgtgcggctttgtcttattcgacactcaactgatcatagagaaggcggagcacggggatcaagattacatatggcactgcatcgacctatttctcgacttcatcaccgtgttccgcaaattgatgatgatactggcaatgaacgagaaggataagaaaaaggagaagaaatag

SEQ ID NO: 136340 - DNA, 714 bp, Artificial Sequence
  derived and/or modified sequence
atgaacatcttcgaccggaagatcaacttcgacgccctgctgaagtttagccatattacacccagcacccaacagcacctgaaaaaagtgtacgcgagctttgctctgtgtatgtttgtggcagcagccggcgcctacgtccacatggtgacgcactttatccaggcaggcctgcttagcgcactgggaagcctcatcctcatgatttggttgatggcgacacctcatagccacgagactgagcagaagcgattaggtttactggcaggctttgccttcctcacgggagtcggtcttgggcccgcattggagttttgtattgccgttaaccccagtatcctcccaacagccttcatgggcactgcgatgatctttacttgttttacactatctgccctatatgctcgccggagatcatacctatttctcggtgggatactgatgagcgcgctcagcctgctgctgttatcctcactgggaaacgtgttctttggctccatctggctcttccaggcaaacctgtacgtgggcctggtggtcatgtgtggatttgtactcttcgacacacagttgatcatcgagaaggcggaacacggtgaccaggactacatttggcactgcatagacctgttccttgacttcatcacggttttcagaaaactcatgatgatcctggcaatgaatgagaaagacaaaaaaaaggaaaagaaatag

SEQ ID NO: 136341 - DNA, 381 bp, Artificial Sequence
  derived and/or modified sequence
atgaacatcttcgaccggaagatcaacttcgacgccctgctgaagttttcccatattactcccagtactcagcagcaccttaagaaagtgtacgcgtcatttgccttatgcatgttcgtcgcggcagcgggtgcttatgttcatatggtcacccacttcattcaggcgggactgctctcagccctcggttccctaatcctgatgatttggttgatggccacgccacacagtcacgaaaccgagcaaaagcggcttggtttactagcaggttttgcatttctgactggcgttggactgggacctgctctcgagttttgcatagctgtaaacccgtctatcttgccaactgcctttatgggaactgctcttatctctagctag

SEQ ID NO: 136342 - DNA, 714 bp, Artificial Sequence
  derived and/or modified sequence
atgaacatcttcgaccggaagatcaacttcgacgccctgctgaagttcagtcatattacccctagtacccagcagcacctcaaaaaggtgtatgccagcttcgcgctgtgtatgttcgtagcagctgccggggcttacgttcatatggtgacgcacttcattcaggctggtctcctttccgctctgggatcacttatcctgatgatctggttgatggctaccccacattcccacgagaccgagcagaagaggctggggctcttggcagggtttgcattcctcacgggcgtgggattaggacctgccctggagttctgcatagcagtcaaccctagcatcttgcctaccgcctttatgggcacagccatgatctttacttgctttacattgtcagctctgtacgcccgccgcaggtcttacctgttcttagggggcatcctgatgtctgcgctgtcactcctgcttctctctagtctgggaaatgtgttttttgggtcaatctggttatttcaagcaaatttgtatgttgggctcgtcgtcatgtgcggtttcgtgctttttgacacccagctgatcatcgagaaagccgaacacggagaccaggactacatatggcattgtatagacctgttcctcgacttcatcaccgtgttcaggaaattgatgatgatcctggccatgaacgagaaggacaagaaaaaggagaaaaaatag

SEQ ID NO: 136343 - DNA, 438 bp, Artificial Sequence
  derived and/or modified sequence
atgaacatcttcgaccggaagatcaacttcgacgccctgctgaagttctcccacattactccatctacccagcagcatctgaaaaaggtatatgcttcatttgcactgtgtatgttcgtcgctgccgcaggtgcatatgtgcacatggtgacccactttatccaggcgggcctgctaagcgctcttgggtcccttattctgatgatatggcttatggcaactcctcactctcacgagaccgaacaaaaaaggctcggtctgctggccgggtttgccttccttacaggtgtaggcctaggaccagccctcgagttttgtattgccgtaaacccgagtatcctgcctactgcatttatgggcaccgccatgatcttcacgtgttttactctgtctgccctgtatgcacgcagacgaagctatctttttctgggagggtag

SEQ ID NO: 136344 - DNA, 291 bp, Artificial Sequence
  derived and/or modified sequence
atgaacatcttcgaccggaagatcaacttcgacgccctgctgaagttcagtcacattactccaagcacccagcagcatctcaagaaggtgtatgcaagttttgcgctgtgcatgttcgtggcagcagctggggcatacgtgcacatggtgacccacttcatacaagcgggcctgctgtccgccttaggatccctgattcttatgatatggttgatggcgaccccgcattcacacgagaccgagcagaaaaggctggggctcctggcaggattcgctttcctcaccgggtag

SEQ ID NO: 136345 - DNA, 291 bp, Artificial Sequence
  derived and/or modified sequence
atgaacatcttcgaccggaagatcaacttcgacgccctgctgaagttctcccatatcacaccatccacgcagcagcatctgaaaaaggtttacgcctccttcgcactgtgcatgtttgtggccgctgctggagcctatgtgcacatggtgacccactttatccaggctggtctgctttctgctctgggctccttaattttgatgatatggcttatggcaactccccacagccatgagaccgaacagaaaaggttaggacttctggcggggtttgcatttctgaccggctag

SEQ ID NO: 136346 - DNA, 417 bp, Artificial Sequence
  derived and/or modified sequence
atgaacatcttcgaccggaagatcaacttcgacgccctgctgaagttttcccacatcacaccaagtacccagcagcacctcaagaaagtgtacgccagcttcgctctttgtatgttcgtggcggccgcgggcgcttatgtacacatggttacacacttcatccaagcagggcttctctcagcactgggttcactcatccttatgatttggctgatggccaccccccattcacatgagacagagcagaaaagactgggattgttagcggggtttgcgtttctcaccggggttggattgggccctgccctcgaattctgcatcgctgtgaatccatctatcctcccgactgcttttatggggaccgccatgatatttacctgctttactctgagcgctttatacgctcggcgccgatag

SEQ ID NO: 136347 - DNA, 393 bp, Artificial Sequence
  derived and/or modified sequence
atgaacatcttcgaccggaagatcaacttcgacgccctgctgaagttctcgcacattacccctagcactcaacagcatctcaaaaaagtgtatgctagttttgctctttgcatgtttgtggctgctgcaggcgcatacgtgcacatggtgacacattttatccaggctggcctcctgagcgcgctgggatccttaattctaatgatctggttaatggctactcctcactctcacgaaacagaacagaagcggctggggcttttagccgggtttgccttcctgacaggggtgggtctgggcccagcactggagttctgcatcgctgtgaaccccagcatcctgccaacagcttttatgggcactgctatgatctttacctgcttcacactgtag

SEQ ID NO: 136348 - DNA, 270 bp, Artificial Sequence
  derived and/or modified sequence
atgaacatcttcgaccggaagatcaacttcgacgccctgctgaagtttagccatatcactccgagcacccaacagcacctcaaaaaggtatacgcttccttcgctctgtgtatgtttgttgctgccgcaggcgcctatgtacacatggtcactcactttatacaagcagggctgttgtccgccttgggatctctcatcctcatgatttggctcatggcaacgccacattcgcatgagacggaacagaagcgactggggctgctggcatag

SEQ ID NO: 136349 - DNA, 714 bp, Artificial Sequence
  derived and/or modified sequence
atgaacatcttcgaccggaagatcaacttcgacgccctgctgaagtttagtcacatcacgccatccacccaacagcacctgaaaaaagtctatgcttctttcgccctgtgtatgttcgtagctgccgccggtgcctacgtacacatggtgacccactttatacaggcgggactgttaagcgcattgggctcactgatcttaatgatctggctgatggctaccccccacagccacgaaacagaacaaaagcgactgggattgctggcagggttcgcattcctgaccggtgtggggttgggacccgctctggaattttgcattgccgtgaacccatctatcttaccgaccgctttcatggggactgctatgatctttacctgttttactctctctgcactctacgcccggagacggtcttacctcttccttggagggatactgatgtcagccctctcattgctgctcctcagcagtcttggaaacgtgttctttggaagcatttggttgttccaggcgaatttgtacgtgggacttgttgtgatgtgcgggtttgtgctgtttgatactcagcttattatagaaaaagcagagcacggcgatcaggattacatatggcactgcattgacctgttcctagattttatcaccgtcttccgaaagctgatgatgattttagctatgaacgaaaaagataaaaagaaagagaaaaaatag

SEQ ID NO: 136350 - DNA, 291 bp, Artificial Sequence
  derived and/or modified sequence
atgaacatcttcgaccggaagatcaacttcgacgccctgctgaagttctcacacatcaccccatccactcagcagcacctgaagaaggtgtatgcctcgttcgctctatgtatgttcgtggctgcggccggggcgtacgttcacatggtcacacacttcatccaggccggccttctcagcgcattaggcagtctcatcttaatgatctggctcatggctaccccacactcccatgaaacagagcagaaaagacttgggcttctggccgggttcgccttcctcacagggtag

SEQ ID NO: 136351 - DNA, 327 bp, Artificial Sequence
  derived and/or modified sequence
atgaacatcttcgaccggaagatcaacttcgacgccctgctgaagttctcacacattactcctagcacacagcagcatctaaaaaaagtctatgcttccttcgcactgtgcatgttcgtcgctgctgcaggcgcctacgtgcatatggttacacactttatccaggccggcttacttagtgcgctgggatccctcatcctgatgatttggctgatggccacaccgcacagccacgagacagaacaaaagcggcttggactgctggcaggattcgcttttctaaccggcgtggggctcggtcccgcccttgaattctgtatcgcgtag

SEQ ID NO: 136352 - DNA, 438 bp, Artificial Sequence
  derived and/or modified sequence
atgaacatcttcgaccggaagatcaacttcgacgccctgctgaagttcagccacattaccccgtctacccaacagcaccttaaaaaagtgtatgcctccttcgctttgtgtatgttcgtggccgccgccggcgcttatgtacacatggtcacgcactttatccaggccgggctgttgtcagctttgggttcgctgattttgatgatatggctgatggccaccccacacagtcacgaaacagagcaaaagagactcggacttcttgctggctttgcattcctaacaggtgtgggactaggccccgccttagagttctgtattgctgtaaacccaagcatcctgccgacagcctttatgggaacagccatgatctttacctgttttactctgagcgctctgtatgcccggaggcggagttacctgtttttgggcgggtag

SEQ ID NO: 136353 - DNA, 135 bp, Artificial Sequence
  derived and/or modified sequence
atgaacatcttcgaccggaagatcaacttcgacgccctgctgaagttttctcatatcacaccatccacccagcaacacctgaaaaaagtgtatgccagttttgccttgtgcatgttcgttgcagctgcaggatag

SEQ ID NO: 136354 - DNA, 126 bp, Artificial Sequence
  derived and/or modified sequence
atgaacatcttcgaccggaagatcaacttcgacgccctgctgaagttttcccatatcaccccgtcgactcagcaacacttgaaaaaggtttacgcaagcttcgccctctgtatgttcgtggcttag

SEQ ID NO: 136355 - DNA, 618 bp, Artificial Sequence
  derived and/or modified sequence
atgaacatcttcgaccggaagatcaacttcgacgccctgctgaagttcagccacatcaccccatctacgcagcagcacctgaaaaaggtctacgcatcctttgctctctgtatgttcgtcgccgctgccggcgcctacgttcacatggtgacccatttcatacaagcaggcctgctgagcgccctcgggtcactgattctcatgatctggcttatggcaaccccgcactcacacgaaaccgagcaaaagagactggggttgctggctggattcgcatttttgacgggcgtaggactgggccctgccttggaattttgtattgcggtgaatccttctattttgcccaccgcttttatgggcaccgctatgatcttcacatgttttacactatccgctctttatgctcgtcggcgcagttatctgtttttggggggaattcttatgtcagccctgagtctgttgctgctctcttcccttgggaacgtttttttcgggtccatctggctcttccaggcaaatctatatgtcggcttggtcgtcatgtgcggcttcgtgttgtttgatacacaactgataatcgaaaaggctgaacacggggatcaggattacatttggtag

SEQ ID NO: 136356 - DNA, 714 bp, Artificial Sequence
  derived and/or modified sequence
atgaatatttttgatcggaaaattaactttgatgcccttcttaagttttcgcatatcactccctctactcaacaacacctcaaaaaggtatatgccagcttcgccctgtgcatgttcgttgccgctgcgggagcttatgtgcatatggtcacgcactttatccaggccggattattaagtgccctgggatcactgattttaatgatctggttaatggccactccccattctcatgaaaccgagcagaaacgtctgggcctccttgctgggttcgcttttcttactggggtcggccttggcccagccctggagttttgtatcgccgtcaacccatccatcctgcctacagcatttatggggaccgcaatgattttcacctgcttcacactgtccgccttatacgcgcgaagaaggtcctatctatttttgggaggcattttgatgtctgcactcagcttgctgcttctcagctctctaggcaatgtgttcttcggctccatttggctattccaagccaatttatacgtcggactggtagttatgtgtggatttgttctcttcgatacccaactgattatcgagaaagcggagcatggagaccaggactatatctggcattgtattgatttgtttctggacttcatcactgtatttcgcaaacttatgatgatcttggccatgaacgaaaaagataagaagaaggagaaaaagtag

SEQ ID NO: 136357 - DNA, 714 bp, Artificial Sequence
  derived and/or modified sequence
atgaacattttcgaccgcaagatcaatttcgatgcattattgaagttctcccacatcacccctagcacacagcaacatctgaagaaggtgtacgccagctttgccctttgtatgtttgtggctgccgctggtgcctacgttcacatggtgactcacttcatccaagcagggctcctgagcgccctgggatcccttattctaatgatctggctaatggctaccccacactctcacgaaacggagcagaagcgtcttgggctactggccggttttgctttcttgacaggagtcggcctcgggccagcgctggagttctgtatagccgtgaatccttccattctcccaaccgcctttatgggcacagccatgatctttacctgctttactctttcagcactttatgccaggcgacgatcctacctgtttctcggagggatcttaatgtcagcactgtcattactgctgttatcatccctcggcaatgttttttttgggtccatttggctcttccaggctaatctctacgtgggcctggtggtcatgtgcggattcgtcttgttcgacactcaactcattatcgaaaaggctgaacacggggaccaagactatatttggcactgtatagacttgttcctagactttattacggtgtttcggaaactgatgatgatcctcgctatgaatgagaaggacaaaaaaaaagaaaaaaagtag

SEQ ID NO: 136358 - DNA, 381 bp, Artificial Sequence
  derived and/or modified sequence
atgaatatttttgataggaaaatcaatttcgatgctctgttgaagttctcccatatcaccccgagcacgcaacaacacttgaagaaagtgtacgcgtcatttgctctttgtatgtttgtggcagctgccggagcctacgttcatatggtcacccacttcattcaggctggattgctgagtgccctaggctccctgatacttatgatttggctcatggcaaccccccattctcatgaaacggagcaaaagcgattggggcttctggccggatttgcgttcctgacaggcgtgggactgggacctgccctagagttctgtatcgcagtcaacccctcgatcttacccacagcctttatgggaaccgcgctcattagcagctag

SEQ ID NO: 136359 - DNA, 714 bp, Artificial Sequence
  derived and/or modified sequence
atgaatattttcgatcgcaagatcaactttgatgccctcttaaaattctcgcacatcactccaagcacacaacaacacctcaaaaaagtgtacgccagcttcgcactgtgtatgtttgttgccgcagccggtgcctacgttcatatggttactcatttcattcaagcaggactgttgtccgccttgggcagcctgattcttatgatctggcttatggctactcctcactctcacgaaacagaacaaaaacgcttaggcctgctcgccggatttgcgtttctaacaggggtggggctggggccagcacttgaattttgcatcgcggtgaacccaagcatccttcccacagcctttatgggaactgccatgattttcacatgttttacactcagcgccttgtacgctaggaggaggtcatacctgttcttgggaggcatcctcatgtcagctctctcactactgctgttgagctcactgggcaacgtctttttcgggagtatctggctcttccaggcaaacctgtatgtgggcctcgtagtgatgtgcggtttcgtactgtttgacacacagcttataatcgagaaggcggagcatggagaccaggactatatctggcattgcatcgatctgttcctggactttatcaccgtatttcggaaattgatgatgatcctggcgatgaacgagaaagacaaaaagaaagagaagaaatag

SEQ ID NO: 136360 - DNA, 438 bp, Artificial Sequence
  derived and/or modified sequence
atgaacattttcgacagaaaaattaattttgatgccctgcttaagttctctcacatcaccccatcaactcaacagcacttaaagaaggtgtacgccagctttgccctgtgcatgtttgttgccgcagccggtgcctacgtgcatatggtgactcatttcatccaggcgggtctcctgagcgctctgggcagtttgatattgatgatctggctaatggctacacctcacagccacgagactgagcagaaacgcctgggcctgctggctgggtttgctttcctgacaggcgtggggttgggaccagccctggaattctgtatcgcggtgaacccctcaattcttcctaccgcgttcatgggaacagctatgatttttacctgttttaccctgtcagccctttatgccaggcggcgaagctatctttttttagggggttag

SEQ ID NO: 136361 - DNA, 291 bp, Artificial Sequence
  derived and/or modified sequence
atgaacatatttgaccgaaagatcaatttcgacgctctgctgaagttttcacacataaccccatcaacccaacaacacctcaagaaggtatacgcctccttcgcactgtgcatgtttgtcgccgcagcaggcgcttacgttcatatggtaacccatttcatccaagccggactgctgtctgccctgggctcacttattttaatgatttggctgatggcgacccctcattcccacgagacagaacaaaagcgcctgggccttctcgccggatttgctttccttacgggctag

SEQ ID NO: 136362 - DNA, 291 bp, Artificial Sequence
  derived and/or modified sequence
atgaatatatttgacaggaagatcaacttcgacgctctgttgaaattcagccacattacccctagcacacaacagcatctaaaaaaagtgtacgcgagcttcgctctttgcatgttcgtcgccgcagccggagcctacgtacacatggtgacgcactttatccaggccggacttctgtccgccttaggatccctaatcttgatgatatggctgatggctactccacactcccatgagacggaacagaaacgtttaggactactagcaggattcgctttcttgacggggtag

SEQ ID NO: 136363 - DNA, 417 bp, Artificial Sequence
  derived and/or modified sequence
atgaacatctttgaccgcaaaattaactttgatgcgctcctaaaattttcccacattaccccgtcaacacaacagcatctgaagaaagtgtacgcttcgttcgccctgtgcatgtttgtcgctgctgccggagcttacgtccacatggtcacccacttcatccaggccggactgctgtctgctctgggttcactgatactgatgatctggttgatggcaacgccacactcacatgaaaccgaacagaagcgcttagggctcctggctggcttcgcctttctcactggggtagggctagggccagccttggaattttgcatagcggtgaacccctcgatcctgcccacggcttttatgggcaccgccatgattttcacttgttttactctcagcgccctttacgcgaggcgccgatag

SEQ ID NO: 136364 - DNA, 393 bp, Artificial Sequence
  derived and/or modified sequence
atgaatatatttgataggaagatcaatttcgatgcccttctaaagttttcacacataacaccttccacgcagcagcatttaaaaaaggtgtatgccagcttcgctctgtgcatgttcgttgctgccgctggggcatacgtccatatggtcactcatttcattcaggctggacttctgtccgccctgggaagccttatccttatgatctggttaatggccaccccacactcacatgaaaccgaacagaagcgcctggggcttttagcagggtttgcatttttgaccggggttggacttgggcctgcgctggagttttgtatcgccgtgaaccccagcattcttccaaccgccttcatgggcaccgccatgatttttacatgctttacgttgtag

SEQ ID NO: 136365 - DNA, 270 bp, Artificial Sequence
  derived and/or modified sequence
atgaacatttttgataggaaaatcaatttcgacgctctccttaaattctcccatattactcctagtactcaacagcacctgaagaaagtctacgcttctttcgcactctgcatgtttgtggccgctgccggtgcctatgtgcacatggtaactcatttcatccaggccggacttctgtctgcccttggtagtttgattctgatgatatggctcatggccaccccacatagccatgaaaccgaacagaagcgcctggggttgctcgcatag

SEQ ID NO: 136366 - DNA, 714 bp, Artificial Sequence
  derived and/or modified sequence
atgaatatcttcgaccggaagattaacttcgatgcgctcctgaaattctcacatatcacaccttccacacagcagcatctgaagaaggtatacgcttccttcgccctctgcatgttcgtggctgccgctggtgcatacgttcatatggtgactcacttcattcaagccggactgctgagcgcattgggcagcctgatcctgatgatatggctgatggccacccctcattcacacgagacagaacaaaaacgtctagggcttctcgccggttttgctttcctgactggggtcggactgggtccagcattagaattttgtatcgcggtcaacccatcaattctgccgaccgccttcatgggtaccgcaatgattttcacctgctttacactctcagccctgtacgcaagacggaggtcctacttgttcctcggcggtattctcatgtctgcgcttagccttctgttgctctcaagcttgggtaacgttttctttggatctatctggctatttcaggccaacctgtatgtcggactcgtggtgatgtgtggattcgtgctgttcgacactcagctgatcattgagaaggctgagcatggagatcaggattacatctggcattgcattgacctgttccttgactttattaccgtctttcggaagttgatgatgatccttgcaatgaatgaaaaggataagaagaaggaaaaaaagtag

SEQ ID NO: 136367 - DNA, 291 bp, Artificial Sequence
  derived and/or modified sequence
atgaacattttcgaccggaagattaactttgacgcacttctcaagttctcccacataactcccagcacacagcagcacttaaagaaagtctacgcaagctttgcactatgtatgtttgttgccgctgcaggcgcttacgttcatatggtcacgcacttcatccaagctgggttgctatcagcccttggatcccttattctgatgatctggttgatggccacaccacactcccacgaaactgaacagaagaggctcggactgttggctggtttcgcctttctgacaggctag

SEQ ID NO: 136368 - DNA, 327 bp, Artificial Sequence
  derived and/or modified sequence
atgaacatcttcgaccgtaagatcaactttgacgcgttactgaagttttcacacatcactccctcaacccagcaacatctcaagaaggtgtatgcctcctttgctctgtgcatgttcgtggctgctgctggcgcttacgtgcacatggtaacgcactttattcaagccggtctcttaagcgccttggggagtttaattctgatgatttggctgatggccactcctcactcacatgaaaccgaacagaaaagactggggcttctcgccggattcgcttttctgacgggagtgggtctcggacccgctctcgaattctgtatcgcttag

SEQ ID NO: 136369 - DNA, 438 bp, Artificial Sequence
  derived and/or modified sequence
atgaacatctttgaccggaagattaactttgatgccttgctgaagttttcccatatcacaccttctacccagcagcacctgaaaaaagtttacgcttcctttgctctatgcatgttcgtggccgctgcaggagcctacgtccatatggtgacccactttatccaggcaggcttactaagcgccttgggatcactgatcttgatgatttggctgatggcaacaccacattctcatgagactgagcagaagaggttaggtttgctggctggatttgcctttcttacaggtgtggggctcgggcctgccttagagttctgtatcgccgtcaatccaagcatccttcccacagccttcatgggtacggccatgatctttacctgctttacactatctgccctgtacgcacgcaggcgctcttaccttttccttgggggttag

SEQ ID NO: 136370 - DNA, 135 bp, Artificial Sequence
  derived and/or modified sequence
atgaatatcttcgatcgcaaaatcaattttgacgctttattgaaatttagccacataacaccaagtactcagcagcacctgaaaaaagtgtatgcctccttcgccctctgcatgttcgtagctgccgctggatag

SEQ ID NO: 136371 - DNA, 126 bp, Artificial Sequence
  derived and/or modified sequence
atgaacatattcgatcggaaaataaacttcgacgctctgcttaaattttcacacattacaccatctacgcagcagcatttaaagaaagtgtacgccagctttgctctctgcatgtttgtagcttag

SEQ ID NO: 136372 - DNA, 618 bp, Artificial Sequence
  derived and/or modified sequence
atgaatatattcgatagaaaaattaactttgacgcattgctgaagttctctcacattacgccctctacccagcagcacctgaagaaagtttacgctagcttcgcgttgtgcatgttcgtggccgctgcgggagcttacgtccatatggtcacacacttcatacaggccggactgctctccgccctagggtctctgattttaatgatatggcttatggctacaccccacagtcacgaaacagagcagaaaaggttgggactgctcgcgggattcgctttcttgacaggagtgggactcggacctgctctagagttttgcatcgccgtaaacccctctatactacctacagctttcatggggaccgcaatgatttttacatgtttcacccttagtgcattgtatgccagacgacgatcctacttatttttgggaggcattctgatgtccgccttgtcattactgctcctctcctcgctggggaatgtgttcttcggcagcatctggttgtttcaggctaacctctacgtgggactggtggtaatgtgtggattcgtgttgtttgacacccagctgatcattgaaaaagcagaacacggggaccaagattacatatggtag

SEQ ID NO: 136373 - protein, 419 aa, Artificial Sequence
  derived and/or modified sequence
MAEDVSSAAPSPRGCADGRDADPTEEQMAETERNDEEQFECQELLECQVQVGAPEEEEEEEEDAGLVAEAEAVAAGWMLDFLCLSLCRAFRDGRSEDFRRTRNSAEAIIHGLSSLTACQLRTIYICQFLTRIAAGKTLDAQFENDERITPLESALMIWGSIEKEHDKLHEEIQNLIKIQAIAVCMENGNFKEAEEVFERIFGDPNSHMPFKSKLLMIISQKDTFHSFFQHFSYNHMMEKIKSYVNYVLSEKSSTFLMKAAAKVVESKRTRTITSQDKPSGNDVEMETEANLDTRKRSHKNLFLSKLQHGTQQQDLNKKERRVGTPQSTKKKKESRRATESRIPVSKSQPVTPEKHRARKRQAWLWEEDKNLRSGVRKYGEGNWSKILLHYKFNNRTSVMLKDRWRTMKKLKLISSDSED

SEQ ID NO: 136374 - DNA, 1260 bp, Artificial Sequence
  derived and/or modified sequence
atggccgaggacgtgagcagcgccgcccccagccccagaggctgcgccgacggcagagacgccgaccccaccgaggagcagatggccgagaccgagagaaacgacgaggagcagttcgagtgccaggagctgctggagtgccaggtgcaggtgggcgcccccgaggaggaggaggaggaggaggaggacgccggcctggtggccgaggccgaggccgtggccgccggctggatgctggacttcctgtgcctgagcctgtgcagagccttcagagacggcagaagcgaggacttcagaagaaccagaaacagcgccgaggccatcatccacggcctgagcagcctgaccgcctgccagctgagaaccatctacatctgccagttcctgaccagaatcgccgccggcaagaccctggacgcccagttcgagaacgacgagagaatcacccccctggagagcgccctgatgatctggggcagcatcgagaaggagcacgacaagctgcacgaggagatccagaacctgatcaagatccaggccatcgccgtgtgcatggagaacggcaacttcaaggaggccgaggaggtgttcgagagaatcttcggcgaccccaacagccacatgcccttcaagagcaagctgctgatgatcatcagccagaaggacaccttccacagcttcttccagcacttcagctacaaccacatgatggagaagatcaagagctacgtgaactacgtgctgagcgagaagagcagcaccttcctgatgaaggccgccgccaaggtggtggagagcaagagaaccagaaccatcaccagccaggacaagcccagcggcaacgacgtggagatggagaccgaggccaacctggacaccagaaagagaagccacaagaacctgttcctgagcaagctgcagcacggcacccagcagcaggacctgaacaagaaggagagaagagtgggcaccccccagagcaccaagaagaagaaggagagcagaagagccaccgagagcagaatccccgtgagcaagagccagcccgtgacccccgagaagcacagagccagaaagagacaggcctggctgtgggaggaggacaagaacctgagaagcggcgtgagaaagtacggcgagggcaactggagcaagatcctgctgcactacaagttcaacaacagaaccagcgtgatgctgaaggacagatggagaaccatgaagaagctgaagctgatcagcagcgacagcgaggactag

SEQ ID NO: 136375 - DNA, 1260 bp, Artificial Sequence
  derived and/or modified sequence
atggctgaggatgtgagttcagctgctccgagcccccgcggttgtgccgatggcagggacgccgaccctaccgaagagcagatggccgaaacagagagaaacgatgaagagcagtttgaatgtcaagaattactggaatgtcaggttcaggtgggagcccctgaggaggaagaagaggaggaggaggatgccgggcttgtagctgaagctgaagccgtggccgccggctggatgttggactttctttgtctgagtttatgtcgcgcgttcagggacggcaggtcagaagactttcgccgaacacgtaacagcgcagaagcaatcatccatgggctgagttctctaaccgcttgccaactccgcacgatttatatttgtcaattcctaaccaggattgcggccggaaagaccctggacgcgcagtttgagaacgatgagcgcattacaccacttgagagcgcgctgatgatttggggcagtattgagaaggagcacgacaaactgcatgaggagatccagaacctgattaagattcaggccatcgctgtgtgtatggagaacggcaattttaaagaggcagaagaagtcttcgagagaatctttggcgaccctaacagtcacatgcccttcaagtctaagctcctcatgatcatcagtcaaaaagacacttttcactcttttttccaacatttctcttacaaccacatgatggagaaaataaagagttacgtgaattacgtgctgtccgagaagtccagcaccttcctgatgaaggccgccgcaaaagtagtggaatcgaaaaggacgcgaacaattacatctcaagataagccaagtggcaatgacgttgaaatggaaaccgaagcgaatctcgatacaaggaagagaagccataagaatctctttctcagcaagctgcagcacggtacacagcagcaggatctgaataaaaaggagaggcgagtgggaaccccacagtcgacgaaaaagaaaaaagagtctcgacgggcaacagagtcccggatcccggtgagcaaatctcaaccggtaactccggaaaagcatcgtgctcggaaacggcaagcgtggctctgggaggaagacaaaaaccttagatccggcgttaggaaatacggggagggaaattggtccaagatcctacttcattataagtttaacaatcggacttctgtgatgctgaaagaccgttggaggaccatgaaaaaattgaaactgatcagctcagattccgaagattag

SEQ ID NO: 136376 - DNA, 1260 bp, Artificial Sequence
  derived and/or modified sequence
atggctgaagatgtgtcctctgctgcccccagcccccggggctgtgctgatggaagagatgctgaccccacagaggagcagatggccgagacagaaagaaatgatgaggagcagtttgagtgccaggagctgctggagtgccaggtgcaggtgggcgcccctgaggaggaggaggaggaggaggaggatgctggcctggtggccgaggccgaggccgtggccgccggctggatgctggacttcctgtgcctgagcctgtgccgggccttcagagatggccgctctgaggacttccggaggaccaggaacagcgctgaggccatcatccacggcctgagcagcctgacagcctgccagctgcggaccatctacatctgccagttcctgaccagaattgctgctgggaagaccctggatgcccagtttgaaaatgatgagcgcatcacccccctggagagcgccctgatgatctggggcagcattgagaaggagcatgacaagctgcacgaggagatccagaacctgatcaagatccaggccatcgctgtgtgcatggagaatggaaacttcaaggaggccgaggaggtgtttgagcgcatctttggagaccccaacagccacatgcccttcaagagcaagctgctgatgatcatcagccagaaggacaccttccacagcttcttccagcacttctcctacaaccacatgatggagaagatcaagagctatgtgaactacgtgctgtctgagaagagcagcaccttcctgatgaaggccgccgccaaggtggtggagagcaagaggaccaggaccatcaccagccaggacaagcccagcggaaatgatgtggagatggagacagaggccaacctggacaccaggaagaggagccacaagaacctcttcctgagcaagctgcagcacggcacccagcagcaggacctgaacaagaaggagcggcgggtgggcaccccccagagcaccaagaagaagaaggagagcagaagagccacagagagccgcatccctgtgtccaagagccagcctgtgaccccagagaagcaccgggccaggaagaggcaggcctggctgtgggaggaggacaagaacctgcggtctggagtgaggaagtacggggagggcaactggagcaagatcctgctgcactacaagttcaacaacagaacatctgtgatgctgaaggaccgctggaggaccatgaagaagctgaagctgatcagcagtgacagcgaggactag

SEQ ID NO: 136377 - DNA, 1260 bp, Artificial Sequence
  derived and/or modified sequence
atggccgaggacgtgagcagcgccgcccccagcccccggggctgcgcagatggtagagatgctgaccccacagaagaacagatggcagaaacagaaaggaatgatgaggagcagtttgaatgccaagagctactggaatgccaggtgcaagtgggcgccccggaagaagaggaagaagaagaagaagatgctgggcttgtggctgaggcagaagccgtggcagctggttggatgcttgattttctgtgcctcagcttatgtagggctttccgcgacggaaggtctgaggacttcagacgaaccaggaacagtgcagaagctattatacacgggctgagttctctcacagcttgccagcttcgcacaatttacatctgccaatttctcactcggattgccgccggcaaaactcttgacgcacagtttgaaaacgatgaacggattactcccctggagagcgccctgatgatctggggatcaattgagaaagaacacgataaattgcacgaagagatccagaatttgatcaagatccaggccatagccgtttgcatggagaatgggaatttcaaagaggctgaagaggtcttcgaaaggatatttggcgaccccaactctcacatgccgtttaaaagcaaactgctcatgatcatcagccagaaggatacctttcactcattctttcagcacttttcatacaaccatatgatggagaagatcaaatcctatgtcaactacgtcctgtcagagaaaagttctaccttcttgatgaaggctgccgccaaagtggttgaatctaaacgcacgagaactatcacatcgcaggataaacccagtggaaacgacgtggaaatggagactgaagccaatctggacaccaggaaacgatctcacaaaaatctctttttgtccaagttgcagcatggaactcaacaacaggacctgaacaagaaggagcgtcgggtcggaacaccgcagagcaccaaaaaaaagaaggaaagtaggcgcgctacagaatctcggatcccggtgtccaaatcacagcctgtcactcctgaaaaacaccgggccagaaagcgccaggcctggttgtgggaagaggacaaaaatctcaggtccggcgtacgcaagtatggtgaaggaaactggtccaaaattttgctccattacaagtttaacaatcgaacctccgtgatgcttaaagaccgatggcgaactatgaaaaagctgaagctgatttccagcgactccgaggactag

SEQ ID NO: 136378 - DNA, 1260 bp, Artificial Sequence
  derived and/or modified sequence
atggccgaagatgtatcatctgccgctccaagcccccgtggttgcgcagacggcagggacgccgatccaactgaagaacagatggcagaaacagagcggaatgatgaggagcagttcgagtgtcaggagctactggagtgtcaggtccaggtcggcgcacccgaagaagaggaggaggaagaggaggacgccggactcgtggcggaagctgaagctgtagctgccggatggatgctggattttttgtgtctctcactttgtagagctttccgggatggtcgctcagaagactttagaagaaccagaaattccgcagaagcgattattcacggcttgtcatcacttacagcttgtcagttgcgtactatttacatctgccaattcctgacgcgcattgccgcaggtaagactttggacgcccagttcgagaacgacgaaaggattaccccgctggagagcgccctgatgatctggggaagcatcgagaaagagcacgataagctccacgaggaaatccagaacctgatcaagatccaggcaatagccgtgtgcatggagaacgggaacttcaaagaggccgaagaagtcttcgaaaggatttttggggaccccaattcccacatgcctttcaaatcgaagttgctgatgatcatttctcagaaggacacttttcacagcttttttcagcacttcagctataaccacatgatggagaaaattaagagctatgttaattacgtgctgtctgaaaaatcttcaacatttttgatgaaggctgcagccaaggtcgtagagagcaaaaggacccggaccattacatcacaagacaaaccctccggcaacgacgtggaaatggaaaccgaagccaatctggacactcggaaaagatcccacaagaacctgttcttatccaaactgcagcacgggacccagcagcaggatctaaacaaaaaagagcggagggtggggacaccacagagtacaaaaaaaaaaaaggagagtaggcgcgcaacagaaagccgtattccggtgagtaagagtcagccggtaacgcctgagaaacaccgggctcgcaagagacaagcctggctgtgggaggaagataagaatctccgctcaggcgtgaggaaatacggggagggcaattggagcaagatccttctgcactacaagttcaacaacagaacgtccgtcatgctgaaggacagatggcgcacaatgaagaagcttaagctgatcagcagcgatagcgaggactag

SEQ ID NO: 136379 - DNA, 3268 bp, Artificial Sequence
  derived and/or modified sequence
agtacccaagcgagccatttaacatggcggaggatgtttcctcagcggccccgagcccgcggggctgtgcggatggtagggatgccgaccctactgaggagcagatggcagaaacagagagaaacgacgaggagcagttcgaatgccaggaactgctcgagtgccaggtgcaggtgggggcccccgaggaggaggaggaggaggaggaggacgcgggcctggtggccgaggccgaggccgtggctgccggctggatgctcgatttcctctgcctctctctttgccgagctttccgcgacggccgctccgaggacttccgcaggacccgcaacagcgcagaggctattattcatggactatccagtctaacagcttgccagttgagaacgatatacatatgtcagtttttgacaagaattgcagcaggaaaaacccttgatgcacagtttgaaaatgatgaacgaattacacccttggaatcagccctgatgatttggggttcaattgaaaaggaacatgacaaacttcatgaagaaatacagaatttaattaaaattcaggctatagctgtttgtatggaaaatggcaactttaaagaagcagaagaagtctttgaaagaatatttggtgatccaaattctcatatgcctttcaaaagcaaattgcttatgataatctctcagaaagatacatttcattccttttttcaacacttcagctacaaccacatgatggagaaaattaagagttatgtgaattatgtgctaagtgaaaaatcatcaacctttctaatgaaggcagcggcaaaagtagtagaaagcaaaaggacaagaacaataacttctcaagataaacctagtggtaatgatgttgaaatggaaactgaagctaatttggatacaagaaaaaggtctcacaagaatcttttcttatctaagttgcaacatggaacccagcaacaagaccttaataagaaagaaagaagagtaggaactcctcaaagtacaaaaaagaaaaaagaaagcagaagagccactgaaagcagaatacctgtttcaaagagtcagccggtaactcctgaaaaacatcgagctagaaaaagacaggcatggctttgggaagaagacaagaatttgagatctggcgtgaggaaatatggagagggaaactggtctaaaatactgttgcattataaattcaacaaccggacaagtgtcatgttaaaagacagatggaggaccatgaagaaactaaaactgatttcctcagacagcgaagactgattgtgtttgtaaaagcttgatgaaaggacagttaagtattttgatcactgcattttgtttgaaacttgtgtcattgatgtaatttaaaacttttgtttaaagcattacagtatttttctgtgaccatcaattaatgagggtttgtgctaccagagttaaagcatatgctatcattgtattctttaagaaccttattttgataaaatgtaaatttgttgaaccctgccacatttagtatccccacccccaaatcctgttccaatgaaaaaattaaaacctgatacgaaaaaaaaaaaattccagttaacctattttgtgtctgtaggctgacctcaaccctgtaacgtaacccattaaaatgaatttctttttttttaagacagagtttctctctgttgcccaggctggagtgcagtggcgcaatttcagctcactgcaacctctgcctcccaggttcaagtgattctcctgcctcagcctcctgagtagctgggattacaggcacacaccaccacgcccagctaatttttgtatttttagtagaggcggggtttcaccatgctggtcaggatgttctccaactcctgacttcatgatccacccacctcggcctcccaaagtgctgagattacagacgtgagccactgcgtcctgcctaaaatgaattttctagatgattgaataacagtagtcctttgatagaagataatgacttggtttatggccttaatatactacttaattacttaagatgtttattaatagaatgataaatgtacagagtaacctataagcatgacatacttttgctttcagtagtttcatgtaaagaaaaaaacttgaaaatagtaatacctgagtacccatgggaataatagacactggggaggtagggtggggagcgggagcaagagctgaaaaacttacctactggggactgtgctcactacctgggtgacaggatcatacgtaccccaaacctcaacatcacacagtatactcagctaacaaacctgcccatgtgtttcctgaatctaaaataaaaatcgaaataatttttttaaaaaagaaaaagacaatagtattacccatgggacaaaatttgtactattagcaagaatcattttgtgtctcatttagaaacaatttgacttttgttccagtgtttaaactttgacaaaaatggttttgaatagatctttataacctgatgccataaatacaagattctctgataccttcatttaatatatcaatattgggcctaaaacagtattctgtaaagcttaaattggtattaactatgatcatcttgatgtctatgatagataataaacaaggtcatacataccttactaaacaattttggtttttcaccaacattttattctttaaaagatttagactaacagaattatttagcatttcgagtcatgtgctttatttagcaagtgagtaaaaatattggaatattgaagtatttgcataaaaaatcaaatggtggtgttttgtaatctctattgtatttcctattaaggtttcatatattactttcccattgttcctgaatttgttatcctatatataaacagaaacatggatgagtaccatatacttcctgactcctttatcttgttacaccacaagatactgcactatttattggagatattttgatgattagtgccaaggctggcatcatgagccaaaatagacttgttaagtcaacctcattccaaacacctgctatagatcatcaaatctaagttgccattaattgtaagatgtcctgttatttcacacacacaactagaaaagaaaaatcggtatcaattatagtatggtgctttcttattttgaattttacttattagaagagctattttagatgtatttaaacataagatttttatcacataacttgtggatacaaaaaaagagaaattgtaagcaaaataagttgggtaatatattcctaaaacctc

SEQ ID NO: 136380 - DNA, 669 bp, Artificial Sequence
  derived and/or modified sequence
atattttctattattcatggactatccagtctaacagcttgccagttgagaacgatatacatatgtcagtttttgacaagaattgcagcaggaaaaacccttgatgcacagtttgaaaatgatgaacgaattacacccttggaatcagccctgatgatttggggttcaattgaaaaggaacatgacaaacttcatgaagaaatacagaatttaattaaaattcaggctatagctgtttgtatggaaaatggcaactttaaagaagcagaagaagtctttgaaagaatatttggtgatccaaattctcatatgcctttcaaaagcaaattgcttatgataatctctcagaaagatacatttcattccttttttcaacacttcagctacaaccacatgatggagaaaattaagagttatgtgaattatgtgctaagtgaaaaatcatcaacctttctaatgaaggcagcggcaaaagtagtagaaagcaaaaggacaagaacaataacttctcaagataaacctagtggtaatgatgttgaaatggaaactgaagctaatttggatacaagaaaaaggtctcacaagaatcttttcttatctaagttgcaacatggaacccagcaacaagaccttaataagaaagaaagaagagtaggaactcctcaaagt

SEQ ID NO: 136381 - protein, 437 aa, Artificial Sequence
  derived and/or modified sequence
MLWKLTDNIKYEDCEDRHDGTSNGTARLPQLGTVGQSPYTSAPPLSHTPNADFQPPYFPPPYQPIYPQSQDPYSHVNDPYSLNPLHAQPQPQHPGWPGQRQSQESGLLHTHRGLPHQLSGLDPRRDYRRHEDLLHGPHALSSGLGDLSIHSLPHAIEEVPHVEDPGINIPDQTVIKKGPVSLSKSNSNAVSAIPINKDNLFGGVVNPNEVFCSVPGRLSLLSSTSKYKVTVAEVQRRLSPPECLNASLLGGVLRRAKSKNGGRSLREKLDKIGLNLPAGRRKAANVTLLTSLVEGEAVHLARDFGYVCETEFPAKAVAEFLNRQHSDPNEQVTRKNMLLATKQICKEFTDLLAQDRSPLGNSRPNPILEPGIQSCLTHFNLISHGFGSPAVCAAVTALQNYLTEALKAMDKMYLSNNPNSHTDNNAKSSDKEEKHRK

SEQ ID NO: 136382 - protein, 439 aa, Artificial Sequence
  derived and/or modified sequence
MKMLWKLTDNIKYEDCEDRHDGTSNGTARLPQLGTVGQSPYTSAPPLSHTPNADFQPPYFPPPYQPIYPQSQDPYSHVNDPYSLNPLHAQPQPQHPGWPGQRQSQESGLLHTHRGLPHQLSGLDPRRDYRRHEDLLHGPHALSSGLGDLSIHSLPHAIEEVPHVEDPGINIPDQTVIKKGPVSLSKSNSNAVSAIPINKDNLFGGVVNPNEVFCSVPGRLSLLSSTSKYKVTVAEVQRRLSPPECLNASLLGGVLRRAKSKNGGRSLREKLDKIGLNLPAGRRKAANVTLLTSLVEGEAVHLARDFGYVCETEFPAKAVAEFLNRQHSDPNEQVTRKNMLLATKQICKEFTDLLAQDRSPLGNSRPNPILEPGIQSCLTHFNLISHGFGSPAVCAAVTALQNYLTEALKAMDKMYLSNNPNSHTDNNAKSSDKEEKHRK

SEQ ID NO: 136383 - protein, 328 aa, Artificial Sequence
  derived and/or modified sequence
MLWKLTDNIKYEDCEDRHDGTSNGTARLPQLGTVGQSPYTSAPPLSHTPNADFQPPYFPPPYQPIYPQSQDPYSHVNDPYSLNPLHAQPQPQHPGWPGQRQSQESGLLHTHRGLPHQLSGLDPRRDYRRHEDLLHGPHALSSGLGDLSIHSLPHAIEEVPHVEDPGINIPDQTVIKKGPVSLSKSNSNAVSAIPINKDNLFGGVVNPNEVFCSVPGRLSLLSSTSKYKVTVAEVQRRLSPPECLNASLLGGVLRRAKSKNGGRSLREKLDKIGLNLPAGRRKAANVTLLTSLVEDRYAKSSPTCWLRTDLPWGTHGPTPSWSPASRAA

SEQ ID NO: 136384 - DNA, 3300 bp, Artificial Sequence
  derived and/or modified sequence
acgggagctctttcccttctctcctcctcctcgcccttctcctcgccctcctcctcctcctcgccctcctcttcctcctcctcctccttgccctcctcctctccctcctccttctcctcctccacctcctctccctcctcctcctcctcctgcgctcaccgccggcagccagcactttgcgctcacccagagagtagctccacttgggtgcgagaccgagaggggcatatccgttcacgccgatccatgaaaatgctttggaaattgacggataatatcaagtacgaggactgcgaggaccgtcacgacggcaccagcaacgggacggcacggttgccccagctgggcactgtaggtcaatctccctacacgagcgccccgccgctgtcccacacccccaatgccgacttccagcccccatacttccccccaccctaccagcctatctacccccagtcgcaagatccttactcccacgtcaacgacccctacagcctgaaccccctgcacgcccagccgcagccgcagcacccaggctggcccggccagaggcagagccaggagtctgggctcctgcacacgcaccgggggctgcctcaccagctgtcgggcctggatcctcgcagggactacaggcggcacgaggacctcctgcacggcccacacgcgctcagctcaggactcggagacctctcgatccactccttacctcacgccatcgaggaggtcccgcatgtagaagacccgggtattaacatcccagatcaaactgtaattaagaaaggccccgtgtccctgtccaagtccaacagcaatgccgtctccgccatccctattaacaaggacaacctcttcggcggcgtggtgaaccccaacgaagtcttctgttcagttccgggtcgcctctcgctcctcagctccacctcgaagtacaaggtcacggtggcggaagtgcagcggcggctctcaccacccgagtgtctcaacgcgtcgctgctgggcggagtgctccggagggcgaagtctaaaaatggaggaagatctttaagagaaaaactggacaaaataggattaaatctgcctgcagggagacgtaaagctgccaacgttaccctgctcacatcactagtagagggagaagctgtccacctagccagggactttgggtacgtgtgcgaaaccgaatttcctgccaaagcagtagctgaatttctcaaccgacaacattccgatcccaatgagcaagtgacaagaaaaaacatgctcctggctacaaaacagatatgcaaagagttcaccgacctgctggctcaggaccgatctcccctggggaactcacggcccaaccccatcctggagcccggcatccagagctgcttgacccacttcaacctcatctcccacggcttcggcagccccgcggtgtgtgccgcggtcacggccctgcagaactatctcaccgaggccctcaaggccatggacaaaatgtacctcagcaacaaccccaacagccacacggacaacaacgccaaaagcagtgacaaagaggagaagcacagaaagtgaggctctcctcccgccccgcccctcccacgcctcaccagccccccgcgcgcccaccctccggcgggtgacagctccgggatcagcaacccttcctgctgctgctactgctgctgctgctgccgccgccgccgccgccgctgcccttgggtccccccgagtctccgggactgccctctcgactgtcagtggggcagcctctccgactctgcacccgcctcgacctccccacccgctcccacacccctgtgccctcatgtggagcctaagagaacagaacaggccgtgaagccagcagagaaaagttctgccaagtttgtgaacccttttttttttaaacaaaacaacaaatcaacaacagcaacaacaacaacaaaaattaaaaacttttttctaaaaaaaaagtgaaaataaaaaaaattatatgcgcttcatgggactgagtcaccaccttcccttacatacttcagttcagattgtagccatacttaaaaaaaaaaaaaaagccaaaagatgatgacaacatttttatcagtattgtgaataaacttgaacacaaatacacgaagttccatgtcatgtcttcagttgtagaagtttttcctctttaaggtaaagcgaccaacttgaactttctctggcaacacgattcgcagttatataagggaatcagtgttcacgtctctgtatatatttatttatgtgtaatttaatgggaattgtaaatatggtgagtctgttttaagcctttttttttttatttatctgatcttgtttacctcttgtttagtgggttttgaatcttccctattagttcttcatgtggttcatggtactgatttagaaatccagtgtttgggggatttttttctctgggattcatgaatttagccctgttgtagcatgttaaaggtgacaaacagctggacaaatttttaaaaagtaaaataaaattttatctataattagtattattacatttagcttttcattgaaccgaaagaaaaaaagtgatattggaccctggaaagattttgaaacttgagtggtttgataacccttctatgtattgtagggagaaaaaaaaaagtttattttattccactgtcctcccttaaaagcatcatttgagcaataaatgaatattgtctttaaaccaagggttagggaattttcctctctctctctctctcctctctctttctgttcaaagaacttcaaacatttgggaccacctggtattctgtattttcactggccatattggaagcagttctagttgcattgtattgagttgtgctggcagtagtttccatgcctgtcaatgtatcatagtcctttgttgcccagataaataaatatttgatacgctttatgtcgatttttttttattcagtggctgtctttacccaggcgtatttttgttcttggcagtattttttattcagtatggttacagtaattgagtttaactctcccttggcaattgctccttgcaataagcagctgaacccattgtttccctcaagtataataaaaacttactttcaacttggagttcagagcagggtatcatttagatattccactgtgtctgtattcagacaaatgacacaataaaacccaatgtattcttttggataaaagattgtttgtactgctaaaggaatgacatactgtcttttccttactagaaacattaattttattattaaaaataaagttttattttattta

SEQ ID NO: 136385 - DNA, 1314 bp, Artificial Sequence
  derived and/or modified sequence
atgctgtggaagctgaccgacaacatcaagtacgaggactgcgaggacagacacgacggcaccagcaacggcaccgccagactgccccagctgggcaccgtgggccagagcccctacaccagcgccccccccctgagccacacccccaacgccgacttccagcccccctacttcccccccccctaccagcccatctacccccagagccaggacccctacagccacgtgaacgacccctacagcctgaaccccctgcacgcccagccccagccccagcaccccggctggcccggccagagacagagccaggagagcggcctgctgcacacccacagaggcctgccccaccagctgagcggcctggaccccagaagagactacagaagacacgaggacctgctgcacggcccccacgccctgagcagcggcctgggcgacctgagcatccacagcctgccccacgccatcgaggaggtgccccacgtggaggaccccggcatcaacatccccgaccagaccgtgatcaagaagggccccgtgagcctgagcaagagcaacagcaacgccgtgagcgccatccccatcaacaaggacaacctgttcggcggcgtggtgaaccccaacgaggtgttctgcagcgtgcccggcagactgagcctgctgagcagcaccagcaagtacaaggtgaccgtggccgaggtgcagagaagactgagcccccccgagtgcctgaacgccagcctgctgggcggcgtgctgagaagagccaagagcaagaacggcggcagaagcctgagagagaagctggacaagatcggcctgaacctgcccgccggcagaagaaaggccgccaacgtgaccctgctgaccagcctggtggagggcgaggccgtgcacctggccagagacttcggctacgtgtgcgagaccgagttccccgccaaggccgtggccgagttcctgaacagacagcacagcgaccccaacgagcaggtgaccagaaagaacatgctgctggccaccaagcagatctgcaaggagttcaccgacctgctggcccaggacagaagccccctgggcaacagcagacccaaccccatcctggagcccggcatccagagctgcctgacccacttcaacctgatcagccacggcttcggcagccccgccgtgtgcgccgccgtgaccgccctgcagaactacctgaccgaggccctgaaggccatggacaagatgtacctgagcaacaaccccaacagccacaccgacaacaacgccaagagcagcgacaaggaggagaagcacagaaagtag

SEQ ID NO: 136386 - DNA, 1320 bp, Artificial Sequence
  derived and/or modified sequence
atgaagatgctgtggaagctgaccgacaacatcaagtacgaggactgcgaggacagacacgacggcaccagcaacggcaccgccagactgccccagctgggcaccgtgggccagagcccctacaccagcgccccccccctgagccacacccccaacgccgacttccagcccccctacttcccccccccctaccagcccatctacccccagagccaggacccctacagccacgtgaacgacccctacagcctgaaccccctgcacgcccagccccagccccagcaccccggctggcccggccagagacagagccaggagagcggcctgctgcacacccacagaggcctgccccaccagctgagcggcctggaccccagaagagactacagaagacacgaggacctgctgcacggcccccacgccctgagcagcggcctgggcgacctgagcatccacagcctgccccacgccatcgaggaggtgccccacgtggaggaccccggcatcaacatccccgaccagaccgtgatcaagaagggccccgtgagcctgagcaagagcaacagcaacgccgtgagcgccatccccatcaacaaggacaacctgttcggcggcgtggtgaaccccaacgaggtgttctgcagcgtgcccggcagactgagcctgctgagcagcaccagcaagtacaaggtgaccgtggccgaggtgcagagaagactgagcccccccgagtgcctgaacgccagcctgctgggcggcgtgctgagaagagccaagagcaagaacggcggcagaagcctgagagagaagctggacaagatcggcctgaacctgcccgccggcagaagaaaggccgccaacgtgaccctgctgaccagcctggtggagggcgaggccgtgcacctggccagagacttcggctacgtgtgcgagaccgagttccccgccaaggccgtggccgagttcctgaacagacagcacagcgaccccaacgagcaggtgaccagaaagaacatgctgctggccaccaagcagatctgcaaggagttcaccgacctgctggcccaggacagaagccccctgggcaacagcagacccaaccccatcctggagcccggcatccagagctgcctgacccacttcaacctgatcagccacggcttcggcagccccgccgtgtgcgccgccgtgaccgccctgcagaactacctgaccgaggccctgaaggccatggacaagatgtacctgagcaacaaccccaacagccacaccgacaacaacgccaagagcagcgacaaggaggagaagcacagaaagtag

SEQ ID NO: 136387 - DNA, 987 bp, Artificial Sequence
  derived and/or modified sequence
atgctgtggaagctgaccgacaacatcaagtacgaggactgcgaggacagacacgacggcaccagcaacggcaccgccagactgccccagctgggcaccgtgggccagagcccctacaccagcgccccccccctgagccacacccccaacgccgacttccagcccccctacttcccccccccctaccagcccatctacccccagagccaggacccctacagccacgtgaacgacccctacagcctgaaccccctgcacgcccagccccagccccagcaccccggctggcccggccagagacagagccaggagagcggcctgctgcacacccacagaggcctgccccaccagctgagcggcctggaccccagaagagactacagaagacacgaggacctgctgcacggcccccacgccctgagcagcggcctgggcgacctgagcatccacagcctgccccacgccatcgaggaggtgccccacgtggaggaccccggcatcaacatccccgaccagaccgtgatcaagaagggccccgtgagcctgagcaagagcaacagcaacgccgtgagcgccatccccatcaacaaggacaacctgttcggcggcgtggtgaaccccaacgaggtgttctgcagcgtgcccggcagactgagcctgctgagcagcaccagcaagtacaaggtgaccgtggccgaggtgcagagaagactgagcccccccgagtgcctgaacgccagcctgctgggcggcgtgctgagaagagccaagagcaagaacggcggcagaagcctgagagagaagctggacaagatcggcctgaacctgcccgccggcagaagaaaggccgccaacgtgaccctgctgaccagcctggtggaggacagatacgccaagagcagccccacctgctggctgagaaccgacctgccctggggcacccacggccccacccccagctggagccccgccagcagagccgcctag

SEQ ID NO: 136388 - DNA, 1314 bp, Artificial Sequence
  derived and/or modified sequence
atgctttggaaactcaccgataacattaaatatgaggactgcgaagacaggcacgacgggacaagcaatggaacagctaggctgccgcagctaggcacagtgggccagtctccatacacaagcgcaccgccactctcacacaccccaaacgccgacttccaacctccatacttccctcctccataccaaccgatatacccccagagccaggatccctattcacatgtgaatgatccctactcactgaaccccctgcatgcccagccacagccacagcacccaggatggccggggcagagacaatctcaggaaagcggcctactccacactcacaggggtttaccccaccaactgagtggtctggatccaagaagggattaccgtagacatgaggatttgttgcacggcccacacgcgctttcttctggactgggtgacttgtcaattcattctctgccacatgccatcgaagaagttcctcacgtagaggatcccggaataaacattccagaccagacagttatcaagaaagggccagttagcctctctaaatcaaactcaaatgctgtgtcagccattcctatcaataaggataatctgtttggcggggtcgtgaatccgaatgaagttttttgcagcgtcccgggtagattgtctctgctgagtagtacgtccaagtacaaggttactgtcgcggaggtgcagagaagactgtcaccgccagagtgcctcaatgccagtctgttggggggagtgctcagacgggcaaagagtaaaaacgggggccgcagtctcagagagaaactagataagatcggcctgaaccttccggccggacgtcgtaaggccgcaaatgtaactctcctgacatcgctggtggaaggcgaggcagttcacctggctagagactttggttatgtgtgtgaaactgaattccccgcgaaggctgtcgcggagttcctgaaccgacagcattccgatccaaacgagcaggtcacccgcaaaaacatgctcctggctaccaagcagatatgcaaagagttcacagacttgcttgcacaagaccggagtccacttggaaatagcagacccaatccaatcctggaaccaggcatacagagctgcctgacccactttaacttgatctctcacgggttcgggtccccagccgtatgcgcagcggtgacggccctacaaaactacctgactgaagctttgaaggctatggacaagatgtacctgtccaacaatcccaactcccacaccgacaacaacgcaaagtcttcagacaaggaggaaaagcatagaaaatag

SEQ ID NO: 136389 - DNA, 1320 bp, Artificial Sequence
  derived and/or modified sequence
atgaagatgttatggaagttgaccgacaacatcaagtacgaggattgtgaggaccggcacgatggcacttcgaatgggactgccaggttgccccagctcggtacagtgggccagtctccttatacttcagcaccacctctgagccatactcccaacgctgactttcagcccccttattttcctccaccttaccagcctatataccctcagtctcaggatccctactcccatgtgaatgacccctattccctcaacccgcttcacgctcaacctcagccacagcaccccggctggcctgggcagcgccagtcacaggagtcaggactgctgcacactcatcgcgggctcccccatcagctgtccggcctggatccccgacgcgattaccgaagacacgaagacttactgcacggtccccacgcgctttcttcaggtcttggagatttaagcatacacagccttccccatgcaattgaagaggtgcctcacgtggaagatccagggataaacattccggaccagaccgtgatcaagaaaggccccgtgtctctctccaagtctaatagtaatgccgtcagcgccatccccatcaataaggacaacctgttcggaggcgtcgtgaatcctaatgaagtgttctgcagcgtgcctggcaggctgtctttgctctcttccacttctaagtataaggtaactgtagcagaagtgcagaggcgcttgagtccaccagagtgcctgaacgcatcactcttggggggagtgcttcggagagctaagtcgaaaaatggcggcagatccttacgtgagaagttagacaaaatcggactcaatctgcctgctgggcgccgcaaagctgcgaatgtgacactccttacaagcctggtggaaggcgaggctgtgcacttagcccgggatttcggttacgtgtgcgagaccgaatttcccgccaaagcagtagctgaatttctcaaccgtcaacacagtgacccaaatgagcaggtcacccgtaagaacatgttgcttgccactaagcagatctgcaaggagtttaccgacttgttggctcaggaccggtcacctctggggaactcccgccccaatccgatcttggagccaggaattcagagttgcctgacacatttcaacctgattagtcacggttttggtagcccagcagtatgcgcggcagtgacagctcttcagaattacttgactgaggcactaaaggccatggataagatgtacctttcaaacaatccaaactcccatacggataataacgccaagtccagcgataaagaggaaaaacaccgaaagtag

SEQ ID NO: 136390 - DNA, 987 bp, Artificial Sequence
  derived and/or modified sequence
atgctttggaagctaaccgataatattaagtacgaggattgtgaagatagacatgatggaacttctaacggtacagctcgactcccacagcttggaacagtagggcaaagcccttataccagtgcgccacccttgtctcacacccctaacgctgattttcagcccccttacttccccccaccataccaacctatctacccccagtcgcaggacccttactctcacgtgaacgatccgtactccctaaatcccctgcatgcacagccccaaccacagcacccgggctggccaggccagagacagtcacaggaaagtggactgcttcacactcacagggggctgcctcaccaattatcaggcttggacccacggcgagattaccgtcggcacgaggatctgctccacggcccacatgcattgtcttcaggactaggggacctgagcatccactcattgccccacgctatcgaggaagtcccacatgtggaggatcctggcatcaacatacccgatcaaactgttatcaaaaaaggtccggtgtctttgtctaagtctaacagcaatgctgtttcagccattcctatcaataaagacaacctgttcgggggcgtggtgaacccgaacgaggtcttctgctccgttcctggaaggctgagcctcctgagctcaacgagcaagtacaaagtcaccgtggccgaggttcaacgtagactgtctccccccgagtgcctaaacgcctccttgttaggcggggtgctccgcagggccaaaagcaagaatggtgggaggtccctgcgggagaaactggacaagatcggccttaatctgccggccggccggcgcaaagccgccaacgtaacactgttaacttcgctggtggaagaccgatacgctaagtcttcacccacatgctggttgcgtactgacctgccctggggaactcatgggcctaccccctcttggtcacctgcctcccgggccgcctag

SEQ ID NO: 136391 - DNA, 1314 bp, Artificial Sequence
  derived and/or modified sequence
atgctttggaaacttaccgacaatattaagtacgaggattgtgaggatagacacgacggtacctccaacggtaccgcccgcctgccccagctcggtactgttggacagagtccgtatacctctgcgccaccactgagccatacaccgaatgcagactttcagcccccctacttcccccccccgtaccagccaatctatccacagtcacaggacccttactctcatgttaatgacccttactcactgaatcctctacacgcgcagccacagccccagcacccagggtggccgggacagagacagagtcaagagagcggacttttacatacccacaggggactccctcaccagttaagcggattggaccctcggagagattaccggcgccatgaggacctcctgcatgggccccacgccctgagcagtgggcttggagacctgtcgattcacagcctgccacacgctatcgaggaagttcctcacgtagaggatccgggaattaatatcccagatcagacggtcattaagaagggacccgtgagtctgagtaagtccaattcaaacgcggtctcagcaattcctatcaacaaagataacttatttgggggggtagtgaatcctaacgaggtgttctgtagcgtgcccggaagactgtctctcctaagcagtacatccaagtataaggtcacagttgccgaggtgcagagaagactttcaccccccgaatgtctgaacgccagtctgctgggaggggtgttgaggcgggccaaatcgaagaatggcggacgatctcttagggaaaagctagataagattggcctgaacctgcccgccggcaggcgcaaggccgcaaatgtgaccttactgactagcttagttgaaggagaggcagtgcaccttgcacgtgactttgggtacgtctgtgaaactgaattccctgcaaaggcggtcgccgagtttctgaatagacagcatagcgatccgaacgaacaagttacccgaaagaacatgctgctagctactaagcagatatgtaaggagtttacagatctgctagcgcaggaccggtcccccctggggaatagtcggccaaatccgatccttgaacctggcatccagagctgcctcacccactttaacttgatctcccatggcttcggcagccctgccgtgtgtgccgctgttaccgccctccaaaattatctgactgaggccctcaaggctatggacaagatgtacctgtccaacaacccaaactctcacaccgataacaacgccaagtccagtgacaaagaagagaagcatagaaaatag

SEQ ID NO: 136392 - DNA, 1314 bp, Artificial Sequence
  derived and/or modified sequence
atgctgtggaagctgacagacaacatcaagtatgaggactgtgaagatagacatgatggcaccagcaatggaacagcccggctgccccagctgggcaccgtgggccagagcccctacaccagcgccccacccctgagccacaccccaaatgctgacttccagcccccctacttccccccaccctaccagcccatctacccccagagccaggacccctacagccacgtgaatgacccctacagcctgaaccccctgcacgcccagccccagccccagcaccctggctggccaggccagaggcagagccaggagagcggcctgctgcacacccaccggggcctgccccaccagctgagcggcctggacccccggcgggactacagaagacatgaggacctgctgcacggcccccacgccctgagcagcggcctgggggacctgagcatccacagcctgccccacgccatcgaggaggtgccccacgtggaggaccccggcatcaacatcccagaccagaccgtcatcaagaagggccctgtgtccctgagcaagagcaacagcaatgctgtgtctgccatccccatcaacaaggacaacctgtttggaggagtggtgaaccccaatgaggtgttctgcagcgtgcccggccgcctgagcctgctgagcagcaccagcaagtacaaggtgacagtggccgaggtgcagaggcggctgagccccccagagtgcctgaatgccagcctgctgggcggcgtgctgcggcgggccaagagcaagaatggaggccgcagcctgcgggagaagctggacaagattggcctgaacctgcctgctggccgcaggaaggccgccaacgtgaccctgctgaccagcctggtggagggggaggccgtgcacctggcccgggactttggctacgtgtgtgaaacagagttccctgccaaggctgtggccgagttcctgaaccggcagcacagcgaccccaatgagcaggtgaccaggaagaacatgctgctggccaccaagcagatctgcaaggagttcacagacctgctggcccaggacaggagccccctgggcaacagccggcccaaccccatcctggagcccggcatccagagctgcctgacccacttcaacctgatcagccacggcttcggcagccctgctgtgtgtgccgctgtgacagccctgcagaactacctgacagaggccctgaaggccatggacaagatgtacctgagcaacaaccccaacagccacacagacaacaatgccaagagcagtgacaaggaggagaagcacaggaagtag

SEQ ID NO: 136393 - DNA, 1320 bp, Artificial Sequence
  derived and/or modified sequence
atgaagatgctgtggaagctgacagacaacatcaagtatgaggactgtgaagatagacatgatggcaccagcaatggaacagcccggctgccccagctgggcaccgtgggccagagcccctacaccagcgccccacccctgagccacaccccaaatgctgacttccagcccccctacttccccccaccctaccagcccatctacccccagagccaggacccctacagccacgtgaatgacccctacagcctgaaccccctgcacgcccagccccagccccagcaccctggctggccaggccagaggcagagccaggagagcggcctgctgcacacccaccggggcctgccccaccagctgagcggcctggacccccggcgggactacagaagacatgaggacctgctgcacggcccccacgccctgagcagcggcctgggggacctgagcatccacagcctgccccacgccatcgaggaggtgccccacgtggaggaccccggcatcaacatcccagaccagaccgtcatcaagaagggccctgtgtccctgagcaagagcaacagcaatgctgtgtctgccatccccatcaacaaggacaacctgtttggaggagtggtgaaccccaatgaggtgttctgcagcgtgcccggccgcctgagcctgctgagcagcaccagcaagtacaaggtgacagtggccgaggtgcagaggcggctgagccccccagagtgcctgaatgccagcctgctgggcggcgtgctgcggcgggccaagagcaagaatggaggccgcagcctgcgggagaagctggacaagattggcctgaacctgcctgctggccgcaggaaggccgccaacgtgaccctgctgaccagcctggtggagggggaggccgtgcacctggcccgggactttggctacgtgtgtgaaacagagttccctgccaaggctgtggccgagttcctgaaccggcagcacagcgaccccaatgagcaggtgaccaggaagaacatgctgctggccaccaagcagatctgcaaggagttcacagacctgctggcccaggacaggagccccctgggcaacagccggcccaaccccatcctggagcccggcatccagagctgcctgacccacttcaacctgatcagccacggcttcggcagccctgctgtgtgtgccgctgtgacagccctgcagaactacctgacagaggccctgaaggccatggacaagatgtacctgagcaacaaccccaacagccacacagacaacaatgccaagagcagtgacaaggaggagaagcacaggaagtag

SEQ ID NO: 136394 - DNA, 987 bp, Artificial Sequence
  derived and/or modified sequence
atgctgtggaagctgacagacaacatcaagtatgaggactgtgaagatagacatgatggcaccagcaatggaacagcccggctgccccagctgggcaccgtgggccagagcccctacaccagcgccccacccctgagccacaccccaaatgctgacttccagcccccctacttccccccaccctaccagcccatctacccccagagccaggacccctacagccacgtgaatgacccctacagcctgaaccccctgcacgcccagccccagccccagcaccctggctggccaggccagaggcagagccaggagagcggcctgctgcacacccaccggggcctgccccaccagctgagcggcctggacccccggcgggactacagaagacatgaggacctgctgcacggcccccacgccctgagcagcggcctgggggacctgagcatccacagcctgccccacgccatcgaggaggtgccccacgtggaggaccccggcatcaacatcccagaccagaccgtcatcaagaagggccctgtgtccctgagcaagagcaacagcaatgctgtgtctgccatccccatcaacaaggacaacctgtttggaggagtggtgaaccccaatgaggtgttctgcagcgtgcccggccgcctgagcctgctgagcagcaccagcaagtacaaggtgacagtggccgaggtgcagaggcggctgagccccccagagtgcctgaatgccagcctgctgggcggcgtgctgcggcgggccaagagcaagaatggaggccgcagcctgcgggagaagctggacaagattggcctgaacctgcctgctggccgcaggaaggccgccaacgtgaccctgctgaccagcctggtggaggacagatatgccaagagcagccccacctgctggctgaggacagacctgccctggggcacccacggccccacccccagctggagccctgccagcagagctgcctag

SEQ ID NO: 136395 - DNA, 1314 bp, Artificial Sequence
  derived and/or modified sequence
atgctgtggaagctgaccgacaacatcaagtacgaggactgcgaggatcgacacgatggtactagtaacggaaccgcgagacttccccagctcggcaccgtgggacaaagtccttacacctctgctccaccactgagccacaccccgaatgcagatttccaacctccttacttcccccccccttaccagccaatctatccccagtctcaagacccgtactcccacgtgaacgacccctacagcttaaatcctctccacgcccaacctcagccgcaacaccctgggtggcccggccagcgtcagtcccaggaatcaggtctactccacacccacagaggcttgccccatcaactcagtggactggaccctcggagagattacaggcgacatgaggatctccttcatggtccgcacgccctctcctcaggcctaggggacttgtccattcattctctgccccacgccatcgaagaagttccccatgttgaagatccaggtattaatattcctgatcagacggtcattaagaagggacctgtgtccctttcaaagtcgaatagcaatgccgtctcagccatacctataaataaagacaatctgtttggaggtgtcgtgaatcccaacgaggtattctgctccgtccctggaagattgtctttgctgtcgagtacctccaagtacaaagtcaccgttgcagaggtgcagcgcagactgtcccctccagagtgccttaatgcctcgcttctgggcggcgtactgagaagagccaagtctaaaaacggaggacggagtctccgcgagaagctcgataaaattgggcttaacttgcctgctggccgacgaaaagccgcgaacgtgacactgctgacatcattggtggagggcgaggccgtccacttggcaagggactttgggtatgtgtgtgaaactgaattccccgccaaggccgtcgcagaatttttgaaccggcagcactccgaccctaatgaacaggtgacacgaaagaacatgctgttggctacaaagcagatatgcaaggagtttaccgacctcctggctcaggataggtcgccgctaggcaacagcagaccaaatcccatccttgaacctgggatacaaagctgtctgacccattttaatctgatttcacacggtttcggttctcctgctgtttgcgcagccgtgaccgctcttcaaaattatcttactgaggctttaaaagcgatggacaagatgtatttgtctaataacccgaatagccacaccgacaataacgctaagtcttccgacaaagaagaaaagcatcgcaagtag

SEQ ID NO: 136396 - DNA, 1320 bp, Artificial Sequence
  derived and/or modified sequence
atgaagatgctgtggaagctgaccgacaacatcaagtacgaggactgtgaggatcggcacgatggcacaagcaacggcacggccaggctgcctcagctgggaaccgtcgggcagagtccctacacctccgcccccccattatctcacactcctaacgccgattttcagccgccttatttcccccccccatatcagcctatttatccccagtcacaggatccttacagccatgtgaatgacccatactctctcaatcccttgcatgctcaaccacagccccagcacccagggtggcctggacagcgccagagtcaagagagcggccttctgcacacccacaggggcctcccgcatcagctgtccggtttggacccaaggcgagactaccgtaggcacgaggatctcctgcacgggccacacgccctgagctccggtctaggggacctctcgatccactcactccctcacgctattgaggaagtccctcacgtcgaggatcctggtatcaacatacccgaccagacagtgatcaagaaaggacccgttagcttgtccaaatccaacagtaacgccgtcagcgcaattcctatcaacaaagacaatctgttcgggggggttgtgaatcccaacgaagtcttttgcagcgtaccggggagattatccctgctaagcagcacaagcaagtataaggtcaccgtcgctgaggttcagagaaggttaagcccacccgagtgccttaatgcgagcttactaggaggtgtgctccggcgcgccaagtcaaagaacggcgggcgtagcctaagagagaagctcgataagattggtctaaatcttccagctggccggcggaaggcagcaaatgtgactcttctcacttccctggtggaaggtgaggccgtccacctggccagagatttcgggtacgtctgcgaaacagagttcccggcaaaggccgtggcagaattcctgaatcggcagcatagcgaccccaacgaacaggtcacccgaaaaaatatgctgctcgctaccaagcagatctgtaaagaattcaccgatctgctggcacaggataggtctcctttagggaacagcagacccaaccctatcctcgagccaggaatccagagttgcctgactcactttaacctgatatcccacggtttcggatctccggccgtctgtgctgcagtaaccgccctgcagaactatctgacagaggcactcaaggctatggataagatgtacctgtcgaacaatcctaattctcataccgacaataatgcaaagagttctgacaaggaagagaaacatcgcaagtag

SEQ ID NO: 136397 - DNA, 987 bp, Artificial Sequence
  derived and/or modified sequence
atgctgtggaagctgaccgacaacatcaagtacgaggactgcgaggaccggcatgacggaactagtaacggaacggctaggttaccacagctgggtaccgttggtcaatcgccatatacttcagcccctccgctaagtcatacgcccaatgcggatttccagcctccctacttcccgcctccttaccagcccatttatcctcagtcccaggacccatactcacacgtgaacgatccttactcccttaatccactccacgcacaaccacagccgcagcacccagggtggccagggcagaggcagtctcaggagtccggcctcctgcacactcatcggggcctcccacaccaattgtcaggtctggacccaagacgagattatcgtcgccacgaggacctgctacacggcccacacgccctgagcagcggcctgggggatctctctatccactcccttcctcacgcaattgaagaagttccccatgtggaggatcctggtattaacatcccagatcagaccgtgatcaagaaaggccccgtaagtctgagcaaatctaacagcaatgctgtgagcgccattcccatcaacaaagataacttattcggaggcgtcgtgaaccccaatgaggtcttctgttctgtgccaggtcgcctaagcttgttaagctccacctccaaatataaagtgacggtggccgaagtgcagcgcagactctccccccctgaatgccttaatgctagcctgttggggggagtgcttcggcgcgctaaatctaagaacggtggacgcagcctccgagaaaaactggataaaataggcctcaatttacctgcgggaaggcgtaaagccgcaaatgtcactcttcttacgagcctggtggaagaccgctacgcgaaaagttctcctacctgctggctgagaactgatctgccctggggcactcatggccctacgccctcctggtcgcccgcctcacgggctgcctag

SEQ ID NO: 136398 - DNA, 1314 bp, Artificial Sequence
  derived and/or modified sequence
atgctgtggaagctgaccgacaacatcaagtacgaggactgcgaggatcggcacgatggcacgtctaatgggacagcaaggctgcctcaattaggcacagtcggccaatccccctacacgagcgctccccctctgagccatacacccaacgcagattttcagcctccctacttcccgccaccctaccagcctatttatcctcagtctcaggatccctactctcacgtgaacgacccgtacagcctgaatcccctgcacgcccaaccccaaccacaacaccctgggtggccaggccagaggcagtcccaggagagcggattgcttcacacccaccgcgggctgcctcaccagctcagcggtttagacccccggcgtgattatcgtcggcatgaagacctgctgcacgggccgcacgctttgagctcgggtttaggtgatctgagcattcatagccttccccacgcaattgaggaggtcccacatgtggaggatcccggaattaatattcccgaccagacggtgatcaagaaagggccggtctctctctccaagtccaattccaacgcggtgtccgcgattccaatcaataaggacaatcttttcggaggagtcgtaaatccaaacgaggtgttctgttcagtcccggggcggctgagcctcctgtcttcaactagcaagtacaaggtaaccgtggccgaggtccaacgccgcctgagtcctcccgagtgtctgaatgcttcacttttagggggggtcctcaggagagcgaaatctaagaacggcggcagatctttgagagagaaactcgataagatcggcctcaacctgcctgccgggaggcggaaagcagccaatgtgactctgctgaccagtctagtggagggcgaggctgttcatcttgccagagactttggctacgtgtgcgagaccgagttccctgccaaagcagtggcagaattcctgaaccgacagcactccgatcccaatgaacaggtcacaaggaagaacatgctgctggcgaccaaacagatttgcaaagagtttaccgatctcttggcgcaggaccgatccccccttgggaacagcagacccaatcccatcctagagccaggcatacagtcttgccttacccactttaatttgatttcacacggattcggttccccggcggtctgtgctgctgttacagccttgcaaaactaccttactgaggcactcaaggctatggacaagatgtatctttccaacaatcctaatagccacacagacaataatgctaaatcatctgacaaggaggagaaacaccggaaatag

SEQ ID NO: 136399 - DNA, 1314 bp, Artificial Sequence
  derived and/or modified sequence
atgctgtggaaactcactgacaacattaagtatgaggattgtgaagataggcacgacggtacctccaatgggacagccagacttcctcagctgggaactgttgggcaatcgccgtatacaagtgcccctcctctctctcatacccccaacgcagattttcagcctccatactttccacccccttaccagccaatctatccacaatcacaagacccctactctcacgtgaacgatccatatagcctcaaccccttgcacgcacaacctcagccacaacacccaggatggcctgggcagcgacagtctcaagaatctgggttgttgcatactcacaggggccttccacatcagttatccggacttgatcctcgcagggactataggcgacacgaggacctcctgcacggacctcatgcgctgtcctctggcctgggggacctgagcatccattccctgcctcacgccatcgaggaggtgcctcatgtagaagacccaggtatcaacatcccagaccagaccgtcatcaaaaaaggccctgtgagcttgagcaaaagcaactcgaatgccgtttccgccatacctatcaataaagacaacctgtttggcggtgttgtgaatcccaacgaagttttctgctctgttcccggaaggttgagtctgctgagctctaccagtaagtacaaagtgacggtagctgaagttcagagaaggctttcacctcctgaatgtctcaacgcgagcctgctcggcggtgtattgcgtcgcgcaaaatcgaaaaatggcggaaggagcctcagagagaagcttgacaagatcgggctgaacctgcccgcaggaagaaggaaggcggctaacgtgacgctgctcaccagcttggtcgaaggcgaggctgttcacctggcaagggatttcggatacgtttgtgaaacagagtttcccgcaaaggccgtggcggagtttcttaacagacagcattccgaccccaacgagcaggtgacacgaaaaaacatgctgctggctaccaagcagatttgtaaggagttcacagaccttctggcacaggacaggagccctctcggaaactcgcgcccaaatccaattctcgaaccgggtattcagagctgcttgacccacttcaacttgatctctcacggtttcggcagccccgctgtttgtgctgctgtcaccgccctgcagaactatctgaccgaggctctaaaagcaatggacaagatgtacctgtctaacaacccgaacagccacactgataacaacgccaagtcgtccgataaagaggagaagcacagaaaatag

SEQ ID NO: 136400 - DNA, 1320 bp, Artificial Sequence
  derived and/or modified sequence
atgaaaatgctgtggaaactcaccgacaacattaaatatgaagattgcgaggataggcacgatgggaccagcaacggtacggctagattgcctcagctggggactgttgggcagtctccatacacgtcagctcctcccttaagtcatacccccaacgcagactttcaaccaccatatttcccacccccataccagcccatttatccccagtcccaagatccttacagtcacgtaaatgatccatattctctgaatccgctacacgcccagccacagccccagcaccccggatggcctggacaaagacagtcccaggagtcaggcctgctgcatacccatcgcggtttgccacaccagctgagcggactggacccaaggcgagactaccgtaggcacgaggatttactgcacgggcctcacgccctctccagtgggctcggggacctgagcatacattcccttcctcacgccatcgaggaggtgccccatgtcgaagatcccggaatcaatatcccggatcagactgtgatcaagaaaggacccgtgagtctttcgaagagtaatagtaatgccgtgagcgcaatccccatcaataaagacaatttgtttggaggcgtggttaaccccaatgaagtgttctgcagtgttccgggacgcctatcccttttgagctccacttcaaaatacaaggttacagtggctgaagtgcagagaagattgagccctccggagtgcctcaacgcctcgttgctgggcggagtgctacgcagagctaagtctaagaacggtggccgttctctgagggagaagcttgacaagattggtctgaatttgccggctggaagaagaaaggccgcaaacgtcactctgttgacatctctggtggaaggcgaagctgtacaccttgccagagatttcggctatgtctgcgaaacagaatttccagccaaggcagtagccgagtttctgaacaggcagcatagcgatccgaatgagcaggtgacccgcaagaatatgctacttgcaaccaagcaaatctgcaaagaatttacggatctgctcgcacaagatcgatcacccctgggaaattctaggcccaatccaattctcgaaccgggaattcaaagctgcttgactcattttaacctgattagccatggattcgggtccccggcagtgtgtgctgctgtgaccgccttgcagaactatttaaccgaagctctgaaggctatggacaagatgtatctgtccaataaccctaattcgcacacggacaataatgcgaagtccagtgacaaggaggagaagcacaggaagtag

SEQ ID NO: 136401 - DNA, 987 bp, Artificial Sequence
  derived and/or modified sequence
atgctgtggaaactaaccgacaacattaaatatgaggactgcgaagatcgacatgacggtacttccaatggaactgctcgtttgccccagctagggactgtcggccaatcgccatatacttccgcccctccactgtctcacacacctaacgccgatttccaacctccctatttccccccaccctatcagcctatttacccacaatctcaagacccatattctcacgtcaatgacccttatagtctgaaccccctccatgcccagcctcagcctcaacaccctggatggcccggacagagacagagtcaagaatccggcttgctccacacacatcggggactcccacaccagctgtcaggcctagacccgagaagggactatcgtcgtcacgaggatcttctccacgggcctcatgccctgtcctcgggcctgggagatctgagcatccactctttaccccacgctatcgaggaggtccctcatgtggaggatcctggcataaatatccctgatcaaaccgtgatcaaaaagggaccggtgtccctctccaaaagtaacagtaacgccgtttctgcaatacccatcaacaaagataacctcttcggaggggtggtcaatcccaatgaggtcttttgctcagttcctggtcgactcagcctgctgtctagtacttcaaagtacaaggtcaccgttgccgaggtgcagagacgtctgagcccccctgagtgcttaaacgcttccctcctcggaggggtattacgccgagcgaaatccaagaacggcggaaggagtctgcgagaaaagctggacaagattgggctcaacctgccagcaggcaggagaaaagctgccaatgtgaccctattaacctccctggtggaagacagatatgccaagtcatcacctacgtgttggctgcgtacagatctgccttgggggactcacggccctacaccatcttggagccccgcttccagagccgcatag

SEQ ID NO: 136402 - DNA, 1314 bp, Artificial Sequence
  derived and/or modified sequence
atgctatggaagctgaccgacaatatcaagtacgaagattgtgaagaccggcatgacggcacgtctaacggcaccgccagactgccccaactggggaccgtcggtcaatctccctatacctccgcgccaccactcagccatacgcccaatgccgactttcagcctccatatttcccgcctccctatcagcctatctatccccagtcacaagatccctacagtcatgtcaatgatccatacagcctgaatcctttgcacgcccaaccacagcctcagcatccaggttggcctggacaaaggcagtctcaggagagcgggctgctccacacccaccggggactaccccaccagctcagcggtctcgatcccaggagggattaccggaggcatgaggatctcctccatggaccccacgccctctcatccggcctgggggacctgtctatccattccctcccacacgcaattgaagaagtcccccacgtggaggacccagggatcaacattcctgaccagaccgtaattaagaagggtcccgtttccctgagcaagagtaactctaatgctgtgagtgctatccccatcaataaggacaacctgttcggtggggtggtgaaccccaacgaggttttctgctctgttccagggaggctgtcactcctgtctagtacctctaaatacaaagtcactgtggcagaagtgcagagaaggctctcccctcctgaatgcttgaacgccagcctgctcggtggtgtgctgcgccgagctaagtcaaagaatggtggtagaagtttgcgtgaaaagttggataaaatcgggctgaacttgcccgcagggaggcgcaaagccgcaaacgtcactctcttgaccagcctcgtagagggcgaggccgttcatctggcccgagattttggatacgtctgcgagaccgagtttccggcaaaggccgtggcagagtttctgaaccgacagcacagtgatcccaacgaacaggtaacccgcaaaaacatgctgcttgccacgaagcagatttgcaaagagtttacagacctgctggcccaggacagatctcccctggggaactctcgccctaatcccattctcgaacctgggatccaatcttgcctcacccacttcaacctgatctcccacgggtttggatccccagcggtctgtgcagccgtcacagctctccagaactacttgacggaagctttgaaggcaatggacaagatgtatctctcgaacaatcctaattcccatactgacaacaacgcaaagtctagtgataaggaagaaaagcaccgaaagtag

SEQ ID NO: 136403 - DNA, 3317 bp, Artificial Sequence
  derived and/or modified sequence
tccgagcgcacacgggagctctttcccttctctcctcctcctcgcccttctcctcgccctcctcctcctcctcgccctcctcttcctcctcctcctccttgccctcctcctctccctcctccttctcctcctccacctcctctccctcctcctcctcctcctgcgctcaccgccggcagccagcactttgcgctcacccagagagtagctccacttgggtgcgagaccgagaggggcatatccgttcacgccgatccatgaaaatgctttggaaattgacggataatatcaagtacgaggactgcgaggaccgtcacgacggcaccagcaacgggacggcacggttgccccagctgggcactgtaggtcaatctccctacacgagcgccccgccgctgtcccacacccccaatgccgacttccagcccccatacttccccccaccctaccagcctatctacccccagtcgcaagatccttactcccacgtcaacgacccctacagcctgaaccccctgcacgcccagccgcagccgcagcacccaggctggcccggccagaggcagagccaggagtctgggctcctgcacacgcaccgggggctgcctcaccagctgtcgggcctggatcctcgcagggactacaggcggcacgaggacctcctgcacggcccacacgcgctcagctcaggactcggagacctctcgatccactccttacctcacgccatcgaggaggtcccgcatgtagaagacccgggtattaacatcccagatcaaactgtaattaagaaaggccccgtgtccctgtccaagtccaacagcaatgccgtctccgccatccctattaacaaggacaacctcttcggcggcgtggtgaaccccaacgaagtcttctgttcagttccgggtcgcctctcgctcctcagctccacctcgaagtacaaggtcacggtggcggaagtgcagcggcggctctcaccacccgagtgtctcaacgcgtcgctgctgggcggagtgctccggagggcgaagtctaaaaatggaggaagatctttaagagaaaaactggacaaaataggattaaatctgcctgcagggagacgtaaagctgccaacgttaccctgctcacatcactagtagagggagaagctgtccacctagccagggactttgggtacgtgtgcgaaaccgaatttcctgccaaagcagtagctgaatttctcaaccgacaacattccgatcccaatgagcaagtgacaagaaaaaacatgctcctggctacaaaacagatatgcaaagagttcaccgacctgctggctcaggaccgatctcccctggggaactcacggcccaaccccatcctggagcccggcatccagagctgcttgacccacttcaacctcatctcccacggcttcggcagccccgcggtgtgtgccgcggtcacggccctgcagaactatctcaccgaggccctcaaggccatggacaaaatgtacctcagcaacaaccccaacagccacacggacaacaacgccaaaagcagtgacaaagaggagaagcacagaaagtgaggctctcctcccgccccgcccctcccacgcctcaccagccccccgcgcgcccaccctccggcgggtgacagctccgggatcagcaacccttcctgctgctgctactgctgctgctgctgccgccgccgccgccgccgctgcccttgggtccccccgagtctccgggactgccctctcgactgtcagtggggcagcctctccgactctgcacccgcctcgacctccccacccgctcccacacccctgtgccctcatgtggagcctaagagaacagaacaggccgtgaagccagcagagaaaagttctgccaagtttgtgaacccttttttttttaaacaaaacaacaaatcaacaacagcaacaacaacaacaaaaattaaaaacttttttctaaaaaaaaagtgaaaataaaaaaaattatatgcgcttcatgggactgagtcaccaccttcccttacatacttcagttcagattgtagccatacttaaaaaaaaaaaaaaagccaaaagatgatgacaacatttttatcagtattgtgaataaacttgaacacaaatacacgaagttccatgtcatgtcttcagttgtagaagtttttcctctttaaggtaaagcgaccaacttgaactttctctggcaacacgattcgcagttatataagggaatcagtgttcacgtctctgtatatatttatttatgtgtaatttaatgggaattgtaaatatggtgagtctgttttaagcctttttttttttatttatctgatcttgtttacctcttgtttagtgggttttgaatcttccctattagttcttcatgtggttcatggtactgatttagaaatccagtgtttgggggatttttttctctgggattcatgaatttagccctgttgtagcatgttaaaggtgacaaacagctggacaaatttttaaaaagtaaaataaaattttatctataattagtattattacatttagcttttcattgaaccgaaagaaaaaaagtgatattggaccctggaaagattttgaaacttgagtggtttgataacccttctatgtattgtagggagaaaaaaaaaagtttattttattccactgtcctcccttaaaagcatcatttgagcaataaatgaatattgtctttaaaccaagggttagggaattttcctctctctctctctctcctctctctttctgttcaaagaacttcaaacatttgggaccacctggtattctgtattttcactggccatattggaagcagttctagttgcattgtattgagttgtgctggcagtagtttccatgcctgtcaatgtatcatagtcctttgttgcccagataaataaatatttgatacgctttatgtcgatttttttttattcagtggctgtctttacccaggcgtatttttgttcttggcagtattttttattcagtatggttacagtaattgagtttaactctcccttggcaattgctccttgcaataagcagctgaacccattgtttccctcaagtataataaaaacttactttcaacttggagttcagagcagggtatcatttagatattccactgtgtctgtattcagacaaatgacacaataaaacccaatgtattcttttggataaaagattgtttgtactgctaaaggaatgacatactgtcttttccttactagaaacattaattttattattaaaaataaagttttattttatttatgttga

SEQ ID NO: 136404 - DNA, 987 bp, Artificial Sequence
  derived and/or modified sequence
atgctttggaaattgacggataatatcaagtacgaggactgcgaggaccgtcacgacggcaccagcaacgggacggcacggttgccccagctgggcactgtaggtcaatctccctacacgagcgccccgccgctgtcccacacccccaatgccgacttccagcccccatacttccccccaccctaccagcctatctacccccagtcgcaagatccttactcccacgtcaacgacccctacagcctgaaccccctgcacgcccagccgcagccgcagcacccaggctggcccggccagaggcagagccaggagtctgggctcctgcacacgcaccgggggctgcctcaccagctgtcgggcctggatcctcgcagggactacaggcggcacgaggacctcctgcacggcccacacgcgctcagctcaggactcggagacctctcgatccactccttacctcacgccatcgaggaggtcccgcatgtagaagacccgggtattaacatcccagatcaaactgtaattaagaaaggccccgtgtccctgtccaagtccaacagcaatgccgtctccgccatccctattaacaaggacaacctcttcggcggcgtggtgaaccccaacgaagtcttctgttcagttccgggtcgcctctcgctcctcagctccacctcgaagtacaaggtcacggtggcggaagtgcagcggcggctctcaccacccgagtgtctcaacgcgtcgctgctgggcggagtgctccggagggcgaagtctaaaaatggaggaagatctttaagagaaaaactggacaaaataggattaaatctgcctgcagggagacgtaaagctgccaacgttaccctgctcacatcactagtagaggacagatatgcaaagagttcaccgacctgctggctcaggaccgatctcccctggggaactcacggcccaaccccatcctggagcccggcatccagagctgcttga

SEQ ID NO: 136405 - DNA, 2071 bp, Artificial Sequence
  derived and/or modified sequence
gcagattaacacagctaaaagtcggttcccggtgatttattttgatgcacgcacgagacggtatctagacttgcaggcacacacacgtctgtttttaggctcaacttcagaagcgggtgtgcagttccataggagttctgtattcgtgtccacgttgcacccaggaaaccttagcctgaacaccaatttgaactgtcagttggccctagcttcacacaaacaggagaaaaattgtttaacccctggagctgtcaagtaacctcttcaggccagcactttgcgctcacccagagagtagctccacttgggtgcgagaccgagaggggcatatccgttcacgccgatccatgaaaatgctttggaaattgacggataatatcaagtacgaggactgcgaggaccgtcacgacggcaccagcaacgggacggcacggttgccccagctgggcactgtaggtcaatctccctacacgagcgccccgccgctgtcccacacccccaatgccgacttccagcccccatacttccccccaccctaccagcctatctacccccagtcgcaagatccttactcccacgtcaacgacccctacagcctgaaccccctgcacgcccagccgcagccgcagcacccaggctggcccggccagaggcagagccaggagtctgggctcctgcacacgcaccgggggctgcctcaccagctgtcgggcctggatcctcgcagggactacaggcggcacgaggacctcctgcacggcccacacgcgctcagctcaggactcggagacctctcgatccactccttacctcacgccatcgaggaggtcccgcatgtagaagacccgggtattaacatcccagatcaaactgtaattaagaaaggccccgtgtccctgtccaagtccaacagcaatgccgtctccgccatccctattaacaaggacaacctcttcggcggcgtggtgaaccccaacgaagtcttctgttcagttccgggtcgcctctcgctcctcagctccacctcgaagtacaaggtcacggtggcggaagtgcagcggcggctctcaccacccgagtgtctcaacgcgtcgctgctgggcggagtgctccggagggcgaagtctaaaaatggaggaagatctttaagagaaaaactggacaaaataggattaaatctgcctgcagggagacgtaaagctgccaacgttaccctgctcacatcactagtagagggagaagctgtccacctagccagggactttgggtacgtgtgcgaaaccgaatttcctgccaaagcagtagctgaatttctcaaccgacaacattccgatcccaatgagcaagtgacaagaaaaaacatgctcctggctacaaaacagatatgcaaagagttcaccgacctgctggctcaggaccgatctcccctggggaactcacggcccaaccccatcctggagcccggcatccagagctgcttgacccacttcaacctcatctcccacggcttcggcagccccgcggtgtgtgccgcggtcacggccctgcagaactatctcaccgaggccctcaaggccatggacaaaatgtacctcagcaacaaccccaacagccacacggacaacaacgccaaaagcagtgacaaagaggagaagcacagaaagtgaggctctcctcccgccccgcccctcccacgcctcaccagccccccgcgcgcccaccctccggcgggtgacagctccgggatcagcaacccttcctgctgctgctactgctgctgctgctgccgccgccgccgccgccgctgcccttgggtccccccgagtctccgggactgccctctcgactgtcagtggggcagcctctccgactctgcacccgcctcgacctccccacccgctcccacacccctgtgccctcatgtggagcctaagagaacagaacaggccgtgaagccagcagagaaaagttctgccaagtttgtgaacccttttttttttaaacaaaacaacaaatcaacaacagcaacaacaacaacaaaaattaaaaacttttttctaaaaaaaaagtg

SEQ ID NO: 136406 - protein, 460 aa, Artificial Sequence
  derived and/or modified sequence
MHSPPRDQAAIMLWKLVENVKYEDIYEDRHDGVPSHSSRLSQLGSVSQGPYSSAPPLSHTPSSDFQPPYFPPPYQPLPYHQSQDPYSHVNDPYSLNPLHQPQQHPWGQRQRQEVGSEAGSLLPQPRAALPQLSGLDPRRDYHSVRRPDVLLHSAHHGLDAGMGDSLSLHGLGHPGMEDVQSVEDANNSGMNLLDQSVIKKVPVPPKSVTSLMMNKDGFLGGMSVNTGEVFCSVPGRLSLLSSTSKYKVTVGEVQRRLSPPECLNASLLGGVLRRAKSKNGGRSLRERLEKIGLNLPAGRRKAANVTLLTSLVEGEAVHLARDFGYICETEFPAKAVSEYLNRQHTDPSDLHSRKNMLLATKQLCKEFTDLLAQDRTPIGNSRPSPILEPGIQSCLTHFSLITHGFGAPAICAALTALQNYLTEALKGMDKMFLNNTTTNRHTSGEGPGSKTGDKEEKHRK

SEQ ID NO: 136407 - DNA, 5770 bp, Artificial Sequence
  derived and/or modified sequence
ttctctttgctgaggcttacttgtccagcctattgtttgagacaacagatataagttgcgatgggagaggagcgtcggatttggtgtgtatcccccatttccaattatagatggatcattacagacagcggagtcctgagaagccagacatctgctcctcacatgaatgcactcacctcctagagaccaggctgccatcatgctctggaagcttgtggagaatgtcaagtacgaagatatctatgaggaccggcacgatggtgtcccgagccacagctcgcggctctcccagctgggctcggtgtcccaaggaccctactcgagcgccccgccgctgtcccacaccccgtcgtcggacttccagccgccctacttcccacccccctaccagccgctcccctaccaccagagccaggacccctactcccacgtcaacgacccctactccctgaacccactgcaccagccccagcaacatccctgggggcaacggcagcggcaagaagtgggttcggaagccggctctctcctgccccagcctcgggccgccttgccccagctctcgggccttgacccccggagggactaccactcggtccgccggccggacgtgctgctgcattcggcgcaccacggcctggacgcgggcatgggtgacagcctctcgctgcacggcctcggccatcccggaatggaagacgtccagtcagttgaagatgccaataacagcggcatgaatctattggaccagtctgtcattaaaaaagttccagttcctcccaaatcggtgacttctctaatgatgaataaagacggcttcctgggaggcatgtctgtcaacaccggcgaggtgttttgctccgtcccaggccgtttgtctctgctcagttcaacttcgaagtacaaagtaactgtgggagaagttcagagacggctgtcgccccctgaatgcctcaatgcatctctcctcggcggagtcctcagaagagccaaatcgaaaaatggggggagatctttgcgagaaaggctagaaaaaatcggtttgaatttacccgcgggcaggcgcaaagcagcaaatgtcacgttactcacctccctggtggaaggagaagctgttcacttagctagggattttgggtacatttgcgaaacggagtttcccgccaaagccgtctctgagtatttgaaccggcagcacacagacccgagtgacctgcactcccgaaagaatatgctgttggccaccaagcaactttgtaaagaatttacggatctactggcgcaggaccggacaccgatagggaacagccgacccagccccatcctggagccggggatccagagctgcctcacgcacttcagcctcatcacgcacggcttcggcgccccggccatttgcgccgcgctcacggccctgcagaactatctcaccgaggcgctcaaaggcatggacaagatgttcttgaacaacaccaccactaacaggcacacgtctggggaaggcccaggtagtaaaactggcgacaaggaggagaaacacaggaaatgaaaaatttttaaaaaaagaaggaaaaatgttttaaatacaaaaggaaaaacagacaaaaatttaattttagctttaaaatattggattggctttggaagaattatattaggtagaatacacatacaatcaaaattttaaaaaaaaaagctaaataacttaaaaaaaaactgaggcgtacaacggagcaacaatatcggttctcagtgtctatttcaagatacatttggagacaaccgtccggattttccacttcggttctttcgagtttagtaatactgataataaaagaaaaccatgatttccccttccctttggaaaataaacataagactaaacatgagaaaaacgctaacttattggaagaaaatcggagaaacgttggtgtcaatgctttgagagctggttgactgagacgcacgaactttttaattttaaatatatttttaggaaactctcgcagtccccgccctccatctcacctcacccgtctcccaaccacccttttccatgttaccctcccttcctcacattgttacgggaatcttctgggatgaaaatgagtgtggttggcccttttgcgttgtttcagtcctctcggtacctccccgcccagccctgcgatcttaactcaccgggcccggctccccggccgcttgcataattagggagggcgagggcggggcgggaggcctgtggagaccaggcggaggctgcaatttttggtgccggccggcagagcaggttctggcggctgaggaaaatccggaccaataagttgattcaaacatcatcagttcctttcagaaatgttactagctcccagccttgccagcatctgcatagagagaatctcacatttattatatttgtgtcatctactaattttatgaactatagtaaaaaaaaaaaaacacacacacacacaatatgaatacgttgattagtatgtaattccttcggaggggtatgtaccatttcattctcttctgttttccaaagctttgcccgcatggtttatgagcttcttcaaagaggacttgggcttcctacacaatctataaggtacagagaaaaaaaaatccgatccctttttaatcaaagcctgtgtgtcagaattctgcaggtgcacttctttaaagaagctcaaagggaataatttagaaagtggccaatatgatggaagcagctttgaatctacatgctaacattcctcaacactccaattccggtggaggtggcaggggagggggtctgcaaaatgaattttaagggaaaagagtaaggattcttagagccctatattctaatagtattgccctgcatttaaaattgatttgatttccctgggttctttggtgattgctgtttaagcaaggaaagaagcagctttacgagtggacgtggggaggagggcggcacaagcacccacatttctgtaacaattgctttcttacaagatgctttatgaatgaggcatttttccctcccagacgtgcacttgttttggcatataatggcaaaataatgcaaagtgaagggagatgtatttcagctttgatttttaccgtctggatacatcgggactattcccagtggataaagtttcatgcatttaatatttctcacttctggcagcccagctcctttcttgggctccatcttagcattatcatgaaataagatctggaatccattgtctgcacctccgcaaaagcagtgagaaattatcccgggataagggtgaatgagagaggtctctaaatatagtgttgatacactcacctatttaacaaagtagacgagatctttgcaataccccttaaagataacgacatagatgttgttctgcaggatttatagttaggacccactcaattctccaggactcccggttttgcccccctcccgctttgccttggtgggggtggggattgggggagtggggattgcgttggggttttaggaatctgctgagagctttgcccatttttattaaaagaggaaagggaagttaggaagctcgtctcaggtcaccaaaagggcccaagcaactgttagggccacactgcagcccatctccaacccctagcttcgtttagcacttctgatcttcatggcccagccctagaactgttgagaggaatgcaatggccaagagctagacgttacggagagtgtagtcactctcttttcccagctcagaggcctgcgccttcgtccgagagctcggccgatcgcattagatgtgttctgattgcacaaggccaggagagaccacactgaaaacgatcgtctcctttccttgcagggcaacgcgccccacgcgtgtgacgtgcgagagacgcgatggacgcgccttgctcttactgtgcaggtcctgagagcgtgtgggccacaggcgcccagtcgtgttgaggacatagaatcagccgctggaggggctgccgactgcgcgggcccttcccgctctcggtctcaccctaagggctaaggcgaccgagaaagccccattctccagtaggtaatggggcggcgcccggtgggctgcaggtggggagggctcccagcgccgccagcggccacccggggcgccggctcctggagggagagtggcctagaaatatccaaggaatccgaagcttcccctcctccacctctgccagtacggaaacaccccaccgtcacaatcctaaagcggggagatgggatgggaattgtcttacttggcaaggcagggtaccttcattgccagacgccctcatttgtgtgttcctccttgctccagcgagatagaaccttttgcgcccccaaccccgtttcgtggagtgagcccactaccccttctccctccctcacttctcctttcatgtaggacccccgcccccttgctttccttagccaggcccgctacatttatctgataattgagttattaaaagatttggtttccttgggcctataaatcaataaacagtaggattaacgcaatagtttgccttttaagtcaagggagacgtttaaggcaagcccctttgagctttgttttcaaaccaaacaggtgagttgcagctctccccccggcccctgcactcttcagacatttggtccctgcccactcctaaacgctcagtcccaaaacaaaatagcgaaagacaggaggagtcaggatgtggcagtgctgccttcacactttccacttcgcaagttcttttaaaggttccaaagatctccagaccattctctgccaaaccctgccgcctcctgcacgtattgcaggtctctggggagcaagaaatgtcctgtttgggtgaggattccgtcacctaaaaagatctttaacttctcccccaaagtgggaaggtaactttctcccccttttccccaccaccttcactcctacacccccaattaccttgcattttctttccttccttctggcctccacacccatagctttcctccatccccacttaaagaaccgaagaggcttttaaagacctggctgctttgttttccttggccaaggaagccactttctctcaagcaattatttcatatcctacgaaaactttggtcgaatggaaaactcgaaacctcgagcttatctacacactgttcctctgctacaatgctttcctagttaagagtgtttatagagaatttgtcatcacatctgatatcctgtacttgtaatacattatgtggaaaggaaataaccttaaaccgtctgatgttgcctcaagagcccaaacggcgtttccccacctttgacgatgtatgtgaaattactggcttaaaaaaaaaagtatcaatttttttttaacggaatgaacactatccttctttaaatgccaaaatcgactccacctttgagttggtctctaattctctaacattgtttttgccacacaatcaagaaatatcaatctattgactcttcacgagaagagctctggagggtattcatgttaagtttgtatatatttatttatgcttaatttaatgggaatgtgtaaatatggcgagcaagtagtttgggattatttatctgtgaatctatacctctgtgaatgggtggttaaaaaacctcttgaccctagatagaatcctatctgaatttttctgttctttataaacaagctgttatggtaatgggtagaaattggtttattgtccagtgttaatctgatttacataaataaaaagattgttgtgttttca

SEQ ID NO: 136408 - DNA, 1383 bp, Artificial Sequence
  derived and/or modified sequence
atgcacagcccccccagagaccaggccgccatcatgctgtggaagctggtggagaacgtgaagtacgaggacatctacgaggacagacacgacggcgtgcccagccacagcagcagactgagccagctgggcagcgtgagccagggcccctacagcagcgccccccccctgagccacacccccagcagcgacttccagcccccctacttcccccccccctaccagcccctgccctaccaccagagccaggacccctacagccacgtgaacgacccctacagcctgaaccccctgcaccagccccagcagcacccctggggccagagacagagacaggaggtgggcagcgaggccggcagcctgctgccccagcccagagccgccctgccccagctgagcggcctggaccccagaagagactaccacagcgtgagaagacccgacgtgctgctgcacagcgcccaccacggcctggacgccggcatgggcgacagcctgagcctgcacggcctgggccaccccggcatggaggacgtgcagagcgtggaggacgccaacaacagcggcatgaacctgctggaccagagcgtgatcaagaaggtgcccgtgccccccaagagcgtgaccagcctgatgatgaacaaggacggcttcctgggcggcatgagcgtgaacaccggcgaggtgttctgcagcgtgcccggcagactgagcctgctgagcagcaccagcaagtacaaggtgaccgtgggcgaggtgcagagaagactgagcccccccgagtgcctgaacgccagcctgctgggcggcgtgctgagaagagccaagagcaagaacggcggcagaagcctgagagagagactggagaagatcggcctgaacctgcccgccggcagaagaaaggccgccaacgtgaccctgctgaccagcctggtggagggcgaggccgtgcacctggccagagacttcggctacatctgcgagaccgagttccccgccaaggccgtgagcgagtacctgaacagacagcacaccgaccccagcgacctgcacagcagaaagaacatgctgctggccaccaagcagctgtgcaaggagttcaccgacctgctggcccaggacagaacccccatcggcaacagcagacccagccccatcctggagcccggcatccagagctgcctgacccacttcagcctgatcacccacggcttcggcgcccccgccatctgcgccgccctgaccgccctgcagaactacctgaccgaggccctgaagggcatggacaagatgttcctgaacaacaccaccaccaacagacacaccagcggcgagggccccggcagcaagaccggcgacaaggaggagaagcacagaaagtag

SEQ ID NO: 136409 - DNA, 1383 bp, Artificial Sequence
  derived and/or modified sequence
atgcatagcccaccccgtgaccaggcagcaatcatgctctggaaacttgtggagaacgtgaagtacgaggacatttatgaggatcggcacgatggcgtcccttcacacagctccagactaagccagctcggatccgtgagccaaggcccctatagtagtgctcctccactgagccacacacctagctccgactttcagcctccttattttccgccgccctaccagccactgccataccatcagagccaggatccatattcacatgtcaatgacccctactccctgaacccactacatcagccccagcaacacccctgggggcaaaggcagcggcaggaggttggctcggaagcaggatccctgctgccccaacctcgggctgccctgccgcaactttccgggcttgatcctcggagagattaccactccgtgaggcgccccgatgtgctgctgcattctgcccaccatgggctcgatgccggaatgggagattcccttagcttgcatggcctaggacacccaggcatggaggatgtgcagtccgttgaggacgccaataactcaggtatgaacctgctggatcagagcgtgatcaaaaaagtgcctgtcccgcctaagtcagttaccagcctgatgatgaacaaggatgggtttctgggaggcatgtcagttaacaccggtgaggtcttctgctccgtgcctggacggctgagcctgctgtcttcgacgtcaaagtacaaggtaacagtgggtgaggtccagcgtcggctgagtccacctgagtgtcttaatgcttctctcctgggcggagtcttgcgccgggctaagagcaagaatggggggcggtctctcagagaaaggctcgaaaaaatcggtctgaatctccccgcaggcagacgcaaagctgcaaatgtcaccttactgaccagtttagtggaaggcgaggcagtacacctggcaagggattttggttatatctgtgaaacagaatttcctgcgaaggccgtcagcgaataccttaacaggcagcacacagatccttccgatctgcattccagaaagaatatgctccttgcaactaaacaactgtgtaaggagttcacagatctgctggcccaggataggacgccgatcggcaatagtcggccctcccctatcctggagccgggcatacaaagttgtcttacacatttttctctgattacccacggctttggcgctcctgccatttgcgccgcgctgaccgccttgcagaactacctgacagaagccctgaaagggatggataaaatgttcctgaacaacactacgaccaacagacacactagcggggaaggtccaggtagtaagactggagacaaagaggagaagcacagaaagtag

SEQ ID NO: 136410 - DNA, 1383 bp, Artificial Sequence
  derived and/or modified sequence
atgcacagccccccccgggaccaggccgccatcatgctgtggaagctggtggagaatgtgaagtatgaggacatctatgaagatagacatgatggagtgcccagccacagcagccggctgagccagctgggctctgtgtcccagggcccctacagcagcgccccacccctgagccacacccccagcagtgacttccagcccccctacttccccccaccctaccagcccctgccctaccaccagagccaggacccctacagccacgtgaatgacccctacagcctgaaccccctgcaccagccccagcagcacccctggggccagaggcagaggcaggaggtgggcagcgaggccggcagcctgctgccccagcccagggctgccctgccccagctgagcggcctggacccccggcgggactaccacagcgtgagaagaccagatgtgctgctgcacagcgcccaccacggcctggatgctggcatgggagacagcctgagcctgcacggcctgggccaccctggcatggaggatgtgcagagcgtggaggatgccaacaacagcggcatgaacctgctggaccagagcgtcatcaagaaggtgcctgtgccccccaagtctgtgaccagcctgatgatgaacaaggatggcttcctgggcggcatgtctgtgaacacaggagaggtgttctgcagcgtgcccggccgcctgagcctgctgagcagcaccagcaagtacaaggtgacagtgggggaggtgcagaggcggctgagccccccagaatgtctgaatgccagcctgctgggcggcgtgctgcggcgggccaagagcaagaatggaggccgcagcctgcgggagcggctggagaagattggcctgaacctgcctgctggaagaaggaaggccgccaacgtgaccctgctgaccagcctggtggagggggaggccgtgcacctggcccgggactttggctacatctgtgaaacagagttccctgccaaggctgtgtctgagtacctgaaccggcagcacacagaccccagcgacctgcacagcaggaagaacatgctgctggccaccaagcagctgtgcaaggagttcacagacctgctggcccaggacaggacccccatcggcaacagccggcccagccccatcctggagcccggcatccagagctgcctgacccacttcagcctcatcacccacggctttggagccccagccatctgtgccgccctgacagccctgcagaactacctgacagaggccctgaagggcatggacaagatgttcctgaacaacaccaccaccaacagacacaccagcggggagggccctggcagcaagacaggagacaaggaggagaagcacaggaagtag

SEQ ID NO: 136411 - DNA, 1383 bp, Artificial Sequence
  derived and/or modified sequence
atgcacagccccccccgggaccaggccgccatcatgctgtggaagctagtggagaatgtaaaatacgaggatatctatgaagaccggcatgacggagtgccaagtcacagcagccgactttcccagctgggaagcgtttcccaggggccttatagtagcgcaccaccactatctcacacaccctccagcgatttccagccaccatactttccaccaccttaccagccgctcccctatcatcagtcacaggacccctattcccatgtgaatgacccttattcgctgaaccccctccatcagcctcaacagcacccctggggacaaagacagagacaggaagtgggctcagaggctggctcactgctgccacagccccgcgccgcactgccccagttgagcgggcttgatccaaggagagattatcacagcgtgcgaaggcccgatgttctgctgcacagtgcccaccatggtttggatgccggcatgggggactctttgtccttacacgggctcggacatccaggaatggaagatgtgcaaagcgtggaagacgccaacaactcaggtatgaacttgttggatcagtcggttatcaagaaggtgcccgtaccaccaaagtctgtaaccagcttgatgatgaataaagacggatttctcggtggaatgtccgtcaacactggggaagtgttctgttccgtgcctggccgcttgtcactgctgtcatcaacatcgaaatacaaagtcacagtgggggaagtccagcgccggctatccccgcctgagtgtttgaatgcctcacttctcgggggagtattgagaagagccaaatctaagaatggaggcagatctttacgcgagcgcctggagaagatcgggttaaacttgcctgctggcagacgaaaagcagccaatgtgaccctcttaacatcactcgtggaaggagaagctgtccacctcgctcgcgacttcgggtacatatgtgaaacagagtttcctgctaaggcggtgtctgaatacctcaatagacaacacaccgacccaagtgacctccatagccgaaagaatatgctgttagcgactaaacaactgtgcaaggagttcacagatttattagcccaagacagaacccctatcggcaatagcagaccaagcccaattttggaaccggggatccaatcctgtcttactcatttcagtctgattacgcacggattcggcgcccctgcaatttgtgccgccctgacagcacttcaaaactatttgaccgaagccctcaagggtatggacaagatgttcctgaataacactaccactaaccggcacacatctggcgagggccctggaagcaaaactggggacaaggaagagaaacacaggaagtag

SEQ ID NO: 136412 - DNA, 1383 bp, Artificial Sequence
  derived and/or modified sequence
atgcatagccctcccagagaccaagcagccatcatgctgtggaagctggtagaaaatgtcaagtacgaagatatttacgaggatcggcatgacggcgtgccgtcccattcctcgagactctctcagttgggttctgtgagccaaggtccatacagcagtgcccctccactctcccacacccccagcagtgacttccaacccccttacttccccccaccctatcagccactgccttatcaccagtcacaggatccttatagccacgttaatgatccctatagtctgaaccccctgcaccagccccagcagcatccgtgggggcagcgccaacggcaagaagtggggtcggaagccggtagcttgctccctcagccccgagctgctctacctcagctcagtggccttgaccctcgccgagactatcattctgtgaggagacccgatgtcctccttcacagcgcccaccacgggcttgatgccggaatgggcgattccttgtcattgcacggcctcgggcaccctggaatggaggatgtgcagagcgtggaagacgcaaacaacagcgggatgaatctgctggatcagtccgtcattaagaaggtgcctgtgccaccaaagtctgtgacaagtctgatgatgaataaagatggctttctgggaggcatgtctgttaataccggcgaagtgttctgcagcgttccaggaagattgtccctcttgtcttctacatcaaagtataaggtgactgtgggcgaggttcagcgtcggttgtcacccccagagtgcttgaacgcttcacttctgggaggggtgctaagacgggctaagagtaagaacggagggagatcattaagggaacgcttggaaaaaattgggctgaacctgccagcaggacgcagaaaagccgctaacgtgaccctgctgactagtctagttgagggggaggccgtgcatttggcaagggattttggatatatctgcgagacagaatttccagctaaggcagttagtgaatatctgaaccggcaacacaccgacccatccgacctccacagccgaaagaatatgttgctggccactaagcagctgtgtaaagaattcaccgacctgctcgcgcaggaccgcacccccatcggtaattctcggccttccccgattcttgaaccgggtatccagtcctgcctgacccacttctccctgatcacccacggcttcggggctccagccatatgcgccgctttgaccgcgctccagaactacctgacggaggccctaaagggtatggataaaatgtttctgaacaacactacaaccaaccggcatacctcaggagaagggccaggcagtaagacaggggacaaggaggagaaacaccggaaatag

SEQ ID NO: 136413 - DNA, 1898 bp, Artificial Sequence
  derived and/or modified sequence
tttttctctttgctgaggcttacttgtccagcctattgtttgagacaacagatataagttgcgatgggagaggagcgtcggatttggtgtgtatcccccatttccaattatagatggatcattacagacagcggagtcctgagaagccagacatctgctcctcacatgaatgcactcacctcctagagaccaggctgccatcatgctctggaagcttgtggagaatgtcaagtacgaagatatctatgaggaccggcacgatggtgtcccgagccacagctcgcggctctcccagctgggctcggtgtcccaaggaccctactcgagcgccccgccgctgtcccacaccccgtcgtcggacttccagccgccctacttcccacccccctaccagccgctcccctaccaccagagccaggacccctactcccacgtcaacgacccctactccctgaacccactgcaccagccccagcaacatccctgggggcaacggcagcggcaagaagtgggttcggaagccggctctctcctgccccagcctcgggccgccttgccccagctctcgggccttgacccccggagggactaccactcggtccgccggccggacgtgctgctgcattcggcgcaccacggcctggacgcgggcatgggtgacagcctctcgctgcacggcctcggccatcccggaatggaagacgtccagtcagttgaagatgccaataacagcggcatgaatctattggaccagtctgtcattaaaaaagttccagttcctcccaaatcggtgacttctctaatgatgaataaagacggcttcctgggaggcatgtctgtcaacaccggcgaggtgttttgctccgtcccaggccgtttgtctctgctcagttcaacttcgaagtacaaagtaactgtgggagaagttcagagacggctgtcgccccctgaatgcctcaatgcatctctcctcggcggagtcctcagaagagccaaatcgaaaaatggggggagatctttgcgagaaaggctagaaaaaatcggtttgaatttacccgcgggcaggcgcaaagcagcaaatgtcacgttactcacctccctggtggaaggagaagctgttcacttagctagggattttgggtacatttgcgaaacggagtttcccgccaaagccgtctctgagtatttgaaccggcagcacacagacccgagtgacctgcactcccgaaagaatatgctgttggccaccaagcaactttgtaaagaatttacggatctactggcgcaggaccggacaccgatagggaacagccgacccagccccatcctggagccggggatccagagctgcctcacgcacttcagcctcatcacgcacggcttcggcgccccggccatttgcgccgcgctcacggccctgcagaactatctcaccgaggcgctcaaaggcatggacaagatgttcttgaacaacaccaccactaacaggcacacgtctggggaaggcccaggtagtaaaactggcgacaaggaggagaaacacaggaaatgaaaaatttttaaaaaaagaaggaaaaatgttttaaatacaaaaggaaaaacagacaaaaatttaattttagctttaaaatattggattggctttggaagaattatattaggtagaatacacatacaatcaaaattttaaaaaaaaaagctaaataacttaaaaaaaaactgaggcgtacaacggagcaacaatatcggttctcagtgtctatttcaagatacatttggagacaaccgtccggattttccacttcggttctttcgagtttagtaatactgataataaaagaaaaccatgatttccccttccctttggaaaataaacataagactaaacatgagaaaaa

SEQ ID NO: 136414 - protein, 450 aa, Artificial Sequence
  derived and/or modified sequence
MLWKITDNVKYEEDCEDRHDGSSNGNPRVPHLSSAGQHLYSPAPPLSHTGVAEYQPPPYFPPPYQQLAYSQSADPYSHLGEAYAAAINPLHQPAPTGSQQQAWPGRQSQEGAGLPSHHGRPAGLLPHLSGLEAGAVSARRDAYRRSDLLLPHAHALDAAGLAENLGLHDMPHQMDEVQNVDDQHLLLHDQTVIRKGPISMTKNPLNLPCQKELVGAVMNPTEVFCSVPGRLSLLSSTSKYKVTVAEVQRRLSPPECLNASLLGGVLRRAKSKNGGRSLREKLDKIGLNLPAGRRKAAHVTLLTSLVEGEAVHLARDFAYVCEAEFPSKPVAEYLTRPHLGGRNEMAARKNMLLAAQQLCKEFTELLSQDRTPHGTSRLAPVLETNIQNCLSHFSLITHGFGSQAICAAVSALQNYIKEALIVIDKSYMNPGDQSPADSNKTLEKMEKHRK

SEQ ID NO: 136415 - protein, 118 aa, Artificial Sequence
  derived and/or modified sequence
MFLQDRHDGSSNGNPRVPHLSSAGQHLYSPAPPLSHTGVAEYQPPPYFPPPYQQLAYSQSADPYSHLGEAYAAAINPLHQPAPTGSQQQAWPGRQSQEGAGLPSHHGRPAGLLPHLSG

SEQ ID NO: 136416 - protein, 281 aa, Artificial Sequence
  derived and/or modified sequence
MPHQMDEVQNVDDQHLLLHDQTVIRKGPISMTKNPLNLPCQKELVGAVMNPTEVFCSVPGRLSLLSSTSKYKVTVAEVQRRLSPPECLNASLLGGVLRRAKSKNGGRSLREKLDKIGLNLPAGRRKAAHVTLLTSLVEGEAVHLARDFAYVCEAEFPSKPVAEYLTRPHLGGRNEMAARKNMLLAAQQLCKEFTELLSQDRTPHGTSRLAPVLETNIQNCLSHFSLITHGFGSQAICAAVSALQNYIKEALIVIDKSYMNPGDQSPADSNKTLEKMEKHRK

SEQ ID NO: 136417 - DNA, 2895 bp, Artificial Sequence
  derived and/or modified sequence
cgccaggacacactgttcgggcgcggctttccccgtccgcggagcggtcttgacactcgcggcggcagcatctacgctcgcagagccgccgatgcgtgtccagtgacccggacagcaaggcccgcgcgcggcgggggcggcggcagacgcctggtcaccgtgaccccgattttggatttaccgcttgggggctggggggatcctggatttaactggcgactgttttgggggacgccggacgccatgttgtggaaaataaccgataatgtcaagtacgaagaggactgcgaggatcgccacgacgggagcagcaatgggaatccgcgggtcccccacctctcctccgccgggcagcacctctacagccccgcgccacccctctcccacactggagtcgccgaatatcagccgccaccctactttccccctccctaccagcagctggcctactcccagtcggccgacccctactcgcatctgggggaagcgtacgccgccgccatcaaccccctgcaccagccggcgcccacaggcagccagcagcaggcctggcccggccgccagagccaggagggagcggggctgccctcgcaccacgggcgcccggccggcctactgccccacctctccgggctggaggcgggcgcggtgagcgcccgcagggatgcctaccgccgctccgacctgctgctgccccacgcacacgccctggatgccgcgggcctggccgagaacctggggctccacgacatgcctcaccagatggacgaggtgcagaatgtcgacgaccagcacctgttgctgcacgatcagacagtcattcgcaaaggtcccatttccatgaccaagaaccctctgaacctcccctgtcagaaggagctggtgggggccgtaatgaaccccactgaggtcttctgctcagtccctggaagattgtcgctcctcagctctacgtctaaatacaaagtgacagtggctgaagtacagaggcgactgtccccacctgaatgcttaaatgcctcgttactgggaggtgttctcagaagagccaaatcgaaaaatggaggccggtccttgcgggagaagttggacaagattgggttgaatcttccggccgggaggcggaaagccgctcatgtgactctcctgacatccttagtagaaggtgaagctgttcatttggctagggactttgcctatgtctgtgaagccgaatttcctagtaaaccagtggcagaatatttaaccagacctcatcttggaggacgaaatgagatggcagctaggaagaacatgctattggcggcccagcaactgtgtaaagaattcacagaacttctcagccaagaccggacaccccatgggaccagcaggctcgccccagtcttggagacgaacatacagaactgcttgtctcatttcagcctgattacccacgggtttggcagccaggccatctgtgccgcggtgtctgccctgcagaactacatcaaagaagccctgattgtcatagacaaatcctacatgaaccctggagaccagagtccagctgattctaacaaaaccctggagaaaatggagaaacacaggaaataaaattggaacgaagaaaggttaggagagtagggaaggaacaggactgcaaaaatccttctccaccgcacagactgggaacccctcctggcctgggggaagagtttgttacctaccttactatttaaagagccttcactggttctgcatcacccgcccctggacttcttagttgtttctctagcgctgagctatctcctaactttggacctattatcagaaggtgacaagtactggctctttattcattaagctttttttttttgaaccccattctttccttctctgaaagtggtgctataagttttagaatcttttaaatacattccctgggccaacagacccacacacttagccattgaaatgtcaaattgatgtgccctagatcaacagatcaacaataccttttttttcagtgttaaggtaatggttggtttttgtgtccgctaaatatttaccttgaaaaaaagaaaagtgtgtatctagcttcttcagagatcaagtcctctggtaggaggcaaaggttctatctgcttagcaactagttaataagtggtatctgacacactctaaaccccgtgttcaaacgggggccttctggttttaggaaacttgtagaaacgaagcctgctgattgatttttttctcctttttttttttttttttttttaactttgaaagttaactcttcaaatgggagactctttgaaatgacatgttcctttaaggtactgaagctttatttgcatatttatttcagatgtttcgagtaaacttgaaaagggtaggcacgaagcaatttgttgctgcttgtcacccccaagtccccgtggaggttctgtattttaagaaacagtgcgttgagtgtacagattttatttatgcgtaatttaatggggtctgtaaatactggtgcacttcttacgacttttttgagacatgggatccaattttaatattaacttttaatggtgatggggtaatctataacacatcataaggttttattcatatatatacagggtattaagaattaagaggatgctgggctctgttcttggcttggaagattctatttaattgaaactctctgttcagaaagcaataactttgtctcgttcctgttgggctgaaccctaaggtgagtgtgcagtacagtgtgtgtgggtgaaatggagatttggaattgaactctctgcctgtaaatgttccccaaataattgttgtgtgtatgatacgtgtataataaaagtattcttgttagaatctgaaaaaaaaaaaaaaaaaaaaaaaaaaaaaaaa

SEQ ID NO: 136418 - DNA, 1353 bp, Artificial Sequence
  derived and/or modified sequence
atgctgtggaagatcaccgacaacgtgaagtacgaggaggactgcgaggacagacacgacggcagcagcaacggcaaccccagagtgccccacctgagcagcgccggccagcacctgtacagccccgccccccccctgagccacaccggcgtggccgagtaccagccccccccctacttcccccccccctaccagcagctggcctacagccagagcgccgacccctacagccacctgggcgaggcctacgccgccgccatcaaccccctgcaccagcccgcccccaccggcagccagcagcaggcctggcccggcagacagagccaggagggcgccggcctgcccagccaccacggcagacccgccggcctgctgccccacctgagcggcctggaggccggcgccgtgagcgccagaagagacgcctacagaagaagcgacctgctgctgccccacgcccacgccctggacgccgccggcctggccgagaacctgggcctgcacgacatgccccaccagatggacgaggtgcagaacgtggacgaccagcacctgctgctgcacgaccagaccgtgatcagaaagggccccatcagcatgaccaagaaccccctgaacctgccctgccagaaggagctggtgggcgccgtgatgaaccccaccgaggtgttctgcagcgtgcccggcagactgagcctgctgagcagcaccagcaagtacaaggtgaccgtggccgaggtgcagagaagactgagcccccccgagtgcctgaacgccagcctgctgggcggcgtgctgagaagagccaagagcaagaacggcggcagaagcctgagagagaagctggacaagatcggcctgaacctgcccgccggcagaagaaaggccgcccacgtgaccctgctgaccagcctggtggagggcgaggccgtgcacctggccagagacttcgcctacgtgtgcgaggccgagttccccagcaagcccgtggccgagtacctgaccagaccccacctgggcggcagaaacgagatggccgccagaaagaacatgctgctggccgcccagcagctgtgcaaggagttcaccgagctgctgagccaggacagaaccccccacggcaccagcagactggcccccgtgctggagaccaacatccagaactgcctgagccacttcagcctgatcacccacggcttcggcagccaggccatctgcgccgccgtgagcgccctgcagaactacatcaaggaggccctgatcgtgatcgacaagagctacatgaaccccggcgaccagagccccgccgacagcaacaagaccctggagaagatggagaagcacagaaagtag

SEQ ID NO: 136419 - DNA, 357 bp, Artificial Sequence
  derived and/or modified sequence
atgttcctgcaggacagacacgacggcagcagcaacggcaaccccagagtgccccacctgagcagcgccggccagcacctgtacagccccgccccccccctgagccacaccggcgtggccgagtaccagccccccccctacttcccccccccctaccagcagctggcctacagccagagcgccgacccctacagccacctgggcgaggcctacgccgccgccatcaaccccctgcaccagcccgcccccaccggcagccagcagcaggcctggcccggcagacagagccaggagggcgccggcctgcccagccaccacggcagacccgccggcctgctgccccacctgagcggctag

SEQ ID NO: 136420 - DNA, 846 bp, Artificial Sequence
  derived and/or modified sequence
atgccccaccagatggacgaggtgcagaacgtggacgaccagcacctgctgctgcacgaccagaccgtgatcagaaagggccccatcagcatgaccaagaaccccctgaacctgccctgccagaaggagctggtgggcgccgtgatgaaccccaccgaggtgttctgcagcgtgcccggcagactgagcctgctgagcagcaccagcaagtacaaggtgaccgtggccgaggtgcagagaagactgagcccccccgagtgcctgaacgccagcctgctgggcggcgtgctgagaagagccaagagcaagaacggcggcagaagcctgagagagaagctggacaagatcggcctgaacctgcccgccggcagaagaaaggccgcccacgtgaccctgctgaccagcctggtggagggcgaggccgtgcacctggccagagacttcgcctacgtgtgcgaggccgagttccccagcaagcccgtggccgagtacctgaccagaccccacctgggcggcagaaacgagatggccgccagaaagaacatgctgctggccgcccagcagctgtgcaaggagttcaccgagctgctgagccaggacagaaccccccacggcaccagcagactggcccccgtgctggagaccaacatccagaactgcctgagccacttcagcctgatcacccacggcttcggcagccaggccatctgcgccgccgtgagcgccctgcagaactacatcaaggaggccctgatcgtgatcgacaagagctacatgaaccccggcgaccagagccccgccgacagcaacaagaccctggagaagatggagaagcacagaaagtag

SEQ ID NO: 136421 - DNA, 1353 bp, Artificial Sequence
  derived and/or modified sequence
atgttatggaagattactgacaacgttaagtatgaagaagactgcgaggaccgtcacgatggatctagtaatggtaatccacgagtacctcatctttcatccgcaggtcagcatctgtattctcccgcgccacctctctctcatactggcgtcgctgaatatcaaccccctccttattttccccccccgtatcagcaactggcatattcacagtccgccgacccctactcccatcttggcgaggcttacgcagcggcaataaatcccctacaccaacctgcccccacaggcagtcagcagcaagcctggcccggtaggcagagccaggaaggggctgggctgccaagccatcacggccggcccgctgggcttctcccacacctgagtgggttggaggcaggagcggttagtgcaagaagagacgcctatagaagatctgacctgttactgccacatgcccacgctctagatgccgccgggctcgcggaaaacctcgggctgcacgatatgccccaccaaatggacgaggtgcagaatgttgacgaccagcacctcctgttgcacgatcagactgttatcagaaagggcccaattagcatgactaaaaacccattgaatctcccttgccaaaaggaattagtgggagctgttatgaaccccactgaggtgttctgcagcgtgcccgggagactgtcccttttgagttctacctcaaaatataaggtaacggtggccgaggtgcagcggaggctttcgccaccagaatgcctgaacgcctccctgctaggtggtgtcctgcgtcgcgccaaatccaagaatggtggaagaagtctgagggaaaaactggacaaaatcggtctgaacttacccgccggccgtcgaaaagcggcccatgtgacattgcttacttccctcgtggaaggagaggctgtgcacctcgctcgggactttgcatacgtttgcgaagcggaattccctagcaaacccgttgctgaatatctgaccaggcctcatctgggtggtcgtaatgagatggcagcaagaaagaatatgttgttagctgcccaacagctgtgcaaggaatttacagaactcctgtctcaggaccggacacctcacggaactagccggctggcaccagtcttggagactaatatccagaattgcctatcccactttagcctaataacccacgggtttgggagccaggcaatctgtgctgccgttagtgccctccagaactacatcaaagaggctcttattgttattgacaaatcttatatgaatcccggtgaccagagcccggccgacagcaacaagactcttgagaagatggaaaaacatcgcaagtag

SEQ ID NO: 136422 - DNA, 357 bp, Artificial Sequence
  derived and/or modified sequence
atgttcttacaagatcgccacgatgggtcttcaaacgggaaccctcgcgtaccccacctttcaagtgcagggcagcatctatactctccagctcctcctctgtcacatacaggggtggccgaataccaacctcccccttattttcctcctccgtaccagcagcttgcctacagtcagtcagctgatccttatagccacctgggtgaagcctacgcggccgctatcaacccactccatcagccagccccaaccggtagccaacaacaggcctggccaggtcggcaaagccaggaaggagccggcttgcctagtcaccacgggaggcctgctgggcttctgccgcatctgtcaggatag

SEQ ID NO: 136423 - DNA, 846 bp, Artificial Sequence
  derived and/or modified sequence
atgccccatcagatggatgaagtccaaaatgtcgacgaccagcatctgctgttgcatgaccagacggtgatccgcaaagggcctatcagcatgaccaagaatcctctgaacctgccctgtcagaaagaactggtgggcgccgttatgaatcctaccgaagtattctgctccgttcctgggcgactctctttactgtcgtccaccagtaaatacaaagttactgttgcagaagtgcaacggcgcttgtctccccctgaatgcctgaatgcatcgctgctgggaggcgttcttcgcagagccaagagtaaaaatgggggcagatcacttagggagaaactcgataagattgggctgaaccttccagctgggagacgaaaggctgcacacgtgactttgttgaccagcctagtggagggcgaggctgtccatctggcacgagattttgcttatgtgtgcgaggccgaattcccgtcaaagcccgtggccgagtacttaactcgcccccacctcggcgggcggaatgagatggctgcacggaaaaatatgcttctcgcagcccagcagctgtgtaaggagtttacggaacttctatcccaagacagaacgccgcatgggacgtctaggttagcccctgttctggaaactaacatccagaactgcttgagtcatttttcgctgataactcatggttttggctcacaggctatttgcgccgccgtgtcggctttacagaattatatcaaagaggccctgattgtgattgataaatcgtatatgaatcccggcgatcagtcacctgccgatagtaataagaccttagagaagatggagaagcacaggaagtag

SEQ ID NO: 136424 - DNA, 1353 bp, Artificial Sequence
  derived and/or modified sequence
atgctgtggaagatcacagacaacgtgaagtatgaggaggactgtgaggacagacatgatggcagcagcaatggaaacccccgggtgccccacctgagcagcgctggccagcacctgtacagccctgccccacccctgagccacactggagtggccgagtaccagcccccaccctacttccccccaccctaccagcagctggcctacagccagagcgctgacccctacagccacctgggggaggcctatgctgctgccatcaaccccctgcaccagcctgcccccaccggcagccagcagcaggcctggccaggccggcagagccaggagggcgccggcctgcccagccaccacggccggcctgctggcctgctgccccacctgagcggcctggaggccggggctgtgtctgccaggagagatgcctaccgccgcagtgacctgctgctgccccacgcccacgccctggatgctgctggcctggccgagaacctgggcctgcatgacatgccccaccagatggatgaggtgcagaatgtggatgaccagcacctgctgctgcatgaccagaccgtcatcaggaagggccccatctccatgaccaagaaccccctgaacctgccctgccagaaggagctggtgggcgctgtgatgaaccccacagaggtgttctgcagcgtgcccggccgcctgagcctgctgagcagcaccagcaagtacaaggtgacagtggccgaggtgcagaggcggctgagccccccagaatgtctgaatgccagcctgctgggcggcgtgctgcggcgggccaagagcaagaatggaggccgcagcctgcgggagaagctggacaagattggcctgaacctgcctgctggaagaaggaaggccgcccacgtgaccctgctgaccagcctggtggagggggaggccgtgcacctggcccgggactttgcctacgtgtgtgaggccgagttccccagcaagcctgtggccgagtacctgacccggccccacctgggcggcagaaatgagatggccgccaggaagaacatgctgctggccgcccagcagctgtgcaaggagttcacagagctgctgagccaggacaggacccctcatggcaccagccggctggcccctgtgctggagaccaacatccagaactgcctgagccacttcagcctcatcacccacggcttcggcagccaggccatctgtgccgctgtgtctgccctgcagaactacatcaaggaggccctgattgtgattgacaagagctacatgaaccctggggaccagagccctgctgacagcaacaagaccctggagaagatggagaagcacaggaagtag

SEQ ID NO: 136425 - DNA, 357 bp, Artificial Sequence
  derived and/or modified sequence
atgttcctgcaggacagacatgatggcagcagcaatggaaacccccgggtgccccacctgagcagcgctggccagcacctgtacagccctgccccacccctgagccacactggagtggccgagtaccagcccccaccctacttccccccaccctaccagcagctggcctacagccagagcgctgacccctacagccacctgggggaggcctatgctgctgccatcaaccccctgcaccagcctgcccccaccggcagccagcagcaggcctggccaggccggcagagccaggagggcgccggcctgcccagccaccacggccggcctgctggcctgctgccccacctgtctggatag

SEQ ID NO: 136426 - DNA, 846 bp, Artificial Sequence
  derived and/or modified sequence
atgccccaccagatggatgaggtgcagaatgtggatgaccagcacctgctgctgcatgaccagaccgtcatcaggaagggccccatctccatgaccaagaaccccctgaacctgccctgccagaaggagctggtgggcgctgtgatgaaccccacagaggtgttctgcagcgtgcccggccgcctgagcctgctgagcagcaccagcaagtacaaggtgacagtggccgaggtgcagaggcggctgagccccccagagtgcctgaatgccagcctgctgggcggcgtgctgcggcgggccaagagcaagaatggaggccgcagcctgcgggagaagctggacaagattggcctgaacctgcctgctggccgcaggaaggccgcccacgtgaccctgctgaccagcctggtggagggggaggccgtgcacctggcccgggactttgcctacgtgtgtgaggccgagttccccagcaagcctgtggccgagtacctgacccggccccacctgggcggcagaaatgagatggccgccaggaagaacatgctgctggccgcccagcagctgtgcaaggagttcacagagctgctgagccaggacaggaccccccacggcaccagccggctggcccctgtgctggagaccaacatccagaactgcctgagccacttcagcctcatcacccacggcttcggcagccaggccatctgtgccgctgtgtctgccctgcagaactacatcaaggaggccctgattgtcatcgacaagagctacatgaaccctggggaccagagccctgctgacagcaacaagaccctggagaagatggagaagcacaggaagtag

SEQ ID NO: 136427 - DNA, 1353 bp, Artificial Sequence
  derived and/or modified sequence
atgctgtggaagatcaccgacaacgtgaagtacgaggaggactgcgaggataggcatgatggatcctctaatggcaaccccagagtcccccacctgagttcggccggacagcacctttactcccctgccccaccattatctcatactggggtcgccgaatatcaaccaccaccctactttcctcccccgtatcagcagctggcttatagtcagtccgccgatccctactctcacctcggggaagcctacgcagccgcaatcaaccccctgcatcagcccgcaccaactggatcccagcagcaggcttggcccggtaggcagtctcaggaaggagccgggcttcctagccatcatgggcgccccgccggccttctcccacacctctccggactagaggctggagccgtatccgctcgtcgagacgcataccgacgttccgacctgctgttaccccacgcacatgcgttggatgctgcaggtctcgctgagaacctgggactccatgacatgccccaccagatggacgaagtgcagaatgtcgacgaccagcacctcttgttgcacgaccagaccgttatccgcaagggacctatttccatgacaaagaaccccttaaatcttccttgccagaaagaattggtcggagctgtcatgaatccaaccgaagttttctgtagcgtgcccggaagactgtctttgctgagctcgaccagcaagtataaagttacggtcgcagaagtgcagcggaggctctcaccgccggaatgcctgaacgcgagcctcttagggggggtattacgccgggctaagtccaagaatgggggaagatcgctgagagaaaagctggacaagattggcctcaacctccctgcaggcagacgcaaagctgctcacgttacacttctcacgagtctggtggaaggggaagcagtacaccttgcacgggacttcgcctatgtctgtgaagcggagttccccagcaagccagtggcagagtatcttacaaggcctcatttaggaggcaggaatgaaatggctgcaaggaagaatatgctgttggcggcccagcagttgtgtaaggaatttacagagctgctgtctcaggatcggacaccccacggaacttctcgccttgcccccgtactggagaccaacatacagaattgcctcagtcacttcagcctaattacccacgggtttggctcccaggctatttgtgctgcggtcagtgctctccaaaattacataaaagaagccttaattgtgatagataagtcttacatgaatcccggagaccagagcccagctgactcaaataaaactctggagaagatggagaaacacagaaaatag

SEQ ID NO: 136428 - DNA, 357 bp, Artificial Sequence
  derived and/or modified sequence
atgttcctgcaggaccggcacgacggcagcagcaacggcaacccccgggtacctcatttgagctctgcagggcagcatctgtactctcccgccccaccactctcacatacaggcgttgctgagtaccaacccccaccctacttcccccccccttatcagcagcttgcctactcccagagtgccgacccctactctcatctgggcgaggcttatgctgccgcaatcaacccgttacaccagccagccccgaccgggtctcagcagcaggcttggcccggtaggcagtcacaggagggtgctgggctccctagccatcacggccggcctgctggcctcctgccacatctgagcggatag

SEQ ID NO: 136429 - DNA, 846 bp, Artificial Sequence
  derived and/or modified sequence
atgccccaccagatggacgaggtgcagaacgtggacgaccagcacttgctcttgcacgaccagaccgtgatcaggaagggaccgattagtatgactaagaaccccctgaatctgccttgccagaaggaattggtgggggctgtgatgaaccctacggaagtcttctgttccgtgcctggaagactgtctctgctgtcctccacgtctaaatacaaggtaactgtggccgaggttcagagaagactctcaccccctgagtgtctgaatgccagcttgctgggaggagtgctccggcgcgcaaagagcaaaaatgggggccgatccctcagagaaaagctggacaaaatcgggctgaacctgccagcgggaaggcggaaggcagcccacgtgacactgctaacatcgctggtggaaggcgaggcagtgcacctggcaagagatttcgcatacgtgtgtgaggccgagtttccgtccaagccagttgccgaatacctaacaagaccccacctcggtggccgcaatgagatggctgcccgtaagaacatgctcctagccgcacagcaactttgcaaggagtttacagaactcctgagtcaggacaggacaccccatggcacgagtagactcgcgcctgtgctcgagactaatatccagaattgcctgtcacatttttctctgatcacccatggcttcggatcacaagctatttgcgcggccgtaagcgccttacagaattatattaaagaggccctgatcgtgatcgataaaagttacatgaaccccggagatcagagtcctgctgactccaataagaccctcgaaaaaatggagaagcaccggaagtag

SEQ ID NO: 136430 - DNA, 1353 bp, Artificial Sequence
  derived and/or modified sequence
atgctctggaagatcacagacaatgtgaagtatgaggaagactgtgaggataggcacgacggatcctcgaacggaaatcccagggtgccacacctgagttctgctggccaacatctgtatagtccagcacctcccctgagccacacgggcgtggccgagtatcaaccacctccttacttccccccaccttatcagcagcttgcctatagccagagcgcagacccctactcacacctgggtgaggcctacgctgcggctattaatccgcttcatcagcctgccccaacagggtcacagcagcaggcatggcccggacgccaaagtcaggaaggggctggtttgccctcccaccatggccgtcctgccggactactgccccacttgagcggattagaggctggcgctgtctccgccagaagagacgcttacagaagatccgatctgttgctgcctcacgcacacgcactcgacgcagcagggctggctgaaaacctagggctacacgacatgccacaccaaatggacgaggtgcagaatgtggacgaccagcatttgctattgcacgaccagactgtgattaggaagggcccaatctccatgactaagaatcccctgaatttgccgtgccaaaaagagctggtcggtgcagtcatgaatcccacagaagtcttttgctccgtaccaggtcggctctcactgctatcttccacttccaagtacaaagtgactgtggccgaagtgcagagacgcctgtcacccccagagtgcctgaacgcgtccctgcttggaggcgtgctgcggcgagctaagagcaagaatgggggaaggagcctgcgggagaagctggataaaatcggactcaacctgcctgctggcagacggaaagccgctcatgtgacgctgctgacttccttggtggagggcgaggctgttcacctggccagggattttgcctatgtttgtgaggctgaattcccctcaaagccagtggccgagtatttgacaaggccacatctgggcggacggaatgaaatggctgctcggaagaatatgttactcgcggctcagcaactttgtaaggagttcaccgaacttctgtcgcaagaccgcacaccacacgggacttcacgccttgccccagtgctggagacaaatatccagaactgcttaagccacttcagcctgattacccatgggtttggcagccaggcgatctgtgcggctgtgtcagccctccagaactacattaaggaagcgcttatcgtcatcgataagagttacatgaaccctggcgatcagagtcccgctgattctaacaagactttggaaaaaatggaaaagcatagaaagtag

SEQ ID NO: 136431 - DNA, 357 bp, Artificial Sequence
  derived and/or modified sequence
atgttcttgcaggatcgacacgacggttcttcgaatggcaatcccagggtgccacatctgtcgtcagccggtcagcacctctactcgccggcaccccctctgtcccacacaggggtggctgagtaccagccgcctccttatttcccaccaccctaccagcagcttgcatactctcagtccgccgatccctactcccacctgggtgaagcctacgctgccgcaattaatccgcttcaccaaccagctccaaccggctcacaacagcaggcctggcccggaagacaaagccaggaaggagccggactgccaagccaccacggcaggccagccggtcttctgccacatctctccggctag

SEQ ID NO: 136432 - DNA, 846 bp, Artificial Sequence
  derived and/or modified sequence
atgcctcatcagatggacgaggtgcagaatgttgacgaccagcacctgctgctgcacgaccaaaccgtgatccgcaagggcccaatcagtatgaccaagaacccattgaatctgccttgccaaaaagagcttgtgggtgccgtgatgaaccctaccgaggtcttctgtagtgtgcccggtaggctctccctgttgtcaagcacaagcaaatacaaggtgaccgtggccgaggtacagcggaggctgtcccctcctgagtgtctgaacgcctctctcctcgggggagttcttcggagagcaaaatccaaaaatggaggtcggagcctgcgggagaagctggacaagattggactaaacctacccgcagggagacgaaaagccgctcatgttacactgctcaccagtctcgttgaaggagaagccgtgcatctggccagagatttcgcttacgtgtgcgaggctgagttccctagcaagccagtggccgagtacctcactcgccctcacctcgggggtcggaatgagatggctgccaggaaaaatatgctgcttgctgcacagcagttatgcaaggagtttaccgaactcttgtcacaggataggacgcctcacggcacttcccgactggcgccagtgctagagacaaatatccagaattgcctcagtcacttttctctgatcacacacggctttggttcccaggctatctgtgcggctgtatccgcactgcaaaattacataaaagaggcactcattgtgatcgacaagtcttacatgaaccccggtgaccaatctccagccgacagtaataagacactggaaaaaatggaaaaacacaggaagtag

SEQ ID NO: 136433 - DNA, 2866 bp, Artificial Sequence
  derived and/or modified sequence
cgccaggacacactgttcgggcgcggctttccccgtccgcggagcggtcttgacactcgcggcggcagcatctacgctcgcagagccgccgatgcgtgtccagtgacccggacagcaaggcccgcgcgcggcgggggcggcggcagacgcctggtcaccgtgaccccgattttggatttaccgcttgggggctggggggatcctggatttaactggcgactgttttgggggacgccggacgccatgttgtggaaaataaccgataatgtcaagtacgaagaggactgcgaggatcgccacgacgggagcagcaatgggaatccgcgggtcccccacctctcctccgccgggcagcacctctacagccccgcgccacccctctcccacactggagtcgccgaatatcagccgccaccctactttccccctccctaccagcagctggcctactcccagtcggccgacccctactcgcatctgggggaagcgtacgccgccgccatcaaccccctgcaccagccggcgcccacaggcagccagcagcaggcctggcccggccgccagagccaggagggagcggggctgccctcgcaccacgggcgcccggccggcctactgccccacctctccgggctggaggcgggcgcggtgagcgcccgcagggatgcctaccgccgctccgacctgctgctgccccacgcacacgccctggatgccgcgggcctggccgagaacctggggctccacgacatgcctcaccagatggacgaggtgcagaatgtcgacgaccagcacctgttgctgcacgatcagacagtcattcgcaaaggtcccatttccatgaccaagaaccctctgaacctcccctgtcagaaggagctggtgggggccgtaatgaaccccactgaggtcttctgctcagtccctggaagattgtcgctcctcagctctacgtctaaatacaaagtgacagtggctgaagtacagaggcgactgtccccacctgaatgcttaaatgcctcgttactgggaggtgttctcagaagagccaaatcgaaaaatggaggccggtccttgcgggagaagttggacaagattgggttgaatcttccggccgggaggcggaaagccgctcatgtgactctcctgacatccttagtagaaggtgaagctgttcatttggctagggactttgcctatgtctgtgaagccgaatttcctagtaaaccagtggcagaatatttaaccagacctcatcttggaggacgaaatgagatggcagctaggaagaacatgctattggcggcccagcaactgtgtaaagaattcacagaacttctcagccaagaccggacaccccatgggaccagcaggctcgccccagtcttggagacgaacatacagaactgcttgtctcatttcagcctgattacccacgggtttggcagccaggccatctgtgccgcggtgtctgccctgcagaactacatcaaagaagccctgattgtcatagacaaatcctacatgaaccctggagaccagagtccagctgattctaacaaaaccctggagaaaatggagaaacacaggaaataaaattggaacgaagaaaggttaggagagtagggaaggaacaggactgcaaaaatccttctccaccgcacagactgggaacccctcctggcctgggggaagagtttgttacctaccttactatttaaagagccttcactggttctgcatcacccgcccctggacttcttagttgtttctctagcgctgagctatctcctaactttggacctattatcagaaggtgacaagtactggctctttattcattaagctttttttttttgaaccccattctttccttctctgaaagtggtgctataagttttagaatcttttaaatacattccctgggccaacagacccacacacttagccattgaaatgtcaaattgatgtgccctagatcaacagatcaacaataccttttttttcagtgttaaggtaatggttggtttttgtgtccgctaaatatttaccttgaaaaaaagaaaagtgtgtatctagcttcttcagagatcaagtcctctggtaggaggcaaaggttctatctgcttagcaactagttaataagtggtatctgacacactctaaaccccgtgttcaaacgggggccttctggttttaggaaacttgtagaaacgaagcctgctgattgatttttttctcctttttttttttttttttttttaactttgaaagttaactcttcaaatgggagactctttgaaatgacatgttcctttaaggtactgaagctttatttgcatatttatttcagatgtttcgagtaaacttgaaaagggtaggcacgaagcaatttgttgctgcttgtcacccccaagtccccgtggaggttctgtattttaagaaacagtgcgttgagtgtacagattttatttatgcgtaatttaatggggtctgtaaatactggtgcacttcttacgacttttttgagacatgggatccaattttaatattaacttttaatggtgatggggtaatctataacacatcataaggttttattcatatatatacagggtattaagaattaagaggatgctgggctctgttcttggcttggaagattctatttaattgaaactctctgttcagaaagcaataactttgtctcgttcctgttgggctgaaccctaaggtgagtgtgcagtacagtgtgtgtgggtgaaatggagatttggaattgaactctctgcctgtaaatgttccccaaataattgttgtgtgtatgatacgtgtataataaaagtattcttgttagaatctgaaa

SEQ ID NO: 136434 - DNA, 482 bp, Artificial Sequence
  derived and/or modified sequence
cgagctcaggggcgccgggagcgcggagctcgggctacggactcgcgggagttcactgcgcctccgggccctggagggctgcccctgcccgcaggcccgggcgcttccgccaggaggcgacagcgccatgttcctccaggatcgccacgacgggagcagcaatgggaatccgcgggtcccccacctctcctccgccgggcagcacctctacagccccgcgccacccctctcccacactggagtcgccgaatatcagccgccaccctactttccccctccctaccagcagctggcctactcccagtcggccgacccctactcgcatctgggggaagcgtacgccgccgccatcaaccccctgcaccagccggcgcccacaggcagccagcagcaggcctggcccggccgccagagccaggagggagcggggctgccctcgcaccacgggcgcccggccggcctactgccccacctctccgggc

SEQ ID NO: 136435 - DNA, 1674 bp, Artificial Sequence
  derived and/or modified sequence
ttttctggcccaagacccagggttcggacttggcgcctccaagcgcctcgggcttgggagcagcgcctagaccttcgccgccgggctttgagaactcgttcccccaggatcgccacgacgggagcagcaatgggaatccgcgggtcccccacctctcctccgccgggcagcacctctacagccccgcgccacccctctcccacactggagtcgccgaatatcagccgccaccctactttccccctccctaccagcagctggcctactcccagtcggccgacccctactcgcatctgggggaagcgtacgccgccgccatcaaccccctgcaccagccggcgcccacaggcagccagcagcaggcctggcccggccgccagagccaggagggagcggggctgccctcgcaccacgggcgcccggccggcctactgccccacctctccgggctggaggcgggcgcggtgagcgcccgcagggatgcctaccgccgctccgacctgctgctgccccacgcacacgccctggatgccgcgggcctggccgagaacctggggctccacgacatgcctcaccagatggacgaggtgcagaatgtcgacgaccagcacctgttgctgcacgatcagacagtcattcgcaaaggtcccatttccatgaccaagaaccctctgaacctcccctgtcagaaggagctggtgggggccgtaatgaaccccactgaggtcttctgctcagtccctggaagattgtcgctcctcagctctacgtctaaatacaaagtgacagtggctgaagtacagaggcgactgtccccacctgaatgcttaaatgcctcgttactgggaggtgttctcagaagagccaaatcgaaaaatggaggccggtccttgcgggagaagttggacaagattgggttgaatcttccggccgggaggcggaaagccgctcatgtgactctcctgacatccttagtagaaggtgaagctgttcatttggctagggactttgcctatgtctgtgaagccgaatttcctagtaaaccagtggcagaatatttaaccagacctcatcttggaggacgaaatgagatggcagctaggaagaacatgctattggcggcccagcaactgtgtaaagaattcacagaacttctcagccaagaccggacaccccatgggaccagcaggctcgccccagtcttggagacgaacatacagaactgcttgtctcatttcagcctgattacccacgggtttggcagccaggccatctgtgccgcggtgtctgccctgcagaactacatcaaagaagccctgattgtcatagacaaatcctacatgaaccctggagaccagagtccagctgattctaacaaaaccctggagaaaatggagaaacacaggaaataaaattggaacgaagaaaggttaggagagtagggaaggaacaggactgcaaaaatccttctccaccgcacagactgggaacccctcctggcctgggggaagagtttgttacctaccttactatttaaagagccttcactggttctgcatcacccgcccctggacttcttagttgtttctctagcgctgagctatctcctaactttggacctattatcagaaggtgacaagtactggctctttattcattaagcttttttttttt

SEQ ID NO: 136436 - protein, 338 aa, Artificial Sequence
  derived and/or modified sequence
MEYFMVPTQKVPSLQHFRKTEKEVIGGLCSLANIPLTPETQRDQERRIRREIANSNERRRMQSINAGFQSLKTLIPHTDGEKLSKAAILQQTAEYIFSLEQEKTRLLQQNTQLKRFIQELSGSSPKRRRAEDKDEGIGSPDIWEDEKAEDLRREMIELRQQLDKERSVRMMLEEQVRSLEAHMYPEKLKVIAQQVQLQQQQEQVRLLHQEKLEREQQQLRTQLLPPPAPTHHPTVIVPAPPPPPSHHINVVTMGPSSVINSVSTSRQNLDTIVQAIQHIEGTQEKQELEEEQRRAVIVKPVRSCPEAPTSDTASDSEASDSDAMDQSREEPSGDGELP

SEQ ID NO: 136437 - DNA, 2147 bp, Artificial Sequence
  derived and/or modified sequence
cacacacacacacacacacacacacacacacacacacacacacacatacacacgcccggggaggcaggccggagagacctccctcccgcccctcccgcccgcctccctcccctcgccgccgccgccgccgccagcatctgggaccggccgattctgcacctccgtccggcgctgccctttgattcggatttccatcttgcattctccggctgatcgcgggacctggctcgtgcagaggaggggggccgatcgctatggagtatttcatggtgcccactcagaaggtgccctctttgcaacatttcaggaaaacagagaaagaagtgataggagggctctgtagccttgccaacattccactaacccccgagactcagcgggaccaggagcggcggattcggcgggagatcgccaacagcaacgagcggagacgcatgcagagcatcaacgcgggattccagtccctcaagaccctcatcccccacacagacggagagaagctcagcaaggcagccattctccagcagacagccgagtacatcttctccctggagcaggagaagaccaggctcttgcagcagaacacacagctcaagcgcttcatccaggagctgagcggctcgtcccccaagcgacggcgggcagaggacaaggacgaaggcataggctccccggacatctgggaggacgagaaggcggaggacctgcggcgggagatgattgagctgcggcagcagctggacaaggagcgctcggtgcgcatgatgctggaggagcaggtgcgctcgctggaggcccacatgtacccggaaaagctcaaggtgattgcgcagcaggtgcagctgcagcagcagcaggaacaggtgaggctgctgcaccaggagaagctggagcgggaacagcagcagctgcggacccagcttctgccccctccggcccccacccaccaccccacggtgatcgtgccagcaccgcctcctcctccctcccaccacatcaatgtcgtcaccatgggcccctcctcggtcatcaactctgtttccacatcccggcaaaatctggacaccatcgtgcaggcaatccagcacatcgagggcacccaggaaaagcaggagctggaggaggagcagcggcgagctgtcatcgtgaagcctgtccgcagctgcccggaggcccccacctctgacaccgcctccgactccgaggcctcagacagtgacgccatggaccagagccgggaggagccgtcgggggacggggagcttccctgactacccccccagccctcctctcccttctgggggctggagggagccggggcagccacagggagagacatgggcgaatgagtgagaaatttttacaaaattacgatgtcatttgggtctcttttatgacctctttttcaatactgtaaatcgacctttgaacgaagccactcaacccgaggtcccggggctggggtgtcgcagagcgtgtgggagcatcggcaccccagggcggggcctcggccccgggggctggaggaagctgacacggagatgcctggcctctctctgccaaaaagcattttttcctttaaatatgttttttaagaacagggaaaattaaacaaaaccccaggttatttcttccctgcccagagccagcctgggattgtcagccttcaatcccctttccttcctctttttgggttttcttctttctcctttaagcacttacatggttgggggtaagactaggctggggcattctgggggcccggaggtctccgttgcttcttggttggggtttgctgctgctgtgcccccctcccccttccccatctcggcactagaattcgccactctcccaccccccagcccccacctctgcctccaggtctcatcttccaccccaaaaatgtctgtctctctctttttgttttgtttgttgttggttttttatttctttttggtttgctttctgtttttgttttgtttttcttttttttctttcttttttttttttttttacaattttgaggtcttcgtgttcaaggagaagctattatattttgttaagaaagtggggagaaaaaaaccaagaggccaccgtgcctttgtaaagaaacaaaataaagtttgtactttgttttttaaaaaaaa

SEQ ID NO: 136438 - DNA, 1017 bp, Artificial Sequence
  derived and/or modified sequence
atggagtacttcatggttcccacacagaaggtccctagcctgcagcacttccgtaagaccgagaaagaagtcattggcggtctctgttcgttagcaaacataccccttaccccagaaacccagcgtgaccaagagcggcgaattagacgtgagattgccaattctaacgaaagacgcagaatgcagtcaataaacgcgggcttccagagtttgaagactcttatcccgcacactgatggggagaaattatccaaggctgccattttgcagcaaacagccgaatatattttcagcctggagcaggaaaaaaccaggcttctgcagcaaaatacacagctaaagcgctttattcaggaacttagtggatcaagccctaagagaagacgagcagaggataaagatgagggaatcggcagtcctgacatttgggaagatgagaaggcggaagatctgagaagggaaatgattgaacttcggcagcagctcgacaaggagagatcagtgagaatgatgctcgaggaacaagtccgaagccttgaagcccacatgtacccagaaaagcttaaagtgattgcgcaacaggtacagcttcagcaacaacaagaacaggtgcgattacttcaccaggaaaaactcgagagagagcagcaacagctccgtactcagctgttacctccgcctgctccgacccaccacccgacggttattgtgcccgcccctcctcctccaccctctcatcacatcaacgtggtcaccatgggtccgtcgagcgtcataaatagtgtaagcacctcacgccagaacttggacactattgtgcaggctatccagcacatcgaggggacacaggagaagcaggagctcgaggaggagcagagacgggcagtgatcgtgaagcccgtccgcagctgtccagaggcccccacctctgatacggctagcgactcagaagcctccgactcagacgccatggatcagtcccgcgaggagccgagtggcgacggggaactgccctag

SEQ ID NO: 136439 - DNA, 1017 bp, Artificial Sequence
  derived and/or modified sequence
atggagtacttcatggtgcccacccagaaggtgcccagcctgcagcacttcaggaagacagagaaggaggtgattggaggcctgtgcagcctggccaacatccccctgaccccagagacccagagggaccaggagcggcgcatcagaagagagatcgccaacagcaatgaaagaagaaggatgcagagcatcaatgccggcttccagagcctgaagaccctcatcccccacacagatggagagaagctgagcaaggccgccatcctgcagcagacagctgagtacatcttcagcctggagcaggagaagacccggctgctgcagcagaacacccagctgaagcgcttcatccaggagctgagcggcagcagccccaagagaagaagagctgaggacaaggatgagggcatcggcagcccagacatctgggaggatgagaaggccgaggacctgcggcgggagatgattgagctgcggcagcagctggacaaggagaggtctgtgaggatgatgctggaggagcaggtgcgcagcctggaggcccacatgtacccagagaagctgaaggtgattgcccagcaggtgcagctgcagcagcagcaggagcaggtgcggctgctgcaccaggagaagctggagcgggagcagcagcagctgcggacccagctgctgcccccaccagcccccacccaccaccccaccgtcatcgtgcctgcccctcctcctccacccagccaccacatcaacgtggtgaccatgggccccagcagcgtcatcaacagcgtgtccaccagccggcagaacctggacaccatcgtgcaggccatccagcacatcgagggcacccaggagaagcaggagctggaggaggagcagaggagagctgtgattgtgaagcctgtgcgcagctgcccagaggcccccaccagtgacacagccagtgacagcgaggccagtgacagtgatgccatggaccagagccgggaggagcccagcggagatggagagctgccctag

SEQ ID NO: 136440 - DNA, 1017 bp, Artificial Sequence
  derived and/or modified sequence
atggagtacttcatggtgcccacccagaaggtgcccagcctgcagcacttccgaaagactgaaaaagaggtcataggcggcctgtgcagtctggccaatatacctctgacaccagagacccaacgagatcaggaacgaaggatcaggcgcgaaatcgcaaactcaaatgaacggaggaggatgcagtctatcaacgctggatttcaatccttgaagacactgatccctcataccgatggggagaagctcagtaaggcggctattctgcagcagaccgcagagtacatattttcccttgagcaggagaagactcggctgctgcaacaaaacacacaactcaagaggttcatccaggagctgagtggtagcagtcccaaaaggcgacgcgctgaggataaagatgagggtattgggtctcctgatatctgggaagatgagaaggcagaagacctccgccgggaaatgatcgagctgcggcagcagctggataaggagcgcagcgtgcggatgatgcttgaggagcaggtacggtcactggaagcccacatgtatccagagaagcttaaagtgatcgcgcagcaggtccaactgcagcaacagcaggagcaggtgaggctgcttcaccaggagaagttggaacgcgaacagcagcaactgcgcacacagttactgcccccgccagctcctacccatcacccaacagttattgtgcccgcacccccgcctccaccctcccatcacatcaatgtcgtaactatgggcccgtctagtgtgattaactcggtttcgacgtcccgacagaatctggacacgattgtccaggctatccagcacattgaaggtacccaggaaaagcaagagctcgaagaagagcagagacgcgctgtgattgtgaaaccagttagatcctgccccgaagcccctacttctgatacagctagcgacagtgaagcctctgattctgacgctatggatcagagccgcgaggagccctcaggagacggagaactaccttag

SEQ ID NO: 136441 - DNA, 1017 bp, Artificial Sequence
  derived and/or modified sequence
atggaatactttatggtgcccacacaaaaagtaccatcactgcagcactttcgtaagacggagaaagaagttataggaggactgtgtagcctggcaaacatccctctgaccccagaaacccaaagggatcaagaacgcagaattagaagggaaatcgccaactcaaatgaacgtcggaggatgcagtccatcaatgccggattccagagcctgaagacactcatcccacatacagacggtgagaaattaagcaaggcagccattctgcaacaaaccgccgagtacatctttagcttagaacaggagaagacacggctgctgcagcaaaatactcagcttaagaggtttatccaggaattgtctgggtcgtcaccaaagcggagaagagctgaagataaagacgaaggtattggctccccggatatttgggaagacgagaaagcagaggatttaaggcgcgagatgatcgaactacggcagcagctcgacaaagagcgcagcgtccgcatgatgctagaggagcaagtccgtagcctcgaggcccatatgtaccctgagaaattaaaggtgattgcacaacaagtgcaacttcagcagcagcaggagcaggttcgcctcttacatcaggaaaaactcgagcgcgagcagcaacagctccgcacacagctcttgccccctcccgcacctactcaccaccccaccgttatcgtgccagcacccccaccccctccttctcaccacatcaacgtggtgactatgggcccttcaagcgtgatcaactccgtttcaaccagccgccagaacctcgacaccattgtacaagctatacagcatatcgaggggacccaggagaaacaggagctggaggaggagcaaaggagggctgtgatagttaaaccggtccgttcgtgcccagaggcgccaacgtcggacaccgccagcgacagcgaagcaagcgacagcgatgccatggatcagagcagggaggaaccaagtggggacggagaacttccctag

SEQ ID NO: 136442 - DNA, 2140 bp, Artificial Sequence
  derived and/or modified sequence
cacacacacacacacacacacacacacacacacacacacacacacatacacacgcccggggaggcaggccggagagacctccctcccgcccctcccgcccgcctccctcccctcgccgccgccgccgccgccagcatctgggaccggccgattctgcacctccgtccggcgctgccctttgattcggatttccatcttgcattctccggctgatcgcgggacctggctcgtgcagaggaggggggccgatcgctatggagtatttcatggtgcccactcagaaggtgccctctttgcaacatttcaggaaaacagagaaagaagtgataggagggctctgtagccttgccaacattccactaacccccgagactcagcgggaccaggagcggcggattcggcgggagatcgccaacagcaacgagcggagacgcatgcagagcatcaacgcgggattccagtccctcaagaccctcatcccccacacagacggagagaagctcagcaaggcagccattctccagcagacagccgagtacatcttctccctggagcaggagaagaccaggctcttgcagcagaacacacagctcaagcgcttcatccaggagctgagcggctcgtcccccaagcgacggcgggcagaggacaaggacgaaggcataggctccccggacatctgggaggacgagaaggcggaggacctgcggcgggagatgattgagctgcggcagcagctggacaaggagcgctcggtgcgcatgatgctggaggagcaggtgcgctcgctggaggcccacatgtacccggaaaagctcaaggtgattgcgcagcaggtgcagctgcagcagcagcaggaacaggtgaggctgctgcaccaggagaagctggagcgggaacagcagcagctgcggacccagcttctgccccctccggcccccacccaccaccccacggtgatcgtgccagcaccgcctcctcctccctcccaccacatcaatgtcgtcaccatgggcccctcctcggtcatcaactctgtttccacatcccggcaaaatctggacaccatcgtgcaggcaatccagcacatcgagggcacccaggaaaagcaggagctggaggaggagcagcggcgagctgtcatcgtgaagcctgtccgcagctgcccggaggcccccacctctgacaccgcctccgactccgaggcctcagacagtgacgccatggaccagagccgggaggagccgtcgggggacggggagcttccctgactacccccccagccctcctctcccttctgggggctggagggagccggggcagccacagggagagacatgggcgaatgagtgagaaatttttacaaaattacgatgtcatttgggtctcttttatgacctctttttcaatactgtaaatcgacctttgaacgaagccactcaacccgaggtcccggggctggggtgtcgcagagcgtgtgggagcatcggcaccccagggcggggcctcggccccgggggctggaggaagctgacacggagatgcctggcctctctctgccaaaaagcattttttcctttaaatatgttttttaagaacagggaaaattaaacaaaaccccaggttatttcttccctgcccagagccagcctgggattgtcagccttcaatcccctttccttcctctttttgggttttcttctttctcctttaagcacttacatggttgggggtaagactaggctggggcattctgggggcccggaggtctccgttgcttcttggttggggtttgctgctgctgtgcccccctcccccttccccatctcggcactagaattcgccactctcccaccccccagcccccacctctgcctccaggtctcatcttccaccccaaaaatgtctgtctctctctttttgttttgtttgttgttggttttttatttctttttggtttgctttctgtttttgttttgtttttcttttttttctttcttttttttttttttttacaattttgaggtcttcgtgttcaaggagaagctattatattttgttaagaaagtggggagaaaaaaaccaagaggccaccgtgcctttgtaaagaaacaaaataaagtttgtactttgtttttta

SEQ ID NO: 136443 - DNA, 1017 bp, Artificial Sequence
  derived and/or modified sequence
atggagtacttcatggtgcccacccagaaggtgcccagcctgcagcacttcagaaagaccgagaaggaggtgatcggcggcctgtgcagcctggccaacatccccctgacccccgagacccagagagaccaggagagaagaatcagaagagagatcgccaacagcaacgagagaagaagaatgcagagcatcaacgccggcttccagagcctgaagaccctgatcccccacaccgacggcgagaagctgagcaaggccgccatcctgcagcagaccgccgagtacatcttcagcctggagcaggagaagaccagactgctgcagcagaacacccagctgaagagattcatccaggagctgagcggcagcagccccaagagaagaagagccgaggacaaggacgagggcatcggcagccccgacatctgggaggacgagaaggccgaggacctgagaagagagatgatcgagctgagacagcagctggacaaggagagaagcgtgagaatgatgctggaggagcaggtgagaagcctggaggcccacatgtaccccgagaagctgaaggtgatcgcccagcaggtgcagctgcagcagcagcaggagcaggtgagactgctgcaccaggagaagctggagagagagcagcagcagctgagaacccagctgctgcccccccccgcccccacccaccaccccaccgtgatcgtgcccgcccccccccccccccccagccaccacatcaacgtggtgaccatgggccccagcagcgtgatcaacagcgtgagcaccagcagacagaacctggacaccatcgtgcaggccatccagcacatcgagggcacccaggagaagcaggagctggaggaggagcagagaagagccgtgatcgtgaagcccgtgagaagctgccccgaggcccccaccagcgacaccgccagcgacagcgaggccagcgacagcgacgccatggaccagagcagagaggagcccagcggcgacggcgagctgccctag

SEQ ID NO: 136444 - protein, 84 aa, Artificial Sequence
  derived and/or modified sequence
MATMENKVICALVLVSMLALGTLAEAQTETCTVAPRERQNCGFPGVTPSQCANKGCCFDDTVRGVPWCFYPNTIDVPPEEECEF

SEQ ID NO: 136445 - DNA, 255 bp, Artificial Sequence
  derived and/or modified sequence
atggccaccatggagaacaaggtgatctgcgccctggtgctggtgagcatgctggccctgggcaccctggccgaggcccagaccgagacctgcaccgtggcccccagagagagacagaactgcggcttccccggcgtgacccccagccagtgcgccaacaagggctgctgcttcgacgacaccgtgagaggcgtgccctggtgcttctaccccaacaccatcgacgtgccccccgaggaggagtgcgagttctag

SEQ ID NO: 136446 - DNA, 255 bp, Artificial Sequence
  derived and/or modified sequence
atggccaccatggaaaataaagtgatttgcgcgttggtccttgtgagtatgctggctcttggaacactggcggaagctcagactgagacgtgtactgtggcaccaagggagagacagaactgtggcttcccaggagtcacccccagccagtgtgccaacaaggggtgctgttttgacgatactgtccgaggagtgccttggtgcttttaccccaacactatagatgtccctcctgaggaagagtgcgagttttag

SEQ ID NO: 136447 - DNA, 255 bp, Artificial Sequence
  derived and/or modified sequence
atggccaccatggagaacaaggtgatctgtgccctggtgctggtgtccatgctggccctgggcaccctggccgaggcccagacagagacctgcaccgtggccccccgggagcggcagaactgtggcttccctggggtgacccccagccagtgtgccaacaagggctgctgctttgatgacacagtgcggggcgtgccctggtgcttctaccccaacaccattgatgtgcccccagaggaggagtgtgagttctag

SEQ ID NO: 136448 - DNA, 255 bp, Artificial Sequence
  derived and/or modified sequence
atggccaccatggagaacaaggtgatctgcgccctggtgctggtgtcgatgctggctctgggtacattggctgaagcccagacagagacgtgcacggtggcacctcgcgaacgccagaactgcggcttcccaggagtgacaccaagtcagtgcgcaaataagggctgctgtttcgacgacactgttagaggcgtcccatggtgcttctatcctaacactattgacgtacctcccgaggaggaatgtgagttttag

SEQ ID NO: 136449 - DNA, 255 bp, Artificial Sequence
  derived and/or modified sequence
atggctaccatggagaataaggttatctgcgctctcgttctggtgagtatgcttgcgctgggaactctggctgaggctcagacagagacctgcactgttgcgcctcgggaacgccaaaactgtggtttccccggtgtgaccccctcccagtgtgcaaataaaggttgttgttttgacgacacagtacgcggagtgccttggtgcttctatccgaatactattgatgtgccgccagaagaggagtgcgagttttag

SEQ ID NO: 136450 - DNA, 551 bp, Artificial Sequence
  derived and/or modified sequence
taacgctctttaagcaaacagagcctgccctataaaatccggggctcgggcggcctctcatccctgactcggggtcgcctttggagcagagaggaggcaatggccaccatggagaacaaggtgatctgcgccctggtcctggtgtccatgctggccctcggcaccctggccgaggcccagacagagacgtgtacagtggccccccgtgaaagacagaattgtggttttcctggtgtcacgccctcccagtgtgcaaataagggctgctgtttcgacgacaccgttcgtggggtcccctggtgcttctatcctaataccatcgacgtccctccagaagaggagtgtgaattttagacacttctgcagggatctgcctgcatcctgacgcggtgccgtccccagcacggtgattagtcccagagctcggctgccacctccaccggacacctcagacacgcttctgcagctgtgcctcggctcacaacacagattgactgctctgactttgactactcaaaattggcctaaaaattaaaagagatcgatattaa

SEQ ID NO: 136451 - protein, 130 aa, Artificial Sequence
  derived and/or modified sequence
MQERTGAATARRESLPQANNPEQLCKQRCINEASWTMKRVLSCVPEPTVVMAARALCMLGLVLALLSSSSAEEYVGLSANQCAVPAKDRVDCGYPHVTPKECNNRGCCFDSRIPGVPWCFKPLQEAECTF

SEQ ID NO: 136452 - protein, 94 aa, Artificial Sequence
  derived and/or modified sequence
MKRVLSCVPEPTVVMAARALCMLGLVLALLSSSSAEEYVGLSANQCAVPAKDRVDCGYPHVTPKECNNRGCCFDSRIPGVPWCFKPLQEAECTF

SEQ ID NO: 136453 - DNA, 393 bp, Artificial Sequence
  derived and/or modified sequence
atgcaggagagaaccggcgccgccaccgccagaagagagagcctgccccaggccaacaaccccgagcagctgtgcaagcagagatgcatcaacgaggccagctggaccatgaagagagtgctgagctgcgtgcccgagcccaccgtggtgatggccgccagagccctgtgcatgctgggcctggtgctggccctgctgagcagcagcagcgccgaggagtacgtgggcctgagcgccaaccagtgcgccgtgcccgccaaggacagagtggactgcggctacccccacgtgacccccaaggagtgcaacaacagaggctgctgcttcgacagcagaatccccggcgtgccctggtgcttcaagcccctgcaggaggccgagtgcaccttctag

SEQ ID NO: 136454 - DNA, 285 bp, Artificial Sequence
  derived and/or modified sequence
atgaagagagtgctgagctgcgtgcccgagcccaccgtggtgatggccgccagagccctgtgcatgctgggcctggtgctggccctgctgagcagcagcagcgccgaggagtacgtgggcctgagcgccaaccagtgcgccgtgcccgccaaggacagagtggactgcggctacccccacgtgacccccaaggagtgcaacaacagaggctgctgcttcgacagcagaatccccggcgtgccctggtgcttcaagcccctgcaggaggccgagtgcaccttctag

SEQ ID NO: 136455 - DNA, 393 bp, Artificial Sequence
  derived and/or modified sequence
atgcaagaacggacgggcgcggctacagcccggagggagtctctgcctcaggccaacaacccggaacagctgtgtaagcagcggtgtattaacgaggccagctggactatgaaaagggtcctctcttgtgtgccagagccaacggttgtcatggcagctagggctctgtgcatgttgggactggtgctggccttgctatcctctagctcggcggaggagtacgtgggactttcggcaaaccagtgcgcagtgcctgctaaagacagggtggactgcggctacccacatgttacaccgaaggagtgtaacaatcgcgggtgttgttttgatagtcgaattccaggagtgccctggtgttttaaacccctgcaggaagctgagtgcacattctag

SEQ ID NO: 136456 - DNA, 285 bp, Artificial Sequence
  derived and/or modified sequence
atgaagcgtgtgctctcctgcgtccccgagccaacggtggtaatggcggccagagcactgtgcatgctcggtctcgtgctcgctctcttgtcaagttcctctgctgaagagtacgttggtctctcagccaaccagtgtgctgttccagcaaaagaccgggtggactgcggttatccccacgtgaccccaaaagagtgtaacaaccggggttgttgtttcgattcccgtatcccaggggtgccttggtgtttcaagccactccaggaggccgagtgcactttttag

SEQ ID NO: 136457 - DNA, 393 bp, Artificial Sequence
  derived and/or modified sequence
atgcaggagaggactggagctgccacagcccggcgggagagcctgccccaggccaacaaccctgagcagctgtgcaagcagcgctgcatcaatgaggcctcctggaccatgaagagggtgctgagctgtgtgcctgagcccaccgtggtgatggccgcccgggccctgtgcatgctgggcctggtgctggccctgctgagcagcagcagcgctgaggagtatgtgggcctgagcgccaaccagtgtgctgtgcctgccaaggacagagtggactgtggctacccccacgtgacccccaaggagtgcaacaacagaggctgctgctttgacagccgcatccctggggtgccctggtgcttcaagcccctgcaggaggctgaatgtaccttctag

SEQ ID NO: 136458 - DNA, 285 bp, Artificial Sequence
  derived and/or modified sequence
atgaagagggtgctgagctgtgtgcctgagcccaccgtggtgatggccgcccgggccctgtgcatgctgggcctggtgctggccctgctgagcagcagcagcgctgaggagtatgtgggcctgagcgccaaccagtgtgctgtgcctgccaaggacagagtggactgtggctacccccacgtgacccccaaggagtgcaacaacagaggctgctgctttgacagccgcatccctggggtgccctggtgcttcaagcccctgcaggaggctgaatgtaccttctag

SEQ ID NO: 136459 - DNA, 393 bp, Artificial Sequence
  derived and/or modified sequence
atgcaggagcggaccggcgccgccaccgcccggcgggagagcctgccccaggctaataatcccgagcagctttgcaagcagcgatgcatcaacgaggcctcatggactatgaaacgtgtgctgagttgcgttcccgaaccaactgttgttatggcggcgagggccctctgtatgctgggtttagtcctggccctgttgtcctcaagcagtgccgaggaatatgtcggcctatctgccaatcagtgcgctgtgccagcgaaggatagggttgactgtggttacccacacgttactcccaaagaatgcaataaccgagggtgttgtttcgattctagaataccgggcgtcccttggtgcttcaaacccctccaagaggctgagtgcaccttttag

SEQ ID NO: 136460 - DNA, 285 bp, Artificial Sequence
  derived and/or modified sequence
atgaagcgggtgctgagctgcgtgcccgagcccaccgtggtgatggctgctagggcattgtgcatgctgggcctggtgctggcccttttgtcctccagcagcgccgaagaatacgtggggttatctgccaaccagtgtgcagtgcccgctaaggatcgcgttgactgcgggtaccctcatgtaactcccaaagaatgtaacaatcgcggctgttgttttgactccagaatcccaggcgtaccctggtgctttaagccgctccaggaggccgaatgtacattctag

SEQ ID NO: 136461 - DNA, 393 bp, Artificial Sequence
  derived and/or modified sequence
atgcaggagcgaaccggggcagccacagcccgtcgagagagcctaccccaggcgaacaacccagagcaactgtgtaaacagcgatgcataaatgaggcctcatggacaatgaagagagtcctaagctgcgtacctgagcccaccgtggttatggcagcccgagcattatgtatgctcgggctcgtgctggcgctgttatctagttccagtgccgaggagtatgtgggactgagcgccaatcagtgcgctgtaccagctaaagatagggtggactgcggctatccccatgtcacaccgaaagagtgcaataacagggggtgttgtttcgattcaaggatcccaggagtgccctggtgcttcaagccccttcaggaagcagaatgtacattctag

SEQ ID NO: 136462 - DNA, 285 bp, Artificial Sequence
  derived and/or modified sequence
atgaaaagagtgttatcttgtgtgccggaaccaacggtggttatggctgccagggccttatgcatgctcggactagtcttggccctgctcagctcatcatccgctgaggagtacgtgggactgtcagcaaaccaatgtgccgtgccagcaaaagaccgagtggattgtggctaccctcatgtcacccctaaggaatgcaataatcgcggttgttgctttgactcgagaatcccaggtgtgccgtggtgcttcaaaccactccaagaggcggagtgtactttttag

SEQ ID NO: 136463 - DNA, 1054 bp, Artificial Sequence
  derived and/or modified sequence
gccaaaacagtgggggctgaactgacctctcccctttgggagagaaaaactgtctgggagcttgacaaaggcatgcaggagagaacaggagcagccacagccaggagggagagccttccccaagcaaacaatccagagcagctgtgcaaacaacggtgcataaatgaggcctcctggaccatgaagcgagtcctgagctgcgtcccggagcccacggtggtcatggctgccagagcgctctgcatgctggggctggtcctggccttgctgtcctccagctctgctgaggagtacgtgggcctgtctgcaaaccagtgtgccgtgccagccaaggacagggtggactgcggctacccccatgtcacccccaaggagtgcaacaaccggggctgctgctttgactccaggatccctggagtgccttggtgtttcaagcccctgcaggaagcagaatgcaccttctgaggcacctccagctgcccccggccgggggatgcgaggctcggagcacccttgcccggctgtgattgctgccaggcactgttcatctcagcttttctgtccctttgctcccggcaagcgcttctgctgaaagttcatatctggagcctgatgtcttaacgaataaaggtcccatgctccacccgaggacagttcttcgtgcctgagactttctgaggttgtgctttatttctgctgcgtcgtgggagagggcgggagggtgtcaggggagagtctgcccaggcctcaagggcaggaaaagactccctaaggagctgcagtgcatgcaaggatattttgaatccagactggcacccacgtcacaggaaagcctaggaacactgtaagtgccgcttcctcgggaaagcagaaaaaatacatttcaggtagaagttttcaaaaatcacaagtctttcttggtgaagacagcaagccaataaaactgtcttccaaagtggtcctttatttcacaaccactctcgctactgttcaatacttgtactattcctgggttttgtttctttgtacagtaaacattatgaacaaacaggca

SEQ ID NO: 136464 - DNA, 1109 bp, Artificial Sequence
  derived and/or modified sequence
cgctccccagtagaggacccggaaccagaactggaatccgcccttaccgcttgctgccaaaacagtgggggctgaactgacctctcccctttgggagagaaaaactgtctgggagcttgacaaaggcatgcaggagagaacaggagcagccacagccaggagggagagccttccccaagcaaacaatccagagcagctgtgcaaacaacggtgcataaatgaggcctcctggaccatgaagcgagtcctgagctgcgtcccggagcccacggtggtcatggctgccagagcgctctgcatgctggggctggtcctggccttgctgtcctccagctctgctgaggagtacgtgggcctgtctgcaaaccagtgtgccgtgccagccaaggacagggtggactgcggctacccccatgtcacccccaaggagtgcaacaaccggggctgctgctttgactccaggatccctggagtgccttggtgtttcaagcccctgcaggaagcagaatgcaccttctgaggcacctccagctgcccccggccgggggatgcgaggctcggagcacccttgcccggctgtgattgctgccaggcactgttcatctcagcttttctgtccctttgctcccggcaagcgcttctgctgaaagttcatatctggagcctgatgtcttaacgaataaaggtcccatgctccacccgaggacagttcttcgtgcctgagactttctgaggttgtgctttatttctgctgcgtcgtgggagagggcgggagggtgtcaggggagagtctgcccaggcctcaagggcaggaaaagactccctaaggagctgcagtgcatgcaaggatattttgaatccagactggcacccacgtcacaggaaagcctaggaacactgtaagtgccgcttcctcgggaaagcagaaaaaatacatttcaggtagaagttttcaaaaatcacaagtctttcttggtgaagacagcaagccaataaaactgtcttccaaagtggtcctttatttcacaaccactctcgctactgttcaatacttgtactattcctgggttttgtttctttgtacagtaaacattatgaacaaacaggca

SEQ ID NO: 136465 - protein, 760 aa, Artificial Sequence
  derived and/or modified sequence
MMDQARSAFSNLFGGEPLSYTRFSLARQVDGDNSHVEMKLAVDEEENADNNTKANVTKPKRCSGSICYGTIAVIVFFLIGFMIGYLGYCKGVEPKTECERLAGTESPVREEPGEDFPAARRLYWDDLKRKLSEKLDSTDFTGTIKLLNENSYVPREAGSQKDENLALYVENQFREFKLSKVWRDQHFVKIQVKDSAQNSVIIVDKNGRLVYLVENPGGYVAYSKAATVTGKLVHANFGTKKDFEDLYTPVNGSIVIVRAGKITFAEKVANAESLNAIGVLIYMDQTKFPIVNAELSFFGHAHLGTGDPYTPGFPSFNHTQFPPSRSSGLPNIPVQTISRAAAEKLFGNMEGDCPSDWKTDSTCRMVTSESKNVKLTVSNVLKEIKILNIFGVIKGFVEPDHYVVVGAQRDAWGPGAAKSGVGTALLLKLAQMFSDMVLKDGFQPSRSIIFASWSAGDFGSVGATEWLEGYLSSLHLKAFTYINLDKAVLGTSNFKVSASPLLYTLIEKTMQNVKHPVTGQFLYQDSNWASKVEKLTLDNAAFPFLAYSGIPAVSFCFCEDTDYPYLGTTMDTYKELIERIPELNKVARAAAEVAGQFVIKLTHDVELNLDYERYNSQLLSFVRDLNQYRADIKEMGLSLQWLYSARGDFFRATSRLTTDFGNAEKTDRFVMKKLNDRVMRVEYHFLSPYVSPKESPFRHVFWGSGSHTLPALLENLKLRKQNNGAFNETLFRNQLALATWTIQGAANALSGDVWDIDNEF

SEQ ID NO: 136466 - protein, 478 aa, Artificial Sequence
  derived and/or modified sequence
MDQTKFPIVNAELSFFGHAHLGTGDPYTPGFPSFNHTQFPPSRSSGLPNIPVQTISRAAAEKLFGNMEGDCPSDWKTDSTCRMVTSESKNVKLTVSNVLKEIKILNIFGVIKGFVEPDHYVVVGAQRDAWGPGAAKSGVGTALLLKLAQMFSDMVLKDGFQPSRSIIFASWSAGDFGSVGATEWLEGYLSSLHLKAFTYINLDKAVLGTSNFKVSASPLLYTLIEKTMQNVKHPVTGQFLYQDSNWASKVEKLTLDNAAFPFLAYSGIPAVSFCFCEDTDYPYLGTTMDTYKELIERIPELNKVARAAAEVAGQFVIKLTHDVELNLDYERYNSQLLSFVRDLNQYRADIKEMGLSLQWLYSARGDFFRATSRLTTDFGNAEKTDRFVMKKLNDRVMRVEYHFLSPYVSPKESPFRHVFWGSGSHTLPALLENLKLRKQNNGAFNETLFRNQLALATWTIQGAANALSGDVWDIDNEF

SEQ ID NO: 136467 - DNA, 2283 bp, Artificial Sequence
  derived and/or modified sequence
atgatggaccaggccagaagcgccttcagcaacctgttcggcggcgagcccctgagctacaccagattcagcctggccagacaggtggacggcgacaacagccacgtggagatgaagctggccgtggacgaggaggagaacgccgacaacaacaccaaggccaacgtgaccaagcccaagagatgcagcggcagcatctgctacggcaccatcgccgtgatcgtgttcttcctgatcggcttcatgatcggctacctgggctactgcaagggcgtggagcccaagaccgagtgcgagagactggccggcaccgagagccccgtgagagaggagcccggcgaggacttccccgccgccagaagactgtactgggacgacctgaagagaaagctgagcgagaagctggacagcaccgacttcaccggcaccatcaagctgctgaacgagaacagctacgtgcccagagaggccggcagccagaaggacgagaacctggccctgtacgtggagaaccagttcagagagttcaagctgagcaaggtgtggagagaccagcacttcgtgaagatccaggtgaaggacagcgcccagaacagcgtgatcatcgtggacaagaacggcagactggtgtacctggtggagaaccccggcggctacgtggcctacagcaaggccgccaccgtgaccggcaagctggtgcacgccaacttcggcaccaagaaggacttcgaggacctgtacacccccgtgaacggcagcatcgtgatcgtgagagccggcaagatcaccttcgccgagaaggtggccaacgccgagagcctgaacgccatcggcgtgctgatctacatggaccagaccaagttccccatcgtgaacgccgagctgagcttcttcggccacgcccacctgggcaccggcgacccctacacccccggcttccccagcttcaaccacacccagttcccccccagcagaagcagcggcctgcccaacatccccgtgcagaccatcagcagagccgccgccgagaagctgttcggcaacatggagggcgactgccccagcgactggaagaccgacagcacctgcagaatggtgaccagcgagagcaagaacgtgaagctgaccgtgagcaacgtgctgaaggagatcaagatcctgaacatcttcggcgtgatcaagggcttcgtggagcccgaccactacgtggtggtgggcgcccagagagacgcctggggccccggcgccgccaagagcggcgtgggcaccgccctgctgctgaagctggcccagatgttcagcgacatggtgctgaaggacggcttccagcccagcagaagcatcatcttcgccagctggagcgccggcgacttcggcagcgtgggcgccaccgagtggctggagggctacctgagcagcctgcacctgaaggccttcacctacatcaacctggacaaggccgtgctgggcaccagcaacttcaaggtgagcgccagccccctgctgtacaccctgatcgagaagaccatgcagaacgtgaagcaccccgtgaccggccagttcctgtaccaggacagcaactgggccagcaaggtggagaagctgaccctggacaacgccgccttccccttcctggcctacagcggcatccccgccgtgagcttctgcttctgcgaggacaccgactacccctacctgggcaccaccatggacacctacaaggagctgatcgagagaatccccgagctgaacaaggtggccagagccgccgccgaggtggccggccagttcgtgatcaagctgacccacgacgtggagctgaacctggactacgagagatacaacagccagctgctgagcttcgtgagagacctgaaccagtacagagccgacatcaaggagatgggcctgagcctgcagtggctgtacagcgccagaggcgacttcttcagagccaccagcagactgaccaccgacttcggcaacgccgagaagaccgacagattcgtgatgaagaagctgaacgacagagtgatgagagtggagtaccacttcctgagcccctacgtgagccccaaggagagccccttcagacacgtgttctggggcagcggcagccacaccctgcccgccctgctggagaacctgaagctgagaaagcagaacaacggcgccttcaacgagaccctgttcagaaaccagctggccctggccacctggaccatccagggcgccgccaacgccctgagcggcgacgtgtgggacatcgacaacgagttctag

SEQ ID NO: 136468 - DNA, 42 bp, Artificial Sequence
  derived and/or modified sequence
atggaccaggccagaagcgccttcagcaacctggacctgtag

SEQ ID NO: 136469 - DNA, 2283 bp, Artificial Sequence
  derived and/or modified sequence
atgatggatcaggcccgatcggcgttctctaatctgtttggcggggaacctctctcttatactcgcttctcattagcgcgccaggtagatggtgacaactcccatgttgagatgaagctcgcagtggatgaggaggaaaacgcagataacaatactaaagccaacgtgacgaagccgaagaggtgcagtggttcgatttgctacggaaccatagcagtcatcgtgttcttcctgattggatttatgataggctacctgggatactgtaaaggcgtggagcctaaaacagagtgcgaaaggctggcgggcaccgagagccctgtcagagaggaacctggcgaagacttcccagctgcacggcgtctctactgggatgatctgaagagaaaactcagcgagaaattggacagtactgacttcacagggaccatcaagctgttgaacgaaaactcatacgtaccgagagaagctggctcacaaaaagatgagaacctagcactgtacgtggagaatcagttcagagagttcaaattaagcaaggtgtggcgggaccagcacttcgtcaagatacaagtgaaggatagcgctcagaatagtgtgatcattgtggataaaaacggcagactggtatatctggtcgagaaccctggtggctacgttgcttactccaaggctgctactgtgacgggcaaacttgttcatgccaattttggcacaaagaaggatttcgaagatctgtacacacccgtgaatggatctatcgtcatcgtcagagccggaaagataaccttcgccgaaaaggtggctaatgctgaaagtctgaacgccattggggtgctgatctacatggaccagacgaaattcccaattgtgaatgctgagctgtcattctttggccatgcacatttgggaacaggagacccatacacacctgggttcccatcttttaaccacacccaattccctccttcccggagctccggattacccaatatcccggtgcagactatatcgcgcgccgccgcagagaagctcttcgggaatatggagggagattgcccttctgactggaagacagactctacctgccggatggtcacgagtgagtcaaagaatgtgaagctcaccgtttctaacgtcctgaaagagatcaagatactgaacatttttggagtgataaaaggctttgttgagcctgatcattacgtagtggtgggcgctcagagagacgcctggggccctggcgcagcaaagagtggagtgggaacagccttgcttttgaaactcgcacaaatgtttagcgacatggtgcttaaggacggattccaaccatcccggtccatcatcttcgcttcttggtccgccggcgacttcggaagcgtgggagcgaccgagtggttggaggggtatctcagctcactccatttgaaagcgttcacatatataaacctggataaagcggtgctgggaacctctaacttcaaagtttctgcttcgccgcttctctacacactcattgagaaaactatgcagaacgtcaaacatcctgtgaccggacagtttttgtaccaggactccaactgggccagcaaagtggagaagcttaccctggataacgccgcctttccgtttctggcttatagcggcatacctgcagtgtccttttgcttttgcgaagataccgactatccttacctaggcactactatggatacttacaaggagctgattgaaagaattcctgagctcaacaaggtcgcaagagccgccgctgaggtggccggccaatttgtcattaagctcacgcacgatgtagagctgaatcttgattacgagcgttacaattcccagcttctgtcgtttgtgagagaccttaaccagtaccgcgccgatataaaggagatgggcctaagcttacaatggctctatagtgctcgaggagatttcttcagggcgacatctaggcttaccactgactttggtaatgcagaaaagaccgatagattcgtgatgaaaaagctaaacgatcgagtcatgagagttgaatatcacttcctgagtccatacgtgtctcctaaggagtccccttttagacatgtcttctggggctcaggatcgcatacactgccagcacttctagaaaatttgaagttaagaaagcagaacaatggcgccttcaacgaaaccctgttcagaaatcagttggcactggccacatggaccatacagggggcagcaaatgccctgtcaggcgatgtgtgggatatcgacaacgaattctag

SEQ ID NO: 136470 - DNA, 2283 bp, Artificial Sequence
  derived and/or modified sequence
atgatggaccaggctaggtccgctttctcaaaccttttcggtggggagcctctgtcttatacccggtttagccttgcgcgccaagtggatggcgacaactctcacgttgaaatgaaactggccgtagacgaggaggaaaacgccgacaacaatacaaaagcaaatgtcaccaaacctaagaggtgctcagggtctatctgctacggcacaatcgccgtgattgtgttctttctgattgggttcatgataggttacctaggctattgcaaaggggtagaacctaagaccgagtgcgagcgcctcgcgggcacagagagtccggttcgggaggaacccggcgaggactttccggccgcgaggagactctattgggacgacctgaagaggaaactgagtgagaaattggactccacggatttcacaggcaccatcaaactgttgaatgagaactcttatgtaccccgagaggcaggttcacagaaagacgaaaaccttgcactctacgtggaaaaccagttccgcgaatttaaactgtctaaggtgtggagggaccagcacttcgtcaagattcaggttaaagactccgcccagaacagtgtgataattgtggacaagaatggtaggctcgtgtacctggttgaaaaccccgggggatatgtggcctactccaaagcagcgacagtaacgggtaaactggtgcacgccaactttgggaccaagaaagactttgaggatctttatacccctgttaatggttccatcgttattgtaagagccggtaagataacctttgccgaaaaggtagccaacgcagagtcgttgaacgctataggcgtgctaatctacatggaccaaacaaagttccccattgtcaacgcagagctttctttttttggccatgcccacctggggacgggggatccctatacccccggtttcccctcatttaatcatacacagttccccccctctaggagctctgggttgcccaatatcccggttcagaccatctcccgagccgcggcagagaaattattcggaaatatggaaggtgactgtccctctgactggaagacggacagcacatgtagaatggtgacttcagaatctaagaatgtgaaactgacagtgtctaacgtgctcaaggagatcaagattctgaacatattcggagtaatcaaggggttcgtcgagcccgaccactatgtggtggttggggctcagagagacgcttggggacctggtgccgctaaatcaggcgtaggcaccgctctgctcctcaaacttgcgcagatgtttagcgacatggtgctgaaagatggatttcagccctcacgctccatcatctttgcatcctggtcggcaggcgattttggctctgtcggggccacagagtggctcgaaggatacctttcctccttgcatctgaaagcgttcacgtatatcaaccttgataaagccgtgcttggaacatctaacttcaaagtgtctgcatccccactgttatacacactcatcgaaaagacaatgcaaaacgtcaaacacccagtgactggtcagttcctgtaccaagacagcaactgggcctcaaaggtagaaaaattaacactggacaatgctgcatttccttttttggcttactctggcatcccggccgtgtcattctgcttctgcgaggataccgattatccttatctggggactaccatggatacttacaaggaactgatagaaaggatccctgagctcaataaggtggcccgggctgctgctgaggtggcaggccagtttgtaatcaaacttacacacgacgtcgagttaaatttagactatgagaggtacaattcccaattacttagttttgtcagagatctcaaccagtatagggcagacattaaagagatgggactcagcctgcagtggctttactcagctcgcggggatttctttagggctactagtcgtttgacaaccgattttggaaatgccgaaaaaaccgacagatttgtgatgaagaagttgaacgaccgagtgatgagggttgagtaccattttctgtccccatacgtctctcctaaggagagccccttccggcacgtgttctgggggtctggatcccacaccctgcctgcactgctggaaaacttgaagcttcggaaacaaaataatggcgccttcaacgagactttgtttcgtaatcaactcgctctggccacctggacgatacagggagctgccaatgccctcagtggagacgtctgggacatagataacgaattttag

SEQ ID NO: 136471 - DNA, 42 bp, Artificial Sequence
  derived and/or modified sequence
atggaccaggctcgctctgcctttagcaacctggacctgtag

SEQ ID NO: 136472 - DNA, 2283 bp, Artificial Sequence
  derived and/or modified sequence
atgatggaccaggcccggagcgccttcagcaacctgtttggaggagagcccctgagctacacccgcttcagcctggcccggcaggtggatggagacaacagccacgtggagatgaagctggccgtggatgaggaggagaatgctgacaacaacaccaaggccaacgtgaccaagcccaagcgctgcagcggcagcatctgctacggcaccatcgccgtcatcgtgttcttcctgattggcttcatgattggctacctgggctactgcaagggcgtggagcccaagacagaatgtgagcggctggccggcacagagagccctgtgcgggaggagcccggggaggacttccctgctgcccggcggctgtactgggatgacctgaagaggaagctgtctgagaagctggacagcacagacttcaccggcaccatcaagctgctgaatgaaaattcctatgtgccccgggaggccggcagccagaaggatgagaacctggccctgtatgtggagaaccagttccgggagttcaagctgagcaaggtgtggagggaccagcactttgtgaagatccaggtgaaggacagcgcccagaacagcgtcatcatcgtggacaagaatggccgcctggtgtacctggtggagaaccctgggggctacgtggcctacagcaaggccgccaccgtgacaggcaagctggtgcacgccaactttggcaccaagaaggactttgaggacctgtacacccctgtgaatggcagcatcgtcatcgtgcgggccggcaagatcacctttgctgagaaggtggccaatgctgagagcctgaatgccatcggcgtgctgatctacatggaccagaccaagttccccatcgtgaatgctgagctgtccttcttcggccacgcccacctgggcactggagacccctacaccccaggcttccccagcttcaaccacacccagttcccccccagccgcagcagcggcctgcccaacatccctgtgcagaccatcagcagagctgctgctgagaagctgtttggaaacatggagggggactgccccagcgactggaagacagacagcacctgcaggatggtgaccagcgagagcaagaatgtgaagctgactgtgtccaatgtgctgaaggagatcaagatcctgaacatctttggagtcatcaagggctttgtggagccagaccactacgtggtggtgggcgcccagagagatgcctggggccctggggccgccaagtctggagtgggcacagccctgctgctgaagctggcccagatgttcagtgacatggtgctgaaggatggcttccagcccagccgcagcatcatctttgcctcctggagcgctggggactttggatctgtgggcgccacagagtggctggagggctacctgagcagcctgcacctgaaggccttcacctacatcaacctggacaaggctgtgctgggcaccagcaacttcaaggtgtctgccagccccctgctgtacaccctcatcgagaagaccatgcagaatgtgaagcaccctgtgacaggccagttcctgtaccaggacagcaactgggccagcaaggtggagaagctgaccctggacaatgctgccttccccttcctggcctacagcggcatcccagctgtgtccttctgcttctgtgaggacacagactacccctacctgggcaccaccatggacacctacaaggagctgattgagcgcatccctgagctgaacaaggtggcccgggctgctgctgaggtggccggccagtttgtgatcaagctgacccatgatgtggagctgaacctggactatgagcgctacaacagccagctgctgagctttgtgcgggacctgaaccagtacagagctgacatcaaggagatgggcctgagcctgcagtggctgtacagcgcccggggggacttcttccgggccaccagccggctgaccacagactttggaaatgctgagaagacagacagatttgtgatgaagaagctgaatgacagagtgatgagggtggagtaccacttcctgagcccctacgtgagccccaaggagagccccttcagacatgtgttctggggcagcggcagccacaccctgcctgccctgctggagaacctgaagctgaggaagcagaacaatggagccttcaatgagaccctcttcaggaaccagctggccctggccacctggaccatccagggcgccgccaatgccctgtctggagatgtgtgggacatcgacaatgagttctag

SEQ ID NO: 136473 - DNA, 2283 bp, Artificial Sequence
  derived and/or modified sequence
atgatggaccaggcccggagcgccttcagcaacctgttcggcggcgagcccctgtcttacacacggttctccttggccaggcaggttgacggagataacagccacgtcgagatgaaattagccgtggatgaggaggaaaatgcagacaataataccaaggccaatgtgacaaagcccaagcggtgtagtggcagcatctgctatggcactatcgcagtgatcgtattcttcttgattgggttcatgatcggatacctcggctactgtaaaggggtcgaacccaagaccgagtgtgagaggctggcgggcactgagtctccagttagagaagagcctggggaggattttcccgctgcaaggaggctttattgggatgacctaaagcgcaaactatctgaaaagttggattccaccgacttcactggaacgataaagctgctgaacgagaactcttatgtgcccagagaagccggctctcaaaaagatgaaaatctcgccctctatgtggaaaaccagttccgcgaattcaagctcagtaaggtctggagggatcagcactttgtgaaaattcaagtcaaggattctgcacaaaacagcgtaatcattgttgacaagaacggcaggctggtgtacctggttgagaacccgggcggttatgttgcctactctaaggccgccaccgtgacaggcaagctcgtccacgccaactttggtaccaaaaaggattttgaagatttgtataccccagtgaatggatcaatcgtcatcgtacgggccggtaagatcactttcgctgagaaagtcgctaacgcagagtcactgaacgccattggtgtgttgatttatatggaccaaaccaagttcccgatcgtcaacgccgagcttagtttcttcggtcacgcacacttgggcacaggtgacccatacacacctggtttcccaagctttaatcacacccagtttccacccagtaggtcctccgggctcccaaacatcccagtgcaaaccatctcacgcgctgctgccgaaaagctctttgggaacatggagggggactgtccctcagattggaagactgactcgacttgccgaatggtgacctcggagtctaagaacgtgaagctcaccgtgagcaacgtgctgaaagagattaaaatcctgaatatcttcggcgttattaagggatttgtcgagcctgatcattatgtggtggtgggggcccagagggatgcctgggggcccggagccgcgaaaagcggcgtcggcactgctttactgctcaaactggctcaaatgttttccgatatggtgctcaaagacggattccaaccgtcacgttctatcatcttcgccagctggtccgcaggcgacttcgggagcgtaggggctactgaatggctagaggggtatctgtcaagtttacacctcaaagcattcacctatattaacttagataaggctgtgctgggcacctccaacttcaaagttagtgcatcccccctcctctataccttgattgaaaaaacaatgcagaacgttaagcaccctgtgaccggtcagttcctgtatcaggattccaattgggcttccaaggtggaaaaactcacacttgacaacgcggcctttccatttctggcttacagcggcatcccggcagtcagcttttgcttctgcgaagatactgactatccatacctgggcacaaccatggacacatacaaagaattgatcgagcggattccagaactgaacaaagtagccagagccgccgctgaggttgcaggacagttcgtgatcaaattaacgcatgatgtggagctcaacttggactatgaacgctataactctcagttgctgtcttttgtgcgcgaccttaatcagtatcgggcagatatcaaggagatgggacttagcctgcaatggctgtattctgcccgaggcgatttttttcgggctacctctcggctcaccaccgactttggtaacgccgagaaaacagaccgttttgttatgaaaaagttgaacgatagagtcatgcgcgttgagtaccatttcctcagtccctatgtgtcaccaaaggaaagcccttttaggcacgtcttctggggaagtggttcccacaccctaccggctctgttggagaacctcaagttaaggaaacaaaataatggagccttcaatgagaccctattccgcaatcaattggctctggctacgtggacaatccagggtgctgccaacgcactttccggcgacgtctgggatattgataacgaattctag

SEQ ID NO: 136474 - DNA, 2283 bp, Artificial Sequence
  derived and/or modified sequence
atgatggaccaggcccggagcgccttcagcaacctgttcggcggcgaaccattgtcctacactaggttcagtctggcacgccaagtggatggggacaatagccacgtcgagatgaagctcgcagttgacgaagaagaaaatgcagataacaacactaaggcgaatgttacaaaacccaagcgctgttctggaagcatctgttatggaactattgctgtcatcgtgttttttcttatcggattcatgatcggatacctgggctactgcaaaggggttgaaccaaagactgagtgcgaacggctggccggtaccgaaagtccagtgcgcgaggagccaggagaggacttcccagcagcccgcaggctgtattgggatgacctgaaacgcaagctgtcagaaaagttggatagtaccgatttcaccggtacgataaagctgctgaacgagaatagttatgtcccaagggaggccggctcacagaaggacgagaatctcgccctatacgttgagaatcaatttcgagagtttaagctgtcaaaagtgtggcgcgaccagcactttgttaaaattcaggtgaaggacagtgcccagaactctgttatcattgttgataagaacgggaggctggtatatctggttgagaatccaggaggctacgtggcatattcaaaagcagcgactgtgaccgggaagcttgtccatgcaaactttgggaccaagaaggactttgaagacctgtacacccccgttaacggcagcatcgtgattgttagagctggaaagatcaccttcgccgagaaggtagccaatgccgagtccctaaatgctatcggcgtcctgatttacatggatcagacaaagttcccaattgtgaacgcggagctgtcattctttggacacgcccacttgggcactggcgacccctatacccccgggtttcctagcttcaaccatacccagttccccccctccaggagctccggtttgcccaatataccagtccagactatatcaagggctgcagcggaaaaactgtttggaaacatggagggagactgcccttcagattggaaaacagactccacctgccggatggtaacttcagaatctaaaaacgtgaagcttaccgttagtaacgtcctgaaagagatcaagatcctgaatattttcggggtgattaagggattcgtagaacctgatcattatgttgtggttggagcccagagggatgcctggggaccaggggctgccaagagtggggtgggcaccgctctgcttctaaaattagcccaaatgttctccgacatggttctgaaggatgggttccaaccaagcagatccattatttttgcatcatggtcagcgggcgacttcgggtctgtaggagcgaccgagtggctcgagggatacctatcctctttacacctgaaggcgttcacttacattaatctggacaaggccgtgctgggtacttcgaactttaaagtcagcgcttcacctctactctacaccctcatagagaagaccatgcaaaacgtgaagcacccggtaactggacagttcttatatcaggacagcaactgggctagtaaagtggagaagctgacacttgataatgctgccttcccattccttgcatacagtggtatccccgctgtcagcttttgtttttgtgaagataccgattacccttatctcggcactaccatggacacatataaagagctgatcgaaagaatcccggaattaaataaagtggcccgagctgccgcagaagtggccggacagtttgtcattaaactgacccacgacgtggaattgaacctggattacgaaagatataattctcagttgttatccttcgtgagagatctcaatcagtatcgggcagacatcaaggaaatgggcctgtctctgcagtggctctactctgcaagaggcgatttttttcgggcaacaagtcgtctgacaactgattttggtaacgctgaaaagactgatcggttcgtaatgaagaagctcaacgaccgggtaatgagggtggagtatcatttcctgagtccatacgtcagtccgaaggagagtcctttcaggcacgtgttttgggggtcaggatctcataccctacctgctctccttgaaaatttaaagctaagaaagcaaaacaacggtgccttcaatgaaacgttattcagaaaccagctcgcactggccacatggaccatccagggcgcagcgaacgccttatccggcgatgtatgggacatcgataatgaattctag

SEQ ID NO: 136475 - DNA, 2283 bp, Artificial Sequence
  derived and/or modified sequence
atgatggaccaggccagatcggccttctcgaacctgtttgggggagagcctctaagttacaccagattctcattagctcgccaggttgatggtgacaattcacacgtcgagatgaaactagccgtcgatgaggaagagaatgctgacaacaacacaaaggctaatgtgacaaagccaaagagatgttctgggagcatctgctacggcacaatagcagtgatcgtatttttcctcattggcttcatgattggctatctgggctattgtaagggggtggaaccgaagactgaatgtgaacgactggccggaactgagagccctgttcgcgaggaacccggagaggattttccggctgctaggagattgtattgggatgatctcaagagaaaactaagtgaaaagctagattctacagacttcacaggaaccataaagcttctgaatgaaaatagttacgtgccccgagaagcgggttctcagaaagacgagaatctggctctgtacgttgagaatcagttccgtgagtttaaactttctaaagtctggcgcgatcagcattttgtcaagattcaagtgaaggacagcgcccagaattctgtaatcatcgtcgacaagaacggcaggctggtgtatttagtggaaaatccaggcggatacgtggcctatagtaaagcagccacagtgactggcaaactcgtgcacgcaaactttgggactaaaaaagactttgaggacctttatactcccgtgaacgggtccattgtaattgttcgcgcaggcaagattacctttgcagaaaaggtcgcaaatgcggagtcacttaacgcaatcggcgtcctgatctacatggatcagacgaagttccctatagtaaacgccgaactcagcttttttggacacgcccatctggggaccggagacccctatactcctggttttccctcttttaaccatacgcaattccctccttctcggtcatctggcctgccaaacatccccgtgcaaacaatctcccgtgccgcagctgagaagctgttcggaaacatggagggcgactgtccgtcggattggaagaccgactccacgtgtcgaatggtgacctctgaaagcaagaacgtcaaactaacagtctccaatgtgctgaaggagattaaaattttgaacatatttggggtgataaaagggttcgtcgagcctgatcattacgtggtggtcggtgctcagcgcgatgcatgggggccaggagccgctaaaagcggagttggcactgctctcctgctgaaactcgctcagatgtttagtgacatggtgttgaaagacggattccagccaagcaggagcattatcttcgcctcatggagtgcaggggatttcggatcggtaggagccactgaatggttggagggttaccttagctcactgcacctcaaggcctttacttatatcaatctggacaaagctgtgcttgggacgtctaacttcaaggtgtccgcctccccattattgtatacgctgatagaaaaaaccatgcagaatgtgaagcaccctgtgacgggacaattcctttaccaggatagtaattgggcttctaaagtcgaaaagctgaccctggacaatgcagcattcccgttcctggcctatagcggaatccctgctgtcagtttttgtttctgtgaggacaccgattacccttatctcggcaccacaatggatacctacaaggagctgattgagcggatccccgagttgaataaagtggctcgggcagctgcagaggttgccggtcagttcgtgattaaactgactcacgatgtggaattgaacttagattatgagcggtacaacagccagcttctctcatttgtccgggatttgaaccagtatagggcagacattaaagagatgggcctttcactgcagtggctgtactccgcgaggggagactttttcagagcaaccagcaggctcaccactgattttggcaatgctgaaaagaccgatcggttcgtcatgaaaaaactaaatgatcgtgtaatgcgggtggaatatcactttttgagcccctacgtatcgcccaaagagagcccattcaggcacgtattctggggatctggtagccataccctaccagccctgctcgagaatttaaaattgcggaaacagaataacggagcgttcaacgagactctgttccggaaccagttggcactagcgacttggactatacagggcgctgctaacgccctgtcaggcgatgtgtgggatatcgacaatgagttctag

SEQ ID NO: 136476 - DNA, 2283 bp, Artificial Sequence
  derived and/or modified sequence
atgatggatcaagcccgaagcgctttctcaaacctgttcggaggtgagccgctcagctatacgaggttttcccttgcccgtcaggtggacggcgataattcacatgtcgagatgaaactcgcggtagatgaggaggagaatgcagataataataccaaggccaatgttactaagcccaagcgctgttccggctcgatctgttacgggactattgctgttattgtgttttttcttatcggatttatgatcggctacctgggatactgtaagggcgtggagccgaaaacagaatgcgaaagactcgctggcacggagtcgcccgttcgggaagaaccaggcgaggatttccccgcagcaaggaggttgtactgggatgatctgaaacgcaagctgtctgagaagctggactctactgacttcaccggcactattaagctgttgaatgagaacagttacgtgccgcgtgaagcaggatcccaaaaagacgaaaatctggctctttacgtagagaaccagtttagagaattcaaactatctaaagtctggcgggaccagcacttcgtgaaaattcaggtaaaagattccgctcagaacagcgttatcattgtggacaagaatggacgccttgtctatctggtggagaatcccggaggttacgtggcatacagtaaggcagccactgtcaccggcaagctggtccacgctaactttgggacaaaaaaagatttcgaggatctgtacacacccgttaacggctcaatcgtgatcgtgcgagcaggtaagataaccttcgcggaaaaggtggctaacgcagaaagcctgaatgctatcggggtcttaatttatatggaccagaccaagttccctatagtgaatgctgagctttcattctttggacacgcacatcttggaacaggggatccatacactcctggcttcccaagctttaatcatacccagttcccgccatctaggagttccggccttcccaatatccccgttcaaactattagtcgcgcagcagccgagaagctgtttggcaatatggaaggtgattgtccctctgattggaagacagattctacatgcagaatggttacatccgaatctaagaacgtcaagctcaccgtgagtaacgtgctgaaggagattaaaattctgaacatatttggggtcatcaagggattcgtggaaccagaccactatgtggtagttggggcacaacgagatgcttggggccctggagctgccaagtcaggagtaggcacagccttgctcctgaaacttgctcagatgttctcagacatggtcctgaaggatggctttcagcctagtcgatccatcatcttcgcgagctggtcagccggagacttcggctccgtcggcgcaacagaatggcttgaaggctacctctcttccctgcacctaaaagcattcacctacataaacctggataaggcggtgctgggcaccagcaattttaaggtgtccgccagccctttactgtacacccttatagagaaaaccatgcaaaacgttaagcatcctgtgacaggacagttcctgtatcaggattccaactgggcctctaaagtcgaaaagctaaccctcgataatgccgcattcccttttttagcgtacagtgggattcccgctgtgagtttttgcttttgcgaggacaccgactacccctatttgggcactaccatggatacatacaaggagctcatagagagaatacccgaattaaacaaggtagcccgagccgcagctgaggtggccggacaatttgtgataaagcttacacatgatgtggagctcaatttagactatgaacggtataactcacagttgctttccttcgtccgagatctgaatcaatatagggctgacattaaggagatggggctttcccttcagtggttgtacagtgccaggggcgactttttcagggccacctctcggttaactacagactttgggaatgcagagaagacagataggttcgtgatgaaaaagctgaacgaccgggtgatgcgagttgagtaccactttctctcgccctatgtgtctccaaaagagtccccttttcgccatgtcttttggggaagtggctctcatacattaccagctctactggagaatttgaaactccggaaacagaataacggtgcctttaatgagaccctgtttcggaatcagctggccctggcgacttggacaatacagggagccgctaatgccttatctggggacgtttgggacattgataacgaattctag

SEQ ID NO: 136477 - DNA, 42 bp, Artificial Sequence
  derived and/or modified sequence
atggatcaggccaggagcgccttttcaaacctggatctgtag

SEQ ID NO: 136478 - DNA, 5111 bp, Artificial Sequence
  derived and/or modified sequence
ctcgcgagcgtacgtgcctcaggaagtgacgcacagcccccctgggggccgggggcggggccaggctataaaccgccggttaggggccgccatcccctcagagcgtcgggatatcgggtggcggctcgggacggaggacgcgctagtgttcttctgtgtggcagttcagaatgatggatcaagctagatcagcattctctaacttgtttggtggagaaccattgtcatatacccggttcagcctggctcggcaagtagatggcgataacagtcatgtggagatgaaacttgctgtagatgaagaagaaaatgctgacaataacacaaaggccaatgtcacaaaaccaaaaaggtgtagtggaagtatctgctatgggactattgctgtgatcgtctttttcttgattggatttatgattggctacttgggctattgtaaaggggtagaaccaaaaactgagtgtgagagactggcaggaaccgagtctccagtgagggaggagccaggagaggacttccctgcagcacgtcgcttatattgggatgacctgaagagaaagttgtcggagaaactggacagcacagacttcaccggcaccatcaagctgctgaatgaaaattcatatgtccctcgtgaggctggatctcaaaaagatgaaaatcttgcgttgtatgttgaaaatcaatttcgtgaatttaaactcagcaaagtctggcgtgatcaacattttgttaagattcaggtcaaagacagcgctcaaaactcggtgatcatagttgataagaacggtagacttgtttacctggtggagaatcctgggggttatgtggcgtatagtaaggctgcaacagttactggtaaactggtccatgctaattttggtactaaaaaagattttgaggatttatacactcctgtgaatggatctatagtgattgtcagagcagggaaaatcacctttgcagaaaaggttgcaaatgctgaaagcttaaatgcaattggtgtgttgatatacatggaccagactaaatttcccattgttaacgcagaactttcattctttggacatgctcatctggggacaggtgacccttacacacctggattcccttccttcaatcacactcagtttccaccatctcggtcatcaggattgcctaatatacctgtccagacaatctccagagctgctgcagaaaagctgtttgggaatatggaaggagactgtccctctgactggaaaacagactctacatgtaggatggtaacctcagaaagcaagaatgtgaagctcactgtgagcaatgtgctgaaagagataaaaattcttaacatctttggagttattaaaggctttgtagaaccagatcactatgttgtagttggggcccagagagatgcatggggccctggagctgcaaaatccggtgtaggcacagctctcctattgaaacttgcccagatgttctcagatatggtcttaaaagatgggtttcagcccagcagaagcattatctttgccagttggagtgctggagactttggatcggttggtgccactgaatggctagagggatacctttcgtccctgcatttaaaggctttcacttatattaatctggataaagcggttcttggtaccagcaacttcaaggtttctgccagcccactgttgtatacgcttattgagaaaacaatgcaaaatgtgaagcatccggttactgggcaatttctatatcaggacagcaactgggccagcaaagttgagaaactcactttagacaatgctgctttccctttccttgcatattctggaatcccagcagtttctttctgtttttgcgaggacacagattatccttatttgggtaccaccatggacacctataaggaactgattgagaggattcctgagttgaacaaagtggcacgagcagctgcagaggtcgctggtcagttcgtgattaaactaacccatgatgttgaattgaacctggactatgagaggtacaacagccaactgctttcatttgtgagggatctgaaccaatacagagcagacataaaggaaatgggcctgagtttacagtggctgtattctgctcgtggagacttcttccgtgctacttccagactaacaacagatttcgggaatgctgagaaaacagacagatttgtcatgaagaaactcaatgatcgtgtcatgagagtggagtatcacttcctctctccctacgtatctccaaaagagtctcctttccgacatgtcttctggggctccggctctcacacgctgccagctttactggagaacttgaaactgcgtaaacaaaataacggtgcttttaatgaaacgctgttcagaaaccagttggctctagctacttggactattcagggagctgcaaatgccctctctggtgacgtttgggacattgacaatgagttttaaatgtgatacccatagcttccatgagaacagcagggtagtctggtttctagacttgtgctgatcgtgctaaattttcagtagggctacaaaacctgatgttaaaattccatcccatcatcttggtactactagatgtctttaggcagcagcttttaatacagggtagataacctgtacttcaagttaaagtgaataaccacttaaaaaatgtccatgatggaatattcccctatctctagaattttaagtgctttgtaatgggaactgcctctttcctgttgttgttaatgaaaatgtcagaaaccagttatgtgaatgatctctctgaatcctaagggctggtctctgctgaaggttgtaagtggtcgcttactttgagtgatcctccaacttcatttgatgctaaataggagataccaggttgaaagaccttctccaaatgagatctaagcctttccataaggaatgtagctggtttcctcattcctgaaagaaacagttaactttcagaagagatgggcttgttttcttgccaatgaggtctgaaatggaggtccttctgctggataaaatgaggttcaactgttgattgcaggaataaggccttaatatgttaacctcagtgtcatttatgaaaagaggggaccagaagccaaagacttagtatattttcttttcctctgtcccttcccccataagcctccatttagttctttgttatttttgtttcttccaaagcacattgaaagagaaccagtttcaggtgtttagttgcagactcagtttgtcagactttaaagaataatatgctgccaaattttggccaaagtgttaatcttaggggagagctttctgtccttttggcactgagatatttattgtttatttatcagtgacagagttcactataaatggtgtttttttaatagaatataattatcggaagcagtgccttccataattatgacagttatactgtcggttttttttaaataaaagcagcatctgctaataaaacccaacagatactggaagttttgcatttatggtcaacacttaagggttttagaaaacagccgtcagccaaatgtaattgaataaagttgaagctaagatttagagatgaattaaatttaattaggggttgctaagaagcgagcactgaccagataagaatgctggttttcctaaatgcagtgaattgtgaccaagttataaatcaatgtcacttaaaggctgtggtagtactcctgcaaaattttatagctcagtttatccaaggtgtaactctaattcccattttgcaaaatttccagtacctttgtcacaatcctaacacattatcgggagcagtgtcttccataatgtataaagaacaaggtagtttttacctaccacagtgtctgtatcggagacagtgatctccatatgttacactaagggtgtaagtaattatcgggaacagtgtttcccataattttcttcatgcaatgacatcttcaaagcttgaagatcgttagtatctaacatgtatcccaactcctataattccctatcttttagttttagttgcagaaacattttgtggtcattaagcattgggtgggtaaattcaaccactgtaaaatgaaattactacaaaatttgaaatttagcttgggtttttgttacctttatggtttctccaggtcctctacttaatgagatagtagcatacatttataatgtttgctattgacaagtcattttaactttatcacattatttgcatgttacctcctataaacttagtgcggacaagttttaatccagaattgaccttttgacttaaagcagagggactttgtatagaaggtttgggggctgtggggaaggagagtcccctgaaggtctgacacgtctgcctacccattcgtggtgatcaattaaatgtaggtatgaataagttcgaagctccgtgagtgaaccatcattataaacgtgatgatcagctgtttgtcatagggcagttggaaacggcctcctagggaaaagttcatagggtctcttcaggttcttagtgtcacttacctagatttacagcctcacttgaatgtgtcactactcacagtctctttaatcttcagttttatctttaatctcctcttttatcttggactgacatttagcgtagctaagtgaaaaggtcatagctgagattcctggttcgggtgttacgcacacgtacttaaatgaaagcatgtggcatgttcatcgtataacacaatatgaatacagggcatgcattttgcagcagtgagtctcttcagaaaacccttttctacagttagggttgagttacttcctatcaagccagtacgtgctaacaggctcaatattcctgaatgaaatatcagactagtgacaagctcctggtcttgagatgtcttctcgttaaggagatgggccttttggaggtaaaggataaaatgaatgagttctgtcatgattcactattctagaacttgcatgacctttactgtgttagctctttgaatgttcttgaaattttagactttctttgtaaacaaatgatatgtccttatcattgtataaaagctgttatgtgcaacagtgtggagattccttgtctgatttaataaaatacttaaacactga

SEQ ID NO: 136479 - DNA, 5032 bp, Artificial Sequence
  derived and/or modified sequence
agagcgtcgggatatcgggtggcggctcgggacggaggacgcgctagtgtgagtgcgggcttctagaactacaccgaccctcgtgtcctcccttcatcctgcggggctggctggagcggccgctccggtgctgtccagcagccatagggagccgcacggggagcgggaaagcggtcgcggccccaggcggggcggccgggatggagcggggccgcgagcctgtggggaaggggctgtggcggcgcctcgagcggctgcaggttcttctgtgtggcagttcagaatgatggatcaagctagatcagcattctctaacttgtttggtggagaaccattgtcatatacccggttcagcctggctcggcaagtagatggcgataacagtcatgtggagatgaaacttgctgtagatgaagaagaaaatgctgacaataacacaaaggccaatgtcacaaaaccaaaaaggtgtagtggaagtatctgctatgggactattgctgtgatcgtctttttcttgattggatttatgattggctacttgggctattgtaaaggggtagaaccaaaaactgagtgtgagagactggcaggaaccgagtctccagtgagggaggagccaggagaggacttccctgcagcacgtcgcttatattgggatgacctgaagagaaagttgtcggagaaactggacagcacagacttcaccggcaccatcaagctgctgaatgaaaattcatatgtccctcgtgaggctggatctcaaaaagatgaaaatcttgcgttgtatgttgaaaatcaatttcgtgaatttaaactcagcaaagtctggcgtgatcaacattttgttaagattcaggtcaaagacagcgctcaaaactcggtgatcatagttgataagaacggtagacttgtttacctggtggagaatcctgggggttatgtggcgtatagtaaggctgcaacagttactggtaaactggtccatgctaattttggtactaaaaaagattttgaggatttatacactcctgtgaatggatctatagtgattgtcagagcagggaaaatcacctttgcagaaaaggttgcaaatgctgaaagcttaaatgcaattggtgtgttgatatacatggaccagactaaatttcccattgttaacgcagaactttcattctttggacatgctcatctggggacaggtgacccttacacacctggattcccttccttcaatcacactcagtttccaccatctcggtcatcaggattgcctaatatacctgtccagacaatctccagagctgctgcagaaaagctgtttgggaatatggaaggagactgtccctctgactggaaaacagactctacatgtaggatggtaacctcagaaagcaagaatgtgaagctcactgtgagcaatgtgctgaaagagataaaaattcttaacatctttggagttattaaaggctttgtagaaccagatcactatgttgtagttggggcccagagagatgcatggggccctggagctgcaaaatccggtgtaggcacagctctcctattgaaacttgcccagatgttctcagatatggtcttaaaagatgggtttcagcccagcagaagcattatctttgccagttggagtgctggagactttggatcggttggtgccactgaatggctagagggatacctttcgtccctgcatttaaaggctttcacttatattaatctggataaagcggttcttggtaccagcaacttcaaggtttctgccagcccactgttgtatacgcttattgagaaaacaatgcaaaatgtgaagcatccggttactgggcaatttctatatcaggacagcaactgggccagcaaagttgagaaactcactttagacaatgctgctttccctttccttgcatattctggaatcccagcagtttctttctgtttttgcgaggacacagattatccttatttgggtaccaccatggacacctataaggaactgattgagaggattcctgagttgaacaaagtggcacgagcagctgcagaggtcgctggtcagttcgtgattaaactaacccatgatgttgaattgaacctggactatgagaggtacaacagccaactgctttcatttgtgagggatctgaaccaatacagagcagacataaaggaaatgggcctgagtttacagtggctgtattctgctcgtggagacttcttccgtgctacttccagactaacaacagatttcgggaatgctgagaaaacagacagatttgtcatgaagaaactcaatgatcgtgtcatgagagtggagtatcacttcctctctccctacgtatctccaaaagagtctcctttccgacatgtcttctggggctccggctctcacacgctgccagctttactggagaacttgaaactgcgtaaacaaaataacggtgcttttaatgaaacgctgttcagaaaccagttggctctagctacttggactattcagggagctgcaaatgccctctctggtgacgtttgggacattgacaatgagttttaaatgtgatacccatagcttccatgagaacagcagggtagtctggtttctagacttgtgctgatcgtgctaaattttcagtagggctacaaaacctgatgttaaaattccatcccatcatcttggtactactagatgtctttaggcagcagcttttaatacagggtagataacctgtacttcaagttaaagtgaataaccacttaaaaaatgtccatgatggaatattcccctatctctagaattttaagtgctttgtaatgggaactgcctctttcctgttgttgttaatgaaaatgtcagaaaccagttatgtgaatgatctctctgaatcctaagggctggtctctgctgaaggttgtaagtggtcgcttactttgagtgatcctccaacttcatttgatgctaaataggagataccaggttgaaagaccttctccaaatgagatctaagcctttccataaggaatgtagctggtttcctcattcctgaaagaaacagttaactttcagaagagatgggcttgttttcttgccaatgaggtctgaaatggaggtccttctgctggataaaatgaggttcaactgttgattgcaggaataaggccttaatatgttaacctcagtgtcatttatgaaaagaggggaccagaagccaaagacttagtatattttcttttcctctgtcccttcccccataagcctccatttagttctttgttatttttgtttcttccaaagcacattgaaagagaaccagtttcaggtgtttagttgcagactcagtttgtcagactttaaagaataatatgctgccaaattttggccaaagtgttaatcttaggggagagctttctgtccttttggcactgagatatttattgtttatttatcagtgacagagttcactataaatggtgtttttttaatagaatataattatcggaagcagtgccttccataattatgacagttatactgtcggttttttttaaataaaagcagcatctgctaataaaacccaacagatactggaagttttgcatttatggtcaacacttaagggttttagaaaacagccgtcagccaaatgtaattgaataaagttgaagctaagatttagagatgaattaaatttaattaggggttgctaagaagcgagcactgaccagataagaatgctggttttcctaaatgcagtgaattgtgaccaagttataaatcaatgtcacttaaaggctgtggtagtactcctgcaaaattttatagctcagtttatccaaggtgtaactctaattcccattttgcaaaatttccagtacctttgtcacaatcctaacacattatcgggagcagtgtcttccataatgtataaagaacaaggtagtttttacctaccacagtgtctgtatcggagacagtgatctccatatgttacactaagggtgtaagtaattatcgggaacagtgtttcccataattttcttcatgcaatgacatcttcaaagcttgaagatcgttagtatctaacatgtatcccaactcctataattccctatcttttagttttagttgcagaaacattttgtggtcattaagcattgggtgggtaaattcaaccactgtaaaatgaaattactacaaaatttgaaatttagcttgggtttttgttacctttatggtttctccaggtcctctacttaatgagatagtagcatacatttataatgtttgctattgacaagtcattttaactttatcacattatttgcatgttacctcctataaacttagtgcggacaagttttaatccagaattgaccttttgacttaaagcagagggactttgtatagaaggtttgggggctgtggggaaggagagtcccctgaaggtctgacacgtctgcctacccattcgtggtgatcaattaaatgtaggtatgaataagttcgaagctccgtgagtgaaccatcattataaacgtgatgatcagctgtttgtcatagggcagttggaaacggcctcctagggaaaagttcatagggtctcttcaggttcttagtgtcacttacctagatttacagcctcacttgaatgtgtcactactcacagtctctttaatcttcagttttatctttaatctcctcttttatcttggactgacatttagcgtagctaagtgaaaaggtcatagctgagattcctggttcgggtgttacgcacacgtacttaaatgaaagcatgtggcatgttcatcgtataacacaatatgaatacagggcatgcattttgcagcagtgagtctcttcagaaaacccttttctacagttagggttgagttacttcctatcaagccagtacgtgctaacaggctcaatattcctgaatgaaatatcagactagtgacaagctcctggtcttgagatgtcttctcgttaaggagatgggccttttggaggtaaaggata

SEQ ID NO: 136480 - DNA, 4809 bp, Artificial Sequence
  derived and/or modified sequence
agagcgtcgggatatcgggtggcggctcgggacggaggacgcgctagtgttcttctgtgtggcagttcagaatgatggatcaagctagatcagcattctctaacttggatttatgattggctacttgggctattgtaaaggggtagaaccaaaaactgagtgtgagagactggcaggaaccgagtctccagtgagggaggagccaggagaggacttccctgcagcacgtcgcttatattgggatgacctgaagagaaagttgtcggagaaactggacagcacagacttcaccggcaccatcaagctgctgaatgaaaattcatatgtccctcgtgaggctggatctcaaaaagatgaaaatcttgcgttgtatgttgaaaatcaatttcgtgaatttaaactcagcaaagtctggcgtgatcaacattttgttaagattcaggtcaaagacagcgctcaaaactcggtgatcatagttgataagaacggtagacttgtttacctggtggagaatcctgggggttatgtggcgtatagtaaggctgcaacagttactggtaaactggtccatgctaattttggtactaaaaaagattttgaggatttatacactcctgtgaatggatctatagtgattgtcagagcagggaaaatcacctttgcagaaaaggttgcaaatgctgaaagcttaaatgcaattggtgtgttgatatacatggaccagactaaatttcccattgttaacgcagaactttcattctttggacatgctcatctggggacaggtgacccttacacacctggattcccttccttcaatcacactcagtttccaccatctcggtcatcaggattgcctaatatacctgtccagacaatctccagagctgctgcagaaaagctgtttgggaatatggaaggagactgtccctctgactggaaaacagactctacatgtaggatggtaacctcagaaagcaagaatgtgaagctcactgtgagcaatgtgctgaaagagataaaaattcttaacatctttggagttattaaaggctttgtagaaccagatcactatgttgtagttggggcccagagagatgcatggggccctggagctgcaaaatccggtgtaggcacagctctcctattgaaacttgcccagatgttctcagatatggtcttaaaagatgggtttcagcccagcagaagcattatctttgccagttggagtgctggagactttggatcggttggtgccactgaatggctagagggatacctttcgtccctgcatttaaaggctttcacttatattaatctggataaagcggttcttggtaccagcaacttcaaggtttctgccagcccactgttgtatacgcttattgagaaaacaatgcaaaatgtgaagcatccggttactgggcaatttctatatcaggacagcaactgggccagcaaagttgagaaactcactttagacaatgctgctttccctttccttgcatattctggaatcccagcagtttctttctgtttttgcgaggacacagattatccttatttgggtaccaccatggacacctataaggaactgattgagaggattcctgagttgaacaaagtggcacgagcagctgcagaggtcgctggtcagttcgtgattaaactaacccatgatgttgaattgaacctggactatgagaggtacaacagccaactgctttcatttgtgagggatctgaaccaatacagagcagacataaaggaaatgggcctgagtttacagtggctgtattctgctcgtggagacttcttccgtgctacttccagactaacaacagatttcgggaatgctgagaaaacagacagatttgtcatgaagaaactcaatgatcgtgtcatgagagtggagtatcacttcctctctccctacgtatctccaaaagagtctcctttccgacatgtcttctggggctccggctctcacacgctgccagctttactggagaacttgaaactgcgtaaacaaaataacggtgcttttaatgaaacgctgttcagaaaccagttggctctagctacttggactattcagggagctgcaaatgccctctctggtgacgtttgggacattgacaatgagttttaaatgtgatacccatagcttccatgagaacagcagggtagtctggtttctagacttgtgctgatcgtgctaaattttcagtagggctacaaaacctgatgttaaaattccatcccatcatcttggtactactagatgtctttaggcagcagcttttaatacagggtagataacctgtacttcaagttaaagtgaataaccacttaaaaaatgtccatgatggaatattcccctatctctagaattttaagtgctttgtaatgggaactgcctctttcctgttgttgttaatgaaaatgtcagaaaccagttatgtgaatgatctctctgaatcctaagggctggtctctgctgaaggttgtaagtggtcgcttactttgagtgatcctccaacttcatttgatgctaaataggagataccaggttgaaagaccttctccaaatgagatctaagcctttccataaggaatgtagctggtttcctcattcctgaaagaaacagttaactttcagaagagatgggcttgttttcttgccaatgaggtctgaaatggaggtccttctgctggataaaatgaggttcaactgttgattgcaggaataaggccttaatatgttaacctcagtgtcatttatgaaaagaggggaccagaagccaaagacttagtatattttcttttcctctgtcccttcccccataagcctccatttagttctttgttatttttgtttcttccaaagcacattgaaagagaaccagtttcaggtgtttagttgcagactcagtttgtcagactttaaagaataatatgctgccaaattttggccaaagtgttaatcttaggggagagctttctgtccttttggcactgagatatttattgtttatttatcagtgacagagttcactataaatggtgtttttttaatagaatataattatcggaagcagtgccttccataattatgacagttatactgtcggttttttttaaataaaagcagcatctgctaataaaacccaacagatactggaagttttgcatttatggtcaacacttaagggttttagaaaacagccgtcagccaaatgtaattgaataaagttgaagctaagatttagagatgaattaaatttaattaggggttgctaagaagcgagcactgaccagataagaatgctggttttcctaaatgcagtgaattgtgaccaagttataaatcaatgtcacttaaaggctgtggtagtactcctgcaaaattttatagctcagtttatccaaggtgtaactctaattcccattttgcaaaatttccagtacctttgtcacaatcctaacacattatcgggagcagtgtcttccataatgtataaagaacaaggtagtttttacctaccacagtgtctgtatcggagacagtgatctccatatgttacactaagggtgtaagtaattatcgggaacagtgtttcccataattttcttcatgcaatgacatcttcaaagcttgaagatcgttagtatctaacatgtatcccaactcctataattccctatcttttagttttagttgcagaaacattttgtggtcattaagcattgggtgggtaaattcaaccactgtaaaatgaaattactacaaaatttgaaatttagcttgggtttttgttacctttatggtttctccaggtcctctacttaatgagatagtagcatacatttataatgtttgctattgacaagtcattttaactttatcacattatttgcatgttacctcctataaacttagtgcggacaagttttaatccagaattgaccttttgacttaaagcagagggactttgtatagaaggtttgggggctgtggggaaggagagtcccctgaaggtctgacacgtctgcctacccattcgtggtgatcaattaaatgtaggtatgaataagttcgaagctccgtgagtgaaccatcattataaacgtgatgatcagctgtttgtcatagggcagttggaaacggcctcctagggaaaagttcatagggtctcttcaggttcttagtgtcacttacctagatttacagcctcacttgaatgtgtcactactcacagtctctttaatcttcagttttatctttaatctcctcttttatcttggactgacatttagcgtagctaagtgaaaaggtcatagctgagattcctggttcgggtgttacgcacacgtacttaaatgaaagcatgtggcatgttcatcgtataacacaatatgaatacagggcatgcattttgcagcagtgagtctcttcagaaaacccttttctacagttagggttgagttacttcctatcaagccagtacgtgctaacaggctcaatattcctgaatgaaatatcagactagtgacaagctcctggtcttgagatgtcttctcgttaaggagatgggccttttggaggtaaaggataaaatgaatgagttctgtcatgattcactattctagaacttgcatgacctttactgtgttagctctttgaatgttcttgaaattttagactttctttgtaaacaaatgatatgtccttatcattgtataaaagctgttatgtgcaacagtgtggagattccttgtctgatttaataaaatacttaaacactg

SEQ ID NO: 136481 - protein, 2768 aa, Artificial Sequence
  derived and/or modified sequence
MALVLEIFTLLASICWVSANIFEYQVDAQPLRPCELQRETAFLKQADYVPQCAEDGSFQTVQCQNDGRSCWCVGANGSEVLGSRQPGRPVACLSFCQLQKQQILLSGYINSTDTSYLPQCQDSGDYAPVQCDVQQVQCWCVDAEGMEVYGTRQLGRPKRCPRSCEIRNRRLLHGVGDKSPPQCSAEGEFMPVQCKFVNTTDMMIFDLVHSYNRFPDAFVTFSSFQRRFPEVSGYCHCADSQGRELAETGLELLLDEIYDTIFAGLDLPSTFTETTLYRILQRRFLAVQSVISGRFRCPTKCEVERFTATSFGHPYVPSCRRNGDYQAVQCQTEGPCWCVDAQGKEMHGTRQQGEPPSCAEGQSCASERQQALSRLYFGTSGYFSQHDLFSSPEKRWASPRVARFATSCPPTIKELFVDSGLLRPMVEGQSQQFSVSENLLKEAIRAIFPSRGLARLALQFTTNPKRLQQNLFGGKFLVNVGQFNLSGALGTRGTFNFSQFFQQLGLASFLNGGRQEDLAKPLSVGLDSNSSTGTPEAAKKDGTMNKPTVGSFGFEINLQENQNALKFLASLLELPEFLLFLQHAISVPEDVARDLGDVMETVLSSQTCEQTPERLFVPSCTTEGSYEDVQCFSGECWCVNSWGKELPGSRVRGGQPRCPTDCEKQRARMQSLMGSQPAGSTLFVPACTSEGHFLPVQCFNSECYCVDAEGQAIPGTRSAIGKPKKCPTPCQLQSEQAFLRTVQALLSNSSMLPTLSDTYIPQCSTDGQWRQVQCNGPPEQVFELYQRWEAQNKGQDLTPAKLLVKIMSYREAASGNFSLFIQSLYEAGQQDVFPVLSQYPSLQDVPLAALEGKRPQPRENILLEPYLFWQILNGQLSQYPGSYSDFSTPLAHFDLRNCWCVDEAGQELEGMRSEPSKLPTCPGSCEEAKLRVLQFIRETEEIVSASNSSRFPLGESFLVAKGIRLRNEDLGLPPLFPPREAFAEQFLRGSDYAIRLAAQSTLSFYQRRRFSPDDSAGASALLRSGPYMPQCDAFGSWEPVQCHAGTGHCWCVDEKGGFIPGSLTARSLQIPQCPTTCEKSRTSGLLSSWKQARSQENPSPKDLFVPACLETGEYARLQASGAGTWCVDPASGEELRPGSSSSAQCPSLCNVLKSGVLSRRVSPGYVPACRAEDGGFSPVQCDQAQGSCWCVMDSGEEVPGTRVTGGQPACESPRCPLPFNASEVVGGTILCETISGPTGSAMQQCQLLCRQGSWSVFPPGPLICSLESGRWESQLPQPRACQRPQLWQTIQTQGHFQLQLPPGKMCSADYADLLQTFQVFILDELTARGFCQIQVKTFGTLVSIPVCNNSSVQVGCLTRERLGVNVTWKSRLEDIPVASLPDLHDIERALVGKDLLGRFTDLIQSGSFQLHLDSKTFPAETIRFLQGDHFGTSPRTWFGCSEGFYQVLTSEASQDGLGCVKCPEGSYSQDEECIPCPVGFYQEQAGSLACVPCPVGRTTISAGAFSQTHCVTDCQRNEAGLQCDQNGQYRASQKDRGSGKAFCVDGEGRRLPWWETEAPLEDSQCLMMQKFEKVPESKVIFDANAPVAVRSKVPDSEFPVMQCLTDCTEDEACSFFTVSTTEPEISCDFYAWTSDNVACMTSDQKRDALGNSKATSFGSLRCQVKVRSHGQDSPAVYLKKGQGSTTTLQKRFEPTGFQNMLSGLYNPIVFSASGANLTDAHLFCLLACDRDLCCDGFVLTQVQGGAIICGLLSSPSVLLCNVKDWMDPSEAWANATCPGVTYDQESHQVILRLGDQEFIKSLTPLEGTQDTFTNFQQVYLWKDSDMGSRPESMGCRKDTVPRPASPTEAGLTTELFSPVDLNQVIVNGNQSLSSQKHWLFKHLFSAQQANLWCLSRCVQEHSFCQLAEITESASLYFTCTLYPEAQVCDDIMESNAQGCRLILPQMPKALFRKKVILEDKVKNFYTRLPFQKLMGISIRNKVPMSEKSISNGFFECERRCDADPCCTGFGFLNVSQLKGGEVTCLTLNSLGIQMCSEENGGAWRILDCGSPDIEVHTYPFGWYQKPIAQNNAPSFCPLVVLPSLTEKVSLDSWQSLALSSVVVDPSIRHFDVAHVSTAATSNFSAVRDLCLSECSQHEACLITTLQTQPGAVRCMFYADTQSCTHSLQGQNCRLLLREEATHIYRKPGISLLSYEASVPSVPISTHGRLLGRSQAIQVGTSWKQVDQFLGVPYAAPPLAERRFQAPEPLNWTGSWDASKPRASCWQPGTRTSTSPGVSEDCLYLNVFIPQNVAPNASVLVFFHNTMDREESEGWPAIDGSFLAAVGNLIVVTASYRVGVFGFLSSGSGEVSGNWGLLDQVAALTWVQTHIRGFGGDPRRVSLAADRGGADVASIHLLTARATNSQLFRRAVLMGGSALSPAAVISHERAQQQAIALAKEVSCPMSSSQEVVSCLRQKPANVLNDAQTKLLAVSGPFHYWGPVIDGHFLREPPARALKRSLWVEVDLLIGSSQDDGLINRAKAVKQFEESRGRTSSKTAFYQALQNSLGGEDSDARVEAAATWYYSLEHSTDDYASFSRALENATRDYFIICPIIDMASAWAKRARGNVFMYHAPENYGHGSLELLADVQFALGLPFYPAYEGQFSLEEKSLSLKIMQYFSHFIRSGNPNYPYEFSRKVPTFATPWPDFVPRAGGENYKEFSELLPNRQGLKKADCSFWSKYISSLKTSADGAKGGQSAESEEEELTAGSGLREDLLSLQEPGSKTYSK

SEQ ID NO: 136482 - protein, 2711 aa, Artificial Sequence
  derived and/or modified sequence
MALVLEIFTLLASICWVSANIFEYQVDAQPLRPCELQRETAFLKQADYVPQCAEDGSFQTVQCQNDGRSCWCVGANGSEVLGSRQPGRPVACLSFCQLQKQQILLSGYINSTDTSYLPQCQDSGDYAPVQCDVQQVQCWCVDAEGMEVYGTRQLGRPKRCPRSCEIRNRRLLHGVGDKSPPQCSAEGEFMPVQCKFVNTTDMMIFDLVHSYNRFPDAFVTFSSFQRRFPEVSGYCHCADSQGRELAETGLELLLDEIYDTIFAGLDLPSTFTETTLYRILQRRFLAVQSVISGRFRCPTKCEVERFTATSFGHPYVPSCRRNGDYQAVQCQTEGPCWCVDAQGKEMHGTRQQGEPPSCAEGQSCASERQQALSRLYFGTSGYFSQHDLFSSPEKRWASPRVARFATSCPPTIKELFVDSGLLRPMVEGQSQQFSVSENLLKEAIRAIFPSRGLARLALQFTTNPKRLQQNLFGGKFLVNVGQFNLSGALGTRGTFNFSQFFQQLGLASFLNGGRQEDLAKPLSVGLDSNSSTGTPEAAKKDGTMNKPTVGSFGFEINLQENQNALKFLASLLELPEFLLFLQHAISVPEDVARDLGDVMETVLSSQTCEQTPERLFVPSCTTEGSYEDVQCFSGECWCVNSWGKELPGSRVRGGQPRCPTDCEKQRARMQSLMGSQPAGSTLFVPACTSEGHFLPVQCFNSECYCVDAEGQAIPGTRSAIGKPKKCPTPCQLQSEQAFLRTVQALLSNSSMLPTLSDTYIPQCSTDGQWRQVQCNGPPEQVFELYQRWEAQNKGQDLTPAKLLVKIMSYREAASGNFSLFIQSLYEAGQQDVFPVLSQYPSLQDVPLAALEGKRPQPRENILLEPYLFWQILNGQLSQYPGSYSDFSTPLAHFDLRNCWCVDEAGQELEGMRSEPSKLPTCPGSCEEAKLRVLQFIRETEEIVSASNSSRFPLGESFLVAKGIRLRNEDLGLPPLFPPREAFAEQFLRGSDYAIRLAAQSTLSFYQRRRFSPDDSAGASALLRSGPYMPQCDAFGSWEPVQCHAGTGHCWCVDEKGGFIPGSLTARSLQIPQCPTTCEKSRTSGLLSSWKQARSQENPSPKDLFVPACLETGEYARLQASGAGTWCVDPASGEELRPGSSSSAQCPSLCNVLKSGVLSRRVSPGYVPACRAEDGGFSPVQCDQAQGSCWCVMDSGEEVPGTRVTGGQPACESPRCPLPFNASEVVGGTILCETISGPTGSAMQQCQLLCRQGSWSVFPPGPLICSLESGRWESQLPQPRACQRPQLWQTIQTQGHFQLQLPPGKMCSADYADLLQTFQVFILDELTARGFCQIQVKTFGTLVSIPVCNNSSVQVGCLTRERLGVNVTWKSRLEDIPVASLPDLHDIERALVGKDLLGRFTDLIQSGSFQLHLDSKTFPAETIRFLQGDHFGTSPRTWFGCSEGFYQVLTSEASQDGLGCVKCPEGSYSQDEECIPCPVGFYQEQAGSLACVPCPVGRTTISAGAFSQTHLMQKFEKVPESKVIFDANAPVAVRSKVPDSEFPVMQCLTDCTEDEACSFFTVSTTEPEISCDFYAWTSDNVACMTSDQKRDALGNSKATSFGSLRCQVKVRSHGQDSPAVYLKKGQGSTTTLQKRFEPTGFQNMLSGLYNPIVFSASGANLTDAHLFCLLACDRDLCCDGFVLTQVQGGAIICGLLSSPSVLLCNVKDWMDPSEAWANATCPGVTYDQESHQVILRLGDQEFIKSLTPLEGTQDTFTNFQQVYLWKDSDMGSRPESMGCRKDTVPRPASPTEAGLTTELFSPVDLNQVIVNGNQSLSSQKHWLFKHLFSAQQANLWCLSRCVQEHSFCQLAEITESASLYFTCTLYPEAQVCDDIMESNAQGCRLILPQMPKALFRKKVILEDKVKNFYTRLPFQKLMGISIRNKVPMSEKSISNGFFECERRCDADPCCTGFGFLNVSQLKGGEVTCLTLNSLGIQMCSEENGGAWRILDCGSPDIEVHTYPFGWYQKPIAQNNAPSFCPLVVLPSLTEKVSLDSWQSLALSSVVVDPSIRHFDVAHVSTAATSNFSAVRDLCLSECSQHEACLITTLQTQPGAVRCMFYADTQSCTHSLQGQNCRLLLREEATHIYRKPGISLLSYEASVPSVPISTHGRLLGRSQAIQVGTSWKQVDQFLGVPYAAPPLAERRFQAPEPLNWTGSWDASKPRASCWQPGTRTSTSPGVSEDCLYLNVFIPQNVAPNASVLVFFHNTMDREESEGWPAIDGSFLAAVGNLIVVTASYRVGVFGFLSSGSGEVSGNWGLLDQVAALTWVQTHIRGFGGDPRRVSLAADRGGADVASIHLLTARATNSQLFRRAVLMGGSALSPAAVISHERAQQQAIALAKEVSCPMSSSQEVVSCLRQKPANVLNDAQTKLLAVSGPFHYWGPVIDGHFLREPPARALKRSLWVEVDLLIGSSQDDGLINRAKAVKQFEESRGRTSSKTAFYQALQNSLGGEDSDARVEAAATWYYSLEHSTDDYASFSRALENATRDYFIICPIIDMASAWAKRARGNVFMYHAPENYGHGSLELLADVQFALGLPFYPAYEGQFSLEEKSLSLKIMQYFSHFIRSGNPNYPYEFSRKVPTFATPWPDFVPRAGGENYKEFSELLPNRQGLKKADCSFWSKYISSLKTSADGAKGGQSAESEEEELTAGSGLREDLLSLQEPGSKTYSK

SEQ ID NO: 136483 - protein, 1574 aa, Artificial Sequence
  derived and/or modified sequence
IPRKPISKRPVRPSLPRSPRCPLPFNASEVVGGTILCETISGPTGSAMQQCQLLCRQGSWSVFPPGPLICSLESGRWESQLPQPRACQRPQLWQTIQTQGHFQLQLPPGKMCSADYADLLQTFQVFILDELTARGFCQIQVKTFGTLVSIPVCNNSSVQVGCLTRERLGVNVTWKSRLEDIPVASLPDLHDIERALVGKDLLGRFTDLIQSGSFQLHLDSKTFPAETIRFLQGDHFGTSPRTWFGCSEGFYQVLTSEASQDGLGCVKCPEGSYSQDEECIPCPVGFYQEQAGSLACVPCPVGRTTISAGAFSQTHCVTDCQRNEAGLQCDQNGQYRASQKDRGSGKAFCVDGEGRRLPWWETEAPLEDSQCLMMQKFEKVPESKVIFDANAPVAVRSKVPDSEFPVMQCLTDCTEDEACSFFTVSTTEPEISCDFYAWTSDNVACMTSDQKRDALGNSKATSFGSLRCQVKVRSHGQDSPAVYLKKGQGSTTTLQKRFEPTGFQNMLSGLYNPIVFSASGANLTDAHLFCLLACDRDLCCDGFVLTQVQGGAIICGLLSSPSVLLCNVKDWMDPSEAWANATCPGVTYDQESHQVILRLGDQEFIKSLTPLEGTQDTFTNFQQVYLWKDSDMGSRPESMGCRKDTVPRPASPTEAGLTTELFSPVDLNQVIVNGNQSLSSQKHWLFKHLFSAQQANLWCLSRCVQEHSFCQLAEITESASLYFTCTLYPEAQVCDDIMESNAQGCRLILPQMPKALFRKKVILEDKVKNFYTRLPFQKLMGISIRNKVPMSEKSISNGFFECERRCDADPCCTGFGFLNVSQLKGGEVTCLTLNSLGIQMCSEENGGAWRILDCGSPDIEVHTYPFGWYQKPIAQNNAPSFCPLVVLPSLTEKVSLDSWQSLALSSVVVDPSIRHFDVAHVSTAATSNFSAVRDLCLSECSQHEACLITTLQTQPGAVRCMFYADTQSCTHSLQGQNCRLLLREEATHIYRKPGISLLSYEASVPSVPISTHGRLLGRSQAIQVGTSWKQVDQFLGVPYAAPPLAERRFQAPEPLNWTGSWDASKPRASCWQPGTRTSTSPGVSEDCLYLNVFIPQNVAPNASVLVFFHNTMDREESEGWPAIDGSFLAAVGNLIVVTASYRVGVFGFLSSGSGEVSGNWGLLDQVAALTWVQTHIRGFGGDPRRVSLAADRGGADVASIHLLTARATNSQLFRRAVLMGGSALSPAAVISHERAQQQAIALAKEVSCPMSSSQEVVSCLRQKPANVLNDAQTKLLAVSGPFHYWGPVIDGHFLREPPARALKRSLWVEVDLLIGSSQDDGLINRAKAVKQFEESRGRTSSKTAFYQALQNSLGGEDSDARVEAAATWYYSLEHSTDDYASFSRALENATRDYFIICPIIDMASAWAKRARGNVFMYHAPENYGHGSLELLADVQFALGLPFYPAYEGQFSLEEKSLSLKIMQYFSHFIRSGNPNYPYEFSRKVPTFATPWPDFVPRAGGENYKEFSELLPNRQGLKKADCSFWSKYISSLKTSADGAKGGQSAESEEEELTAGSGLREDLLSLQEPGSKTYSK

SEQ ID NO: 136484 - DNA, 8136 bp, Artificial Sequence
  derived and/or modified sequence
atggccctggtgctggagatcttcaccctgctggccagcatctgctgggtgagcgccaacatcttcgagtaccaggtggacgcccagcccctgagaccctgcgagctgcagagagagaccgccttcctgaagcaggccgactacgtgccccagtgcgccgaggacggcagcttccagaccgtgcagtgccagaacgacggcagaagctgctggtgcgtgggcgccaacggcagcgaggtgctgggcagcagacagcccggcagacccgtggcctgcctgagcttctgccagctgcagaagcagcagatcctgctgagcggctacatcaacagcaccgacaccagctacctgccccagtgccaggacagcggcgactacgcccccgtgcagtgcgacgtgcagcaggtgcagtgctggtgcgtggacgccgagggcatggaggtgtacggcaccagacagctgggcagacccaagagatgccccagaagctgcgagatcagaaacagaagactgctgcacggcgtgggcgacaagagccccccccagtgcagcgccgagggcgagttcatgcccgtgcagtgcaagttcgtgaacaccaccgacatgatgatcttcgacctggtgcacagctacaacagattccccgacgccttcgtgaccttcagcagcttccagagaagattccccgaggtgagcggctactgccactgcgccgacagccagggcagagagctggccgagaccggcctggagctgctgctggacgagatctacgacaccatcttcgccggcctggacctgcccagcaccttcaccgagaccaccctgtacagaatcctgcagagaagattcctggccgtgcagagcgtgatcagcggcagattcagatgccccaccaagtgcgaggtggagagattcaccgccaccagcttcggccacccctacgtgcccagctgcagaagaaacggcgactaccaggccgtgcagtgccagaccgagggcccctgctggtgcgtggacgcccagggcaaggagatgcacggcaccagacagcagggcgagccccccagctgcgccgagggccagagctgcgccagcgagagacagcaggccctgagcagactgtacttcggcaccagcggctacttcagccagcacgacctgttcagcagccccgagaagagatgggccagccccagagtggccagattcgccaccagctgcccccccaccatcaaggagctgttcgtggacagcggcctgctgagacccatggtggagggccagagccagcagttcagcgtgagcgagaacctgctgaaggaggccatcagagccatcttccccagcagaggcctggccagactggccctgcagttcaccaccaaccccaagagactgcagcagaacctgttcggcggcaagttcctggtgaacgtgggccagttcaacctgagcggcgccctgggcaccagaggcaccttcaacttcagccagttcttccagcagctgggcctggccagcttcctgaacggcggcagacaggaggacctggccaagcccctgagcgtgggcctggacagcaacagcagcaccggcacccccgaggccgccaagaaggacggcaccatgaacaagcccaccgtgggcagcttcggcttcgagatcaacctgcaggagaaccagaacgccctgaagttcctggccagcctgctggagctgcccgagttcctgctgttcctgcagcacgccatcagcgtgcccgaggacgtggccagagacctgggcgacgtgatggagaccgtgctgagcagccagacctgcgagcagacccccgagagactgttcgtgcccagctgcaccaccgagggcagctacgaggacgtgcagtgcttcagcggcgagtgctggtgcgtgaacagctggggcaaggagctgcccggcagcagagtgagaggcggccagcccagatgccccaccgactgcgagaagcagagagccagaatgcagagcctgatgggcagccagcccgccggcagcaccctgttcgtgcccgcctgcaccagcgagggccacttcctgcccgtgcagtgcttcaacagcgagtgctactgcgtggacgccgagggccaggccatccccggcaccagaagcgccatcggcaagcccaagaagtgccccaccccctgccagctgcagagcgagcaggccttcctgagaaccgtgcaggccctgctgagcaacagcagcatgctgcccaccctgagcgacacctacatcccccagtgcagcaccgacggccagtggagacaggtgcagtgcaacggcccccccgagcaggtgttcgagctgtaccagagatgggaggcccagaacaagggccaggacctgacccccgccaagctgctggtgaagatcatgagctacagagaggccgccagcggcaacttcagcctgttcatccagagcctgtacgaggccggccagcaggacgtgttccccgtgctgagccagtaccccagcctgcaggacgtgcccctggccgccctggagggcaagagaccccagcccagagagaacatcctgctggagccctacctgttctggcagatcctgaacggccagctgagccagtaccccggcagctacagcgacttcagcacccccctggcccacttcgacctgagaaactgctggtgcgtggacgaggccggccaggagctggagggcatgagaagcgagcccagcaagctgcccacctgccccggcagctgcgaggaggccaagctgagagtgctgcagttcatcagagagaccgaggagatcgtgagcgccagcaacagcagcagattccccctgggcgagagcttcctggtggccaagggcatcagactgagaaacgaggacctgggcctgccccccctgttcccccccagagaggccttcgccgagcagttcctgagaggcagcgactacgccatcagactggccgcccagagcaccctgagcttctaccagagaagaagattcagccccgacgacagcgccggcgccagcgccctgctgagaagcggcccctacatgccccagtgcgacgccttcggcagctgggagcccgtgcagtgccacgccggcaccggccactgctggtgcgtggacgagaagggcggcttcatccccggcagcctgaccgccagaagcctgcagatcccccagtgccccaccacctgcgagaagagcagaaccagcggcctgctgagcagctggaagcaggccagaagccaggagaaccccagccccaaggacctgttcgtgcccgcctgcctggagaccggcgagtacgccagactgcaggccagcggcgccggcacctggtgcgtggaccccgccagcggcgaggagctgagacccggcagcagcagcagcgcccagtgccccagcctgtgcaacgtgctgaagagcggcgtgctgagcagaagagtgagccccggctacgtgcccgcctgcagagccgaggacggcggcttcagccccgtgcagtgcgaccaggcccagggcagctgctggtgcgtgatggacagcggcgaggaggtgcccggcaccagagtgaccggcggccagcccgcctgcgagagccccagatgccccctgcccttcaacgccagcgaggtggtgggcggcaccatcctgtgcgagaccatcagcggccccaccggcagcgccatgcagcagtgccagctgctgtgcagacagggcagctggagcgtgttcccccccggccccctgatctgcagcctggagagcggcagatgggagagccagctgccccagcccagagcctgccagagaccccagctgtggcagaccatccagacccagggccacttccagctgcagctgccccccggcaagatgtgcagcgccgactacgccgacctgctgcagaccttccaggtgttcatcctggacgagctgaccgccagaggcttctgccagatccaggtgaagaccttcggcaccctggtgagcatccccgtgtgcaacaacagcagcgtgcaggtgggctgcctgaccagagagagactgggcgtgaacgtgacctggaagagcagactggaggacatccccgtggccagcctgcccgacctgcacgacatcgagagagccctggtgggcaaggacctgctgggcagattcaccgacctgatccagagcggcagcttccagctgcacctggacagcaagaccttccccgccgagaccatcagattcctgcagggcgaccacttcggcaccagccccagaacctggttcggctgcagcgagggcttctaccaggtgctgaccagcgaggccagccaggacggcctgggctgcgtgaagtgccccgagggcagctacagccaggacgaggagtgcatcccctgccccgtgggcttctaccaggagcaggccggcagcctggcctgcgtgccctgccccgtgggcagaaccaccatcagcgccggcgccttcagccagacccacctgatgcagaagttcgagaaggtgcccgagagcaaggtgatcttcgacgccaacgcccccgtggccgtgagaagcaaggtgcccgacagcgagttccccgtgatgcagtgcctgaccgactgcaccgaggacgaggcctgcagcttcttcaccgtgagcaccaccgagcccgagatcagctgcgacttctacgcctggaccagcgacaacgtggcctgcatgaccagcgaccagaagagagacgccctgggcaacagcaaggccaccagcttcggcagcctgagatgccaggtgaaggtgagaagccacggccaggacagccccgccgtgtacctgaagaagggccagggcagcaccaccaccctgcagaagagattcgagcccaccggcttccagaacatgctgagcggcctgtacaaccccatcgtgttcagcgccagcggcgccaacctgaccgacgcccacctgttctgcctgctggcctgcgacagagacctgtgctgcgacggcttcgtgctgacccaggtgcagggcggcgccatcatctgcggcctgctgagcagccccagcgtgctgctgtgcaacgtgaaggactggatggaccccagcgaggcctgggccaacgccacctgccccggcgtgacctacgaccaggagagccaccaggtgatcctgagactgggcgaccaggagttcatcaagagcctgacccccctggagggcacccaggacaccttcaccaacttccagcaggtgtacctgtggaaggacagcgacatgggcagcagacccgagagcatgggctgcagaaaggacaccgtgcccagacccgccagccccaccgaggccggcctgaccaccgagctgttcagccccgtggacctgaaccaggtgatcgtgaacggcaaccagagcctgagcagccagaagcactggctgttcaagcacctgttcagcgcccagcaggccaacctgtggtgcctgagcagatgcgtgcaggagcacagcttctgccagctggccgagatcaccgagagcgccagcctgtacttcacctgcaccctgtaccccgaggcccaggtgtgcgacgacatcatggagagcaacgcccagggctgcagactgatcctgccccagatgcccaaggccctgttcagaaagaaggtgatcctggaggacaaggtgaagaacttctacaccagactgcccttccagaagctgatgggcatcagcatcagaaacaaggtgcccatgagcgagaagagcatcagcaacggcttcttcgagtgcgagagaagatgcgacgccgacccctgctgcaccggcttcggcttcctgaacgtgagccagctgaagggcggcgaggtgacctgcctgaccctgaacagcctgggcatccagatgtgcagcgaggagaacggcggcgcctggagaatcctggactgcggcagccccgacatcgaggtgcacacctaccccttcggctggtaccagaagcccatcgcccagaacaacgcccccagcttctgccccctggtggtgctgcccagcctgaccgagaaggtgagcctggacagctggcagagcctggccctgagcagcgtggtggtggaccccagcatcagacacttcgacgtggcccacgtgagcaccgccgccaccagcaacttcagcgccgtgagagacctgtgcctgagcgagtgcagccagcacgaggcctgcctgatcaccaccctgcagacccagcccggcgccgtgagatgcatgttctacgccgacacccagagctgcacccacagcctgcagggccagaactgcagactgctgctgagagaggaggccacccacatctacagaaagcccggcatcagcctgctgagctacgaggccagcgtgcccagcgtgcccatcagcacccacggcagactgctgggcagaagccaggccatccaggtgggcaccagctggaagcaggtggaccagttcctgggcgtgccctacgccgccccccccctggccgagagaagattccaggcccccgagcccctgaactggaccggcagctgggacgccagcaagcccagagccagctgctggcagcccggcaccagaaccagcaccagccccggcgtgagcgaggactgcctgtacctgaacgtgttcatcccccagaacgtggcccccaacgccagcgtgctggtgttcttccacaacaccatggacagagaggagagcgagggctggcccgccatcgacggcagcttcctggccgccgtgggcaacctgatcgtggtgaccgccagctacagagtgggcgtgttcggcttcctgagcagcggcagcggcgaggtgagcggcaactggggcctgctggaccaggtggccgccctgacctgggtgcagacccacatcagaggcttcggcggcgaccccagaagagtgagcctggccgccgacagaggcggcgccgacgtggccagcatccacctgctgaccgccagagccaccaacagccagctgttcagaagagccgtgctgatgggcggcagcgccctgagccccgccgccgtgatcagccacgagagagcccagcagcaggccatcgccctggccaaggaggtgagctgccccatgagcagcagccaggaggtggtgagctgcctgagacagaagcccgccaacgtgctgaacgacgcccagaccaagctgctggccgtgagcggccccttccactactggggccccgtgatcgacggccacttcctgagagagccccccgccagagccctgaagagaagcctgtgggtggaggtggacctgctgatcggcagcagccaggacgacggcctgatcaacagagccaaggccgtgaagcagttcgaggagagcagaggcagaaccagcagcaagaccgccttctaccaggccctgcagaacagcctgggcggcgaggacagcgacgccagagtggaggccgccgccacctggtactacagcctggagcacagcaccgacgactacgccagcttcagcagagccctggagaacgccaccagagactacttcatcatctgccccatcatcgacatggccagcgcctgggccaagagagccagaggcaacgtgttcatgtaccacgcccccgagaactacggccacggcagcctggagctgctggccgacgtgcagttcgccctgggcctgcccttctaccccgcctacgagggccagttcagcctggaggagaagagcctgagcctgaagatcatgcagtacttcagccacttcatcagaagcggcaaccccaactacccctacgagttcagcagaaaggtgcccaccttcgccaccccctggcccgacttcgtgcccagagccggcggcgagaactacaaggagttcagcgagctgctgcccaacagacagggcctgaagaaggccgactgcagcttctggagcaagtacatcagcagcctgaagaccagcgccgacggcgccaagggcggccagagcgccgagagcgaggaggaggagctgaccgccggcagcggcctgagagaggacctgctgagcctgcaggagcccggcagcaagacctacagcaagtag

SEQ ID NO: 136485 - DNA, 4725 bp, Artificial Sequence
  derived and/or modified sequence
atccccagaaagcccatcagcaagagacccgtgagacccagcctgcccagaagccccagatgccccctgcccttcaacgccagcgaggtggtgggcggcaccatcctgtgcgagaccatcagcggccccaccggcagcgccatgcagcagtgccagctgctgtgcagacagggcagctggagcgtgttcccccccggccccctgatctgcagcctggagagcggcagatgggagagccagctgccccagcccagagcctgccagagaccccagctgtggcagaccatccagacccagggccacttccagctgcagctgccccccggcaagatgtgcagcgccgactacgccgacctgctgcagaccttccaggtgttcatcctggacgagctgaccgccagaggcttctgccagatccaggtgaagaccttcggcaccctggtgagcatccccgtgtgcaacaacagcagcgtgcaggtgggctgcctgaccagagagagactgggcgtgaacgtgacctggaagagcagactggaggacatccccgtggccagcctgcccgacctgcacgacatcgagagagccctggtgggcaaggacctgctgggcagattcaccgacctgatccagagcggcagcttccagctgcacctggacagcaagaccttccccgccgagaccatcagattcctgcagggcgaccacttcggcaccagccccagaacctggttcggctgcagcgagggcttctaccaggtgctgaccagcgaggccagccaggacggcctgggctgcgtgaagtgccccgagggcagctacagccaggacgaggagtgcatcccctgccccgtgggcttctaccaggagcaggccggcagcctggcctgcgtgccctgccccgtgggcagaaccaccatcagcgccggcgccttcagccagacccactgcgtgaccgactgccagagaaacgaggccggcctgcagtgcgaccagaacggccagtacagagccagccagaaggacagaggcagcggcaaggccttctgcgtggacggcgagggcagaagactgccctggtgggagaccgaggcccccctggaggacagccagtgcctgatgatgcagaagttcgagaaggtgcccgagagcaaggtgatcttcgacgccaacgcccccgtggccgtgagaagcaaggtgcccgacagcgagttccccgtgatgcagtgcctgaccgactgcaccgaggacgaggcctgcagcttcttcaccgtgagcaccaccgagcccgagatcagctgcgacttctacgcctggaccagcgacaacgtggcctgcatgaccagcgaccagaagagagacgccctgggcaacagcaaggccaccagcttcggcagcctgagatgccaggtgaaggtgagaagccacggccaggacagccccgccgtgtacctgaagaagggccagggcagcaccaccaccctgcagaagagattcgagcccaccggcttccagaacatgctgagcggcctgtacaaccccatcgtgttcagcgccagcggcgccaacctgaccgacgcccacctgttctgcctgctggcctgcgacagagacctgtgctgcgacggcttcgtgctgacccaggtgcagggcggcgccatcatctgcggcctgctgagcagccccagcgtgctgctgtgcaacgtgaaggactggatggaccccagcgaggcctgggccaacgccacctgccccggcgtgacctacgaccaggagagccaccaggtgatcctgagactgggcgaccaggagttcatcaagagcctgacccccctggagggcacccaggacaccttcaccaacttccagcaggtgtacctgtggaaggacagcgacatgggcagcagacccgagagcatgggctgcagaaaggacaccgtgcccagacccgccagccccaccgaggccggcctgaccaccgagctgttcagccccgtggacctgaaccaggtgatcgtgaacggcaaccagagcctgagcagccagaagcactggctgttcaagcacctgttcagcgcccagcaggccaacctgtggtgcctgagcagatgcgtgcaggagcacagcttctgccagctggccgagatcaccgagagcgccagcctgtacttcacctgcaccctgtaccccgaggcccaggtgtgcgacgacatcatggagagcaacgcccagggctgcagactgatcctgccccagatgcccaaggccctgttcagaaagaaggtgatcctggaggacaaggtgaagaacttctacaccagactgcccttccagaagctgatgggcatcagcatcagaaacaaggtgcccatgagcgagaagagcatcagcaacggcttcttcgagtgcgagagaagatgcgacgccgacccctgctgcaccggcttcggcttcctgaacgtgagccagctgaagggcggcgaggtgacctgcctgaccctgaacagcctgggcatccagatgtgcagcgaggagaacggcggcgcctggagaatcctggactgcggcagccccgacatcgaggtgcacacctaccccttcggctggtaccagaagcccatcgcccagaacaacgcccccagcttctgccccctggtggtgctgcccagcctgaccgagaaggtgagcctggacagctggcagagcctggccctgagcagcgtggtggtggaccccagcatcagacacttcgacgtggcccacgtgagcaccgccgccaccagcaacttcagcgccgtgagagacctgtgcctgagcgagtgcagccagcacgaggcctgcctgatcaccaccctgcagacccagcccggcgccgtgagatgcatgttctacgccgacacccagagctgcacccacagcctgcagggccagaactgcagactgctgctgagagaggaggccacccacatctacagaaagcccggcatcagcctgctgagctacgaggccagcgtgcccagcgtgcccatcagcacccacggcagactgctgggcagaagccaggccatccaggtgggcaccagctggaagcaggtggaccagttcctgggcgtgccctacgccgccccccccctggccgagagaagattccaggcccccgagcccctgaactggaccggcagctgggacgccagcaagcccagagccagctgctggcagcccggcaccagaaccagcaccagccccggcgtgagcgaggactgcctgtacctgaacgtgttcatcccccagaacgtggcccccaacgccagcgtgctggtgttcttccacaacaccatggacagagaggagagcgagggctggcccgccatcgacggcagcttcctggccgccgtgggcaacctgatcgtggtgaccgccagctacagagtgggcgtgttcggcttcctgagcagcggcagcggcgaggtgagcggcaactggggcctgctggaccaggtggccgccctgacctgggtgcagacccacatcagaggcttcggcggcgaccccagaagagtgagcctggccgccgacagaggcggcgccgacgtggccagcatccacctgctgaccgccagagccaccaacagccagctgttcagaagagccgtgctgatgggcggcagcgccctgagccccgccgccgtgatcagccacgagagagcccagcagcaggccatcgccctggccaaggaggtgagctgccccatgagcagcagccaggaggtggtgagctgcctgagacagaagcccgccaacgtgctgaacgacgcccagaccaagctgctggccgtgagcggccccttccactactggggccccgtgatcgacggccacttcctgagagagccccccgccagagccctgaagagaagcctgtgggtggaggtggacctgctgatcggcagcagccaggacgacggcctgatcaacagagccaaggccgtgaagcagttcgaggagagcagaggcagaaccagcagcaagaccgccttctaccaggccctgcagaacagcctgggcggcgaggacagcgacgccagagtggaggccgccgccacctggtactacagcctggagcacagcaccgacgactacgccagcttcagcagagccctggagaacgccaccagagactacttcatcatctgccccatcatcgacatggccagcgcctgggccaagagagccagaggcaacgtgttcatgtaccacgcccccgagaactacggccacggcagcctggagctgctggccgacgtgcagttcgccctgggcctgcccttctaccccgcctacgagggccagttcagcctggaggagaagagcctgagcctgaagatcatgcagtacttcagccacttcatcagaagcggcaaccccaactacccctacgagttcagcagaaaggtgcccaccttcgccaccccctggcccgacttcgtgcccagagccggcggcgagaactacaaggagttcagcgagctgctgcccaacagacagggcctgaagaaggccgactgcagcttctggagcaagtacatcagcagcctgaagaccagcgccgacggcgccaagggcggccagagcgccgagagcgaggaggaggagctgaccgccggcagcggcctgagagaggacctgctgagcctgcaggagcccggcagcaagacctacagcaagtag

SEQ ID NO: 136486 - DNA, 8307 bp, Artificial Sequence
  derived and/or modified sequence
atggcactggttcttgaaatttttacacttctggccagcatttgctgggtatctgcgaacatttttgaataccaggtagatgcccaacctctgcgaccctgcgagttacagagggagaccgcattcttgaaacaagctgactatgtccctcagtgtgcagaggacggaagtttccagactgtgcagtgccaaaatgacggtcggtcttgctggtgtgtaggcgccaatggttccgaggtgctggggtcacgtcagcctggccggcctgtggcctgtctttccttttgccagctacagaaacagcagattctgctgagtggctatatcaactccaccgacacatcctacctgccgcaatgccaggactctggagattacgccccagtgcagtgcgatgtccaacaggttcagtgctggtgcgtcgacgctgaagggatggaggtctatgggacacggcagttagggagacctaaacggtgccccaggtcgtgtgagattcgcaaccgccggcttctacatggagtcggagacaagagtcctccccagtgctcggccgagggggaattcatgcctgtccagtgtaagtttgttaacactacagatatgatgatattcgatctggtgcactcctacaatagattcccagatgcttttgttaccttttccagttttcaacgccggttccctgaagtcagcgggtactgccattgcgctgattcacagggaagggagcttgcagagactggcttagagcttttactggacgaaatttatgacacaatctttgcgggactggatttgccgagcacgtttactgagacaactttatatcgtattcttcaaagaaggtttttggccgtccagagcgttatctccggaaggttccgatgccccaccaaatgtgaagtggaaagatttacagctacctcatttggtcatccttatgttccatcgtgcaggagaaacggggactatcaggccgtgcaatgccaaacagagggcccttgctggtgcgtggacgcccagggtaaggagatgcatggaacccgacagcagggggaacctcctagctgcgctgagggccagtcgtgtgcctcggaacgtcaacaggctctctctcgtctgtatttcggtacttcaggatacttttcacagcatgatctgttctcatcacccgagaagagatgggcgtcaccccgtgtcgcacggttcgcgacttcatgtccccctaccataaaagagctattcgtagactccggactgttgcgtcctatggttgaagggcagagccaacagtttagcgtctctgagaatttactgaaagaggccatccgggcgatctttccctcgcggggcctcgcacggctggcattgcagttcaccaccaatcctaaacgattgcaacagaacctgtttggagggaaatttcttgtgaatgtgggccagtttaacctgtctggggcactgggaacccgtgggacattcaactttagtcagttttttcagcagctgggactggctagcttcctgaatggcgggcggcaggaggacctggcgaagcccctatccgtagggctcgatagtaattcaagcacagggacacctgaggccgcgaagaaggacggcacaatgaataagcctacagtgggctcttttggcttcgaaattaacttacaggaaaatcagaatgcactcaagttcttggcctcactgttggaattacccgagttcttgttgtttcttcagcatgccatttccgtaccggaggacgtggctcgtgaccttggagatgtcatggaaaccgtgttgtcaagccagacatgcgagcaaaccccggagcgactgttcgtcccttcatgcaccaccgagggatcatatgaagacgtgcaatgcttcagtggtgaatgctggtgtgtgaactcttggggaaaggagctgcccggaagtcgagtccggggaggacaaccaaggtgcccaacagattgtgaaaaacagcgcgccaggatgcagagtcttatgggatcgcaaccagcaggcagtaccttattcgtccctgcttgtacaagcgagggccactttctgccagtacagtgttttaacagcgagtgctactgtgtggatgcagagggacaggctattcctggaactaggagtgccataggcaagcctaagaagtgcccaaccccatgccaactgcaatctgagcaggcttttctgcggaccgtccaggccctgctgtctaactcctccatgctccccaccctctcagatacgtacattccacagtgtagtaccgacggccagtggcgtcaggtgcagtgtaatggccctcctgagcaggtattcgagctttatcaacggtgggaagcgcagaacaaggggcaggacctgacccctgccaagctactggtaaagatcatgagttatagagaggcggcttcaggaaatttcagcctgtttatccagtctctgtacgaagctgggcagcaggacgtgttcccagttcttagccaatatccttcccttcaagatgtgccactggcagctctcgaaggcaagagacctcagccccgcgaaaatatcctcctagaaccctatctcttttggcagattctgaacggtcaactgtctcagtatcccgggtcttacagcgatttttccacaccactcgctcacttcgacctaaggaactgctggtgcgtcgacgaagcgggtcaggagctggagggaatgcgcagcgagccgagcaaactgccaacttgccccggttcatgtgaagaagctaaactcagagtgctccaattcatcagggagacggaggaaattgtatcggctagtaattcttccaggtttcctcttggcgaatcattcctagttgctaaagggatacgccttcggaacgaagatctcggtctgcctcccctctttccaccacgcgaagctttcgctgagcagttccttagaggatcggattacgctatccggctggccgcgcagtccacgctgagtttttaccagcgcagacgtttcagtccagacgatagtgctggtgcaagcgcactgctaaggagcggcccttacatgccgcagtgtgacgcttttgggagctgggagccggttcagtgccatgctggcacgggccattgttggtgtgtggacgagaagggcggtttcatacctggaagtctaacggctcgatcgcttcagatccctcagtgccctacaacctgtgaaaaatcaagaaccagcggcctccttagctcttggaaacaggcacggtctcaagaaaacccatcccctaaggacctgtttgtccctgcatgcctggagaccggcgaatacgcgagactccaagcatcaggcgctgggacgtggtgcgtagatcccgcgtctggggaagagctccgacctggaagttcttcaagcgctcaatgcccctccctgtgcaacgttctcaaaagcggagtgctttctagacgcgttagtcctgggtacgtgcctgcttgccgtgcagaagacggcggctttagcccggttcagtgtgatcaggcccagggaagctgctggtgcgtcatggattctggtgaagaggtgcctggaacccgcgtgacgggcgggcagcccgcctgcgaatcgccaaggtgtcctttgcccttcaacgccagcgaagttgtcggggggacaattctctgcgagacaatctcagggcctaccggtagcgcgatgcagcagtgccagcttctctgcaggcagggttcttggagcgtattccctcccggccccctgatctgcagtttggagtctggccgttgggagtcccaactgcctcagccccgagcatgtcaacgtccccagttgtggcaaactatccaaactcaaggccacttccagctacaactgcccccaggaaagatgtgttcagccgactatgccgacctccttcagacgttccaggtattcattctggatgagctgaccgctaggggtttttgccagatccaagtgaaaacctttggcaccctggtttctatcccggtctgcaataacagtagtgtgcaagtcggttgcctgacccgtgaacggctgggcgtgaacgtgacatggaaaagtagactggaagatatcccagtggcgagtcttcccgatttgcacgacatagagcgggcattggtggggaaagatttgctaggtcgatttactgatttaatacaatccggcagcttccagctgcacctggactccaaaacctttccagccgaaaccatcaggtttctgcaaggcgatcatttcgggacaagccctagaacgtggttcggttgcagcgaggggttctaccaggtgctgacaagcgaagctagccaggatggattgggctgtgtcaaatgtcccgaggggtcctattcacaggatgaagaatgtataccatgtcctgtaggattctatcaggaacaggctggaagtctggcctgcgtgccctgtcctgtaggcagaacaaccatttctgcaggagcctttagtcagacacactgtgtgaccgattgccagcgcaatgaggccgggctacagtgtgatcagaacggacaatatcgagctagccaaaaagaccgcggtagcggtaaagccttctgtgttgacggcgaaggacggagattgccttggtgggagacagaagcgcccctggaggacagccagtgcctgatgatgcagaagtttgaaaaagttcccgaatctaaagtgatctttgacgccaatgcccccgtggcagttcgctcaaaggtacctgatagcgagttcccagttatgcagtgcctcactgattgcacggaggacgaggcatgttcctttttcaccgtgtctaccaccgagcctgagattagctgcgatttctacgcctggacttccgacaatgtggcatgcatgacttcggatcagaaaagagatgctctcgggaattccaaagctacttcgtttggctctctgcggtgccaagttaaggtccgaagccacgggcaggacagtcctgcagtctacctgaaaaaggggcagggttccacaaccacacttcagaagagattcgagcctaccggcttccagaatatgctctcagggctctataaccccatcgtgttcagcgcatccggcgctaacctaacagacgctcacctcttttgcttgctggcgtgcgatcgggacctgtgctgtgatgggtttgtgttaactcaggtgcagggaggggcgatcatctgtggcctcctcagctcaccttctgtgctcctgtgcaacgtcaaggactggatggatccatctgaagcctgggcgaatgcaacctgcccgggtgtaacttacgaccaggagtcgcaccaggtgattcttcgcctaggcgaccaggagttcatcaaaagcctgactccattggaaggcacccaggacacatttacaaacttccaacaggtctatctatggaaggacagcgacatgggctcccggcccgaatcaatggggtgcagaaaggatactgtgccaaggcccgcaagtccaacagaggcaggactcacgacggaactgtttagtcccgtggacctgaaccaggtgattgtgaatgggaatcaaagcctgtctagtcagaagcactggctgttcaaacacctcttttcagctcaacaggctaacttatggtgcctgagtcgctgtgtccaggaacactctttctgccagttggcagagatcactgagtcagccagcttatacttcacttgcacactgtatcctgaagctcaggtgtgtgacgatattatggagtccaacgcccagggttgccgacttatcttgccacagatgccaaaggccctgttcaggaaaaaagtgattttagaagacaaagttaaaaatttctacacgagattgcccttccagaagctaatgggtatcagcattcgaaataaggtaccaatgagcgaaaaatccatttcaaatggcttttttgaatgcgaaagacgatgtgatgcagacccctgttgtaccggattcggcttcttaaacgtgtctcagctgaaggggggggaggtaacgtgtttgaccttgaactctcttggcattcagatgtgcagcgaagaaaacggcggagcatggcggattttggattgtgggtccccagacattgaggttcacacataccctttcggctggtatcaaaaaccgatcgctcagaacaacgcgccaagtttctgtccgctcgtggtgctgccctctctgaccgagaaagtgtctctcgattcatggcagtctcttgcactcagcagtgtcgtcgtggacccatcgatcaggcatttcgatgtcgcacacgtgagcacggcagctacaagcaatttctccgcggttagagatctctgcttgtccgagtgtagccagcacgaagcatgcctcatcacgaccttgcaaactcagcccggtgcagtgcggtgtatgttctatgcagacacccagtcctgtacccactctctgcagggccagaactgtcgcctgctcctgagggaagaggccactcacatctatcgaaagccagggatttcactccttagttacgaggcttcagtcccgtctgttcccatctcaactcatggacgcctgctggggcgtagccaagccatccaggttggcacctcatggaaacaggtggatcagtttttgggcgtgccatatgcagctccacccctcgcagagcggagatttcaggcacccgaacccttaaattggaccgggagttgggatgccagcaaaccaagagcatcatgttggcaacccggcactcggacctctacctctcccggggtttcagaagattgcctgtatctcaacgtgtttatccctcagaatgttgcccctaatgcttcagtacttgtgttttttcataatacaatggatcgcgaagaatcagaaggctggcccgcaatcgacggtagctttttagctgcagtgggaaaccttatcgtagttaccgcaagctaccgcgttggtgtctttggtttcctatccagcggctcgggcgaggtcagcggcaattggggcctgttagaccaggtggccgcactcacctgggtacagacccacatcagagggtttgggggagacccaaggcgcgtgagtcttgcagcagatcgtggcggagcagatgtagcttctatacatctactgactgcgcgagcgactaactcgcagctgtttaggcgcgctgttcttatgggcggctcagccctgagcccagcggctgtaatcagtcatgaacgggcccagcagcaggcgatagcccttgccaaagaggtttcatgcccgatgagctcaagccaggaggtggtctcctgcttgagacagaaacccgcaaacgtcctgaacgacgcgcagactaagctgctggcggtgtccggcccattccattattggggcccagtgatagatgggcacttcttacgggaaccccccgctcgagccctaaagcggtccttgtgggtggaagtggatttgctcataggcagctcccaggacgacgggctgatcaaccgcgctaaggctgtgaaacaatttgaggagtcgagggggaggacctcttcgaagacagcgttttatcaggctctacaaaatagtcttgggggcgaagactccgacgcccgcgtggaggccgccgccacctggtactactctctagagcatagcaccgatgattatgcttcttttagccgagccctagagaatgcaactcgcgattacttcatcatttgccccatcatagatatggcatccgcatgggcgaagagagccagaggaaatgtcttcatgtatcatgctccagaaaactacggccatggctcacttgaactgttggcagacgtgcaattcgcactgggactgcctttctatccggcatacgagggacaatttagtctggaggagaagagcctgtcccttaaaattatgcagtatttctctcacttcattcgcagcggcaaccccaattacccgtacgagttcagtcggaaggtcccgacgtttgctactccttggcccgacttcgtgcctcgcgccggcggcgagaattataaagaatttagtgagttgttaccaaatcgacaaggcctcaagaaggccgattgctcattctggagtaagtatatttcgagtctcaagacatcagctgacggggccaaaggcggacagtctgccgagagcgaggaagaagagcttaccgccgggtccgggctgcgagaggacctgctgtctttacaggagccaggcagcaaaacgtattccaaatag

SEQ ID NO: 136487 - DNA, 8136 bp, Artificial Sequence
  derived and/or modified sequence
atggcattagtgctggaaatcttcactttactggccagtatttgttgggtctcagcgaacattttcgaatatcaggtggatgctcagccattgaggccctgtgagcttcagagagaaacggcgttcctcaagcaagcagactacgtgccacagtgcgccgaggacggaagctttcagactgtgcagtgccaaaatgacggtaggagctgttggtgcgttggtgccaatggatcggaagtcctgggctctcgacagccaggccgccctgtggcttgtctgtcattctgccaacttcaaaagcagcagatcctgctgtctgggtacattaattctacagacacatcttatctgccccagtgccaggatagcggagattatgcccctgtccagtgtgatgttcagcaggtgcagtgttggtgtgtagacgctgaggggatggaagtttacggaacccgacagttaggccgtcccaagcgctgtcctaggagctgtgagattagaaaccggagactcttgcacggggtgggagataaatcccccccgcagtgtagcgccgagggcgagttcatgccagtgcaatgcaaattcgtcaacacgactgatatgatgatttttgacctggtgcactcctacaatcgattccctgatgcatttgtcacattctccagcttccagaggcgctttcccgaggtcagcgggtactgtcactgtgcagattcgcagggaagagagttagccgaaacgggcttggaactcctactggatgagatatatgacactatctttgcgggtctagaccttccatctacctttactgaaactactctgtatcgtatactgcagcgcagatttctcgccgtgcagagtgttatatctggacggtttaggtgcccgaccaagtgcgaggtggagagattcacggctacctctttcggccacccatatgttccctcgtgcaggcgcaacggggactaccaggcggtccagtgccagactgaggggccctgctggtgcgttgatgcccagggcaaggagatgcacggaacgagacagcagggtgagccgccttcttgtgccgaggggcagtcctgcgcctcagagaggcagcaggccttgtcgcggctttactttggtacgtctggatacttttctcagcacgatctattctccagccctgagaaacggtgggcatcgcctcgggtcgccaggttcgctacgtcctgcccacccacaatcaaggagctgttcgttgatagtggattgctgagacccatggtagagggccagtcacaacaattcagcgtatccgaaaatttgctgaaagaagctattagagcgatttttccttcacgaggactggcccgattggctctgcagttcactactaatcctaaacgcttgcagcaaaatttgtttggtggaaagtttcttgtgaacgtgggtcagttcaacctttctggagctttgggtactagaggcactttcaacttctcccaattctttcagcaactggggctcgcgagttttctcaatggcggcagacaggaggacctcgccaaacccctcagtgtgggactagattccaacagctcaactggcacaccagaggccgctaaaaaagacggtactatgaacaaacctacggtagggtcgttcgggtttgagattaacctgcaggagaatcagaacgccctgaagtttctggcctcacttctggaactgcctgagtttctattatttttacaacacgctattagcgtgccagaggacgttgcccgagatcttggcgacgtgatggaaaccgtgctgtcttcacagacttgcgaacagacaccggagaggctgtttgtgccatcttgtaccactgagggctcttatgaggatgtgcagtgtttttctggcgagtgctggtgcgtgaattcttggggcaaggagctcccaggcagtcgagtgcgtggagggcaaccccgctgcccaaccgattgtgagaagcagcgcgctaggatgcaaagcctgatggggtcacagccagccggtagtaccctgttcgtgcccgcctgtactagtgagggccattttctccccgtacagtgtttcaacagtgaatgctattgcgtcgacgccgaaggccaggctatacctggtaccagaagcgctattggaaagccaaaaaagtgtcctaccccttgtcaactccagtccgagcaggcctttctgagaacagttcaagctctgctgtccaactcttctatgctgcccacgctgagcgatacatacataccccaatgtagcactgatggacagtggagacaggttcaatgcaatggcccaccggagcaagtatttgaactgtaccagagatgggaggctcagaataaagggcaggacttgacaccagccaagctgctcgtaaagatcatgagctaccgcgaagctgctagcggcaacttttctctgtttatccagagcctgtacgaagcgggtcagcaggatgtgttcccagtgctgtcacagtacccctcccttcaggatgtccccctggcagccctggagggaaagcgaccccagccccgggagaacatcctattggagccctatttattttggcagatcctcaacggacagctaagtcaatacccaggctcctacagcgatttctccacacctctggcgcactttgatctgcgaaattgctggtgtgtcgatgaggccggccaggaactcgagggtatgagatctgagccatctaaacttcccacatgccccggcagttgtgaggaggcaaagctgagagtgttgcaatttataagggaaactgaggaaattgtgtctgcttcaaatagcagccggtttcccttgggcgagagcttcctcgtggcgaaaggcattcggctgcggaatgaggacctgggtcttccccctctctttcctcctcgtgaagccttcgctgagcagtttctccggggctccgattatgccattagactggctgctcaaagcacgctgagcttttatcagcggaggcgtttcagccccgacgacagcgctggggctagcgccctgctccggagcggcccttatatgccccagtgcgacgcctttgggtcttgggagccggtgcaatgtcacgctggtaccggccactgctggtgcgtggacgagaagggcgggttcatcccaggcagtttgactgcccgatcgcttcagatccctcagtgccccaccacatgcgaaaagagccgtacatcggggctactgtccagctggaagcaagcacgctcccaagagaacccctcccctaaggacctgtttgtgcctgcctgcctggagactggagaatacgcacgactgcaggcatccggggctggcacgtggtgcgtggaccccgcatctggtgaagagctgcggccagggtcatcctcatcagctcagtgcccatccctctgtaacgtgctaaagagtggtgtcctgagtagaagggtgtccccgggctatgtgcccgcctgccgtgcggaagacggtggcttttccccggtgcagtgtgatcaggctcaaggaagttgttggtgtgtgatggattccggggaagaagttccaggcacaagggtgacaggcgggcagccggcatgcgagtcaccaaggtgccccttacctttcaatgcttccgaggtggtgggcggaacgatactgtgcgagactatctctggacccaccggcagtgccatgcagcagtgtcagctcctgtgccgtcagggaagctggtccgtcttcccccccggtcctcttatttgctccctggagtccggacgatgggagtcccagctgccccaacccagggcctgccaacgcccacaactgtggcagaccattcagactcagggtcattttcaattgcagttgccccctgggaagatgtgtagcgctgattatgccgatctcttgcagacatttcaggtgtttattctggatgaactcactgccaggggattctgtcaaatccaggtcaaaacatttggcacactggtctctatcccagtctgcaacaactcgagtgtgcaagtcgggtgtttaaccagggagaggttgggcgtcaacgtcacatggaaatccaggctggaggacatccccgtggccagcctccccgatcttcacgatatagaacgcgctctggtgggcaaagacttgctggggcgttttactgatcttatacagagtgggtcatttcaattgcacctggatagtaagaccttccccgccgagacgattaggttcctacagggagatcacttcggaacttcaccacgcacctggtttggctgtagcgaaggcttctaccaggtccttaccagcgaggcgagtcaggatgggctgggttgtgtgaaatgtcccgaaggatcctactcacaggacgaagagtgcatcccttgtcctgtaggcttttaccaggagcaggccgggtccttggcctgcgtcccttgccctgtgggccgtacaaccattagcgccggcgccttcagccaaacacaccttatgcagaagtttgaaaaagtgcccgagtctaaagtgattttcgacgcaaacgccccagtagcggtgagatccaaagtccccgactcagaattcccggtcatgcagtgtctcactgattgcaccgaagacgaggcttgttctttctttaccgttagcaccaccgagcccgaaatcagttgtgatttctatgcctggacttcagacaacgttgcctgtatgacgtcagatcaaaagcgggacgcactgggaaacagtaaggcaaccagcttcggaagtctgcgctgccaggtcaaagtacgatctcacggccaggatagtcctgccgtctatctcaagaaggggcaggggagtaccacaactcttcaaaaaaggttcgaaccaaccggatttcagaatatgctaagtggcctgtacaaccccatagtctttagcgccagtggtgccaatttgaccgacgctcatctcttttgtcttctggcatgtgacagagatctctgttgcgatggcttcgtactgacacaggttcaaggtggagccattatctgcggactactgagtagcccatccgtgttattatgcaacgtgaaagattggatggatccttctgaggcttgggcaaatgctacctgccccggagtgacatacgatcaggagtcgcaccaggtgatcctgagacttggtgatcaagagtttatcaagagcttgacacccctggaggggacgcaagatacttttacgaatttccagcaggtgtacctatggaaagactccgacatggggagccggccagagagcatgggttgtcgcaaggacactgtgccccggccggcctcccctacagaggccggcctgactacagagttgttcagccccgtcgacctgaatcaggttatcgtgaatgggaaccagtcactcagtagccaaaagcattggctatttaagcaccttttttcagcgcagcaagcaaacctctggtgcctgagccggtgcgtgcaggagcactctttctgccagctcgccgagattaccgaatccgcctcactctacttcacctgtaccctttatccagaggcccaggtatgcgacgatattatggaatcaaatgcccagggctgcagacttatccttccacaaatgcccaaagctttgtttaggaagaaggtgatcttggaagataaagtaaaaaacttttacactcgactgcccttccagaagctgatgggcatctcaattcggaataaggttcctatgtctgagaagagcattagtaatgggttcttcgaatgcgagcggcgatgcgatgccgatccctgttgcactggcttcggctttctcaatgtctcccaactgaagggtggagaggtcacttgcttgactttgaactcactcggaatccagatgtgctcggaggagaatggtggagcctggagaatcctggactgcggatcacctgacatagaggtgcacacctacccgttcggatggtaccagaagccaatcgctcaaaataatgccccttccttttgtcccttagtcgtcctgccctcattaaccgaaaaggttagcttggattcctggcagtccctcgcattgtcaagcgtagttgtggacccctctatccgccatttcgacgtcgcacatgtcagtaccgccgcaacctcgaatttttccgctgtgagggacctgtgtttaagcgaatgtagccagcacgaagcttgccttataaccaccttgcagacacagcctggagccgtccgctgcatgttttacgccgatacacaatcctgcacacattctctccagggccagaactgtcgcctcctcctgcgggaggaagctacccatatttacagaaaaccaggaatctcgctcctgagctatgaggcatcagtgccttcggtgcccataagcacccatggtcgcctcttaggccggagccaagctattcaagtgggcactagctggaagcaggtggaccagtttctgggcgtcccgtatgctgctcctcccctcgccgaaagacggttccaggctccagagccactgaattggaccggcagttgggacgcatccaagcctcgggctagttgctggcagcccggcacccggacgtctacttcaccaggtgtatcggaggattgtctttacctcaacgtcttcattccacaaaatgtcgcccctaacgcgtccgtgcttgtcttttttcataataccatggatcgcgaagagtctgaggggtggccagctattgatggatccttcctggccgccgtgggaaatctgattgtggtcactgcttcctacagagtgggagtcttcggctttctgagttcgggctctggagaagtctcagggaattggggcctcttagaccaggtagcggctctgacctgggtccagactcacattcgaggtttcggcggggatcccagaagagtgagtcttgctgccgatcgagggggggccgatgtcgcgagcattcacctactcaccgccagagcaactaattcccagttgttccggagagccgtgcttatgggggggagcgcgttaagtccagcggccgtgataagtcacgagagggcccaacagcaagccatagcactagccaaggaggtgtcctgccccatgtcaagtagccaggaagtggtcagctgtctgcgccagaaaccagccaatgtgctcaatgatgcacagacaaaattgcttgcagtgtctggccccttccactattggggcccagtgatcgatggccacttcctgcgtgagcctcccgcccgggccctgaaacgcagcctctgggtggaagtggacttgctcatcggcagcagtcaggacgatggcctgatcaacagagctaaggcagttaagcagtttgaggagtcacgcggccgtacttcatcaaaaaccgcattttaccaggcattacagaattcactaggtggggaggattccgacgctcgggtggaagcggcagctacctggtactacagcctcgaacatagcaccgatgattacgcctccttttccagggctctcgagaacgccacaagagattacttcattatctgtccaatcatcgatatggcaagtgcctgggctaagcgagcccgggggaacgttttcatgtaccatgctcccgaaaattacgggcacggctctctagaactcctagctgacgttcaattcgctcttggtctgcccttctacccggcctacgaggggcaatttagcctggaggagaagtccctgtccctcaagatcatgcagtatttcagccatttcatccgatccggaaatccgaactacccctacgaatttagtcggaaggtgcctactttcgccaccccctggccggactttgtccctagagcgggtggtgagaactacaaggagttttccgaattgctgcctaatcggcaggggctgaaaaaggctgactgctcattttggagcaagtacatcagtagtttgaaaacctctgctgacggcgctaaggggggtcaatcagccgagtctgaggaggaagagcttaccgctggatcaggtctgagggaggacttgctgagcctgcaggagccagggtcaaagacctactcgaagtag

SEQ ID NO: 136488 - DNA, 4725 bp, Artificial Sequence
  derived and/or modified sequence
attccacggaaacctatctccaagcgtccagtacggccttccctccctcgcagcccccggtgcccgctgccatttaacgcttctgaggtagtgggcggaactattctgtgcgagacgatttcaggccctaccggctctgcaatgcaacaatgtcagctattgtgtcgtcagggttcttggtcggtgtttccaccaggaccgctgatctgcagtctcgaatctgggcgatgggaatcacagcttccccaaccccgcgcttgccagaggccacagctgtggcagaccattcagacccagggccattttcagctgcagctgccaccgggcaaaatgtgcagcgcggattatgccgatttattacagaccttccaggttttcatactcgacgaattgactgcccgcgggttttgccaaattcaggtcaaaactttcggaactctcgtcagtattccagtgtgtaataattctagtgtccaggtaggatgcttgacaagagaacggcttggggttaatgtcacatggaaatcaaggctggaggatattcctgttgccagcctacctgaccttcacgacatagaacgggccttggtgggaaaagatctactgggaaggtttaccgacctcatccagagcggatcctttcagttacatttggacagtaaaacctttcccgcagaaaccataagattcctgcagggggatcactttgggacatctcctaggacatggtttggctgcagcgagggtttttatcaggtcctcacctccgaagcctcccaggacggcctcggctgtgtgaagtgcccagagggaagctacagtcaggacgaggagtgtattccttgccctgtgggcttctaccaggaacaggctgggtccttggcttgcgttccatgccctgtggggaggacgactattagtgcgggagccttttcccagactcattgtgtcaccgattgccagcgtaatgaggcggggcttcagtgtgaccagaacgggcaataccgcgcgagccaaaaagataggggtagcggtaaggccttttgcgtggacggtgaaggccgaagactcccttggtgggaaaccgaggcacccctggaggacagccagtgtctcatgatgcaaaagttcgagaaagtgcctgaatccaaagtgattttcgacgcgaatgcgcccgtcgcagttcggtccaaagtccctgacagtgaatttccagtaatgcagtgtttgactgactgtaccgaggacgaggcatgttccttctttaccgtgagtacgactgagccagaaattagttgcgacttctatgcttggaccagcgacaatgtggcctgtatgacgtcagatcagaaacgcgacgcacttggaaattcaaaggccacgtcattcggttcattgcgttgtcaagtgaaagtacgcagccacggacaggatagtcctgctgtttacctcaaaaaaggacagggcagcacaacaactctccagaagaggtttgaacctaccggtttccagaatatgctatccggcctttacaatcccatcgtgttctccgcgagcggggctaacctgacggacgcccacctgttctgtctgctcgcgtgcgatcgcgacctgtgttgcgatggctttgtgctgacgcaggtgcagggcggggcaattatctgtggattgctgagcagccctagcgtccttctttgtaacgttaaagactggatggatccatcggaagcctgggccaatgcaacttgccccggagtgacctatgaccaagagtcgcaccaagttatcttaagattgggtgatcaggagtttataaagagcttgactccactcgagggaacccaggatacttttaccaattttcagcaggtttacttgtggaaagattccgacatgggcagccggccagagagcatgggctgcaggaaagatacagtcccccgcccagctagccctactgaggccgggctgaccactgagttgttctccccagtggacctgaatcaggtaatcgtgaacggaaatcaatccctgtcaagtcagaaacattggctcttcaagcatctattttccgctcagcaagcaaatctatggtgcctaagtaggtgcgttcaggagcactccttttgtcaactggccgaaatcacagaatccgcttccttatactttacgtgtactctttatcccgaggcccaagtttgcgacgatattatggagagcaatgcgcagggatgtaggctaatcttgcctcagatgccaaaggcattgtttcgaaagaaagtgatccttgaggacaaagtaaaaaacttctatacaagactgccctttcagaagctgatgggaatcagcattcgcaacaaagttcccatgtccgagaaaagcatatctaatgggtttttcgagtgcgagcgaaggtgcgacgcggatccttgttgtaccggattcggcttcctcaatgtgagtcagttgaaaggcggggaagtgacctgtctgaccttaaacagtcttggcatccaaatgtgctccgaggagaatggcggagcatggaggattttggactgcgggagtccagacattgaggttcacacctaccctttcgggtggtatcagaagcccatcgcacagaacaatgccccctctttctgtccgcttgtggtcctaccttccctgaccgagaaggtgtctcttgatagttggcaaagcctcgcactgtcaagcgtcgtggtggacccctctattagacactttgatgtcgcacacgtctctactgctgccacgagcaacttttctgccgtgcgggatttgtgtttgtccgagtgtagccagcatgaggcctgtctgattacaactctgcagacacagcctggtgctgtccggtgtatgttttacgcggatactcagtcatgcactcactcccttcagggtcaaaactgccgactgctgcttcgggaagaagcaactcacatttaccggaaaccagggatcagcctactctcctatgaagccagtgtcccgagtgtgcctatatccacccacggcaggctgctcgggcgtagtcaagccatccaagttgggacctcctggaaacaggtcgatcaattcctgggagtcccctatgcagccccacctttagccgaaagacgctttcaggccccagagccattaaattggaccgggtcatgggatgcgtctaaacctagagccagttgctggcaacctggaacaagaaccagcacgtcccccggtgtgagcgaggactgcctctacctcaacgtttttattcctcagaacgtggctccaaacgcttcagtgttggtgtttttccataacaccatggatcgggaggaatccgaggggtggcccgcaatcgatgggagcttcctcgcggcagttggcaatctgatagtagtgaccgcatcttatagagtcggagtattcggtttcctcagctccggctccggcgaagttagtggaaactggggcctcttggatcaagtggcagccttgacgtgggttcagactcacattcgaggctttggcggcgaccctagacgggtgagtctcgcagccgaccgaggcggggccgatgtggcttccatccaccttctcacggcgcgagccactaattcgcagctcttccgacgcgcagtcttaatgggaggtagtgccctctctccggcggcagtcatcagccatgaaagggcccagcagcaggcaatcgcgctcgctaaagaggtgtcctgtcctatgagcagcagccaggaagtggtcagttgcctgcgccagaaaccagcaaatgtgctgaacgacgcacagaccaagttgcttgccgtctcgggaccttttcattactggggtcctgtcatagatgggcattttctcagggagccgccagctcgggcactgaagaggagtttgtgggtggaagtggacctcttgatagggtccagtcaggacgatggtctgatcaaccgtgccaaagcagtgaagcaatttgaggaatcaagaggccgaacctcctcaaagactgcattttaccaggcacttcagaactctcttgggggcgaagattctgacgcccgtgtggaggctgccgccacttggtactattcccttgaacacagcaccgacgattatgccagtttttcacgcgcactggagaacgccaccagagattatttcattatatgtcctattatcgatatggcttctgcctgggcaaagcgggccaggggaaacgtgtttatgtaccatgcaccagagaattacggccacggaagcctcgagttactcgcagatgtgcagtttgcgctgggactaccattttacccagcatacgagggacaattcagcctagaggaaaagtccctcagtctcaaaattatgcagtatttctctcacttcattagatctgggaaccctaattacccctacgaatttagccgcaaagtgcccactttcgcgaccccctggccagacttcgtgcctagggccgggggtgaaaattataaagaattctcagagctgttgcctaacaggcaggggcttaagaaggcagattgctccttctggtctaaatatatttctagtttgaagacatcggctgatggagcaaaaggcggccagtccgcagaatccgaggaggaggagctgactgcaggatctggcctgcgcgaagatcttctatccctgcaggaaccaggatctaaaacatattcgaagtag

SEQ ID NO: 136489 - DNA, 8307 bp, Artificial Sequence
  derived and/or modified sequence
atggccctggtgctggagatcttcaccctgctggccagcatctgctgggtgtctgccaacatctttgagtaccaggtggatgcccagcccctgcggccctgtgagctgcagcgggagacagccttcctgaagcaggccgactatgtgccccagtgtgccgaggatggcagcttccagacagtgcagtgccagaatgatggccgcagctgctggtgtgtgggcgccaacggcagcgaggtgctgggcagccggcagcccggccggcctgtggcctgcctgtccttctgccagctgcagaagcagcagatcctgctgagcggctacatcaacagcacagacaccagctacctgccccagtgccaggacagcggggactatgcccctgtgcagtgtgatgtgcagcaggtgcagtgctggtgtgtggatgctgagggcatggaggtgtatggcacccggcagctgggccggcccaagcgctgccccaggagctgtgagatccggaacagaaggctgctgcatggagtgggggacaagagccccccccagtgcagcgctgagggggagttcatgcctgtgcagtgcaagtttgtgaacaccacagacatgatgatctttgacctggtgcacagctacaaccgcttcccagatgcctttgtgaccttcagcagcttccagaggcgcttccctgaggtgtctggctactgccactgtgccgacagccagggccgggagctggccgagaccggcctggagctgctgctggatgagatctatgacaccatctttgctggcctggacctgcccagcaccttcacagagaccaccctgtaccgcatcctgcagaggcgcttcctggccgtgcagagcgtcatcagcggccgcttccgctgccccaccaagtgtgaggtggagcgcttcaccgccaccagctttggccacccctacgtgcccagctgcagaagaaatggagactaccaggccgtgcagtgccagacagagggcccctgctggtgtgtggatgcccagggcaaggagatgcacggcacccggcagcagggcgagccccccagctgtgccgagggccagagctgtgccagcgagcggcagcaggccctgagccggctgtacttcggcaccagcggctacttcagccagcacgacctcttcagcagccctgagaagcgctgggccagcccccgggtggccaggtttgccaccagctgcccccccaccatcaaggagctgtttgtggacagcggcctgctgcggcccatggtggagggccagagccagcagttctctgtgtctgagaacctgctgaaggaggccatccgggccatcttccccagccggggcctggcccggctggccctgcagttcaccaccaaccccaagaggctgcagcagaacctgtttggaggcaagttcctggtgaatgtgggccagttcaacctgagcggggccctgggcacccggggcaccttcaacttcagccagttcttccagcagctgggcctggccagcttcctgaatggaggccggcaggaggacctggccaagcccctgtctgtgggcctggacagcaacagcagcacaggcaccccagaggccgccaagaaggatggcaccatgaacaagcccaccgtgggcagctttggatttgagatcaacctgcaggagaaccagaatgccctgaagttcctggccagcctgctggagctgcctgagttcctgctcttcctgcagcacgccatctctgtgcctgaagatgtggcccgggacctgggagatgtgatggagaccgtgctgagcagccagacctgtgagcagaccccagagcggctgtttgtgcccagctgcaccacagagggcagctatgaagatgtgcagtgcttctctggagagtgctggtgtgtgaacagctggggcaaggagctgcccggcagccgggtgcggggcggccagccccgctgccccacagactgtgagaagcagagggccaggatgcagagcctgatgggcagccagcctgctggcagcaccctgtttgtgcctgcctgcaccagcgagggccacttcctgcctgtgcagtgcttcaacagcgagtgctactgtgtggatgctgagggccaggccatccctggcaccaggtctgccatcggcaagcccaagaagtgccccaccccctgccagctgcagagcgagcaggccttcctgaggacagtgcaggccctgctgagcaacagctccatgctgcccaccctgagtgacacctacatcccccagtgcagcacagatggccagtggaggcaggtgcagtgcaatggacctcctgagcaggtgtttgagctgtaccagcgctgggaggcccagaacaagggccaggacctgaccccagccaagctgctggtgaagatcatgagctaccgggaggccgccagcggcaacttcagcctcttcatccagagcctgtatgaagctggccagcaggatgtgtttcctgtgctgagccagtaccccagcctgcaggatgtgcccctggccgccctggagggcaagaggccccagccccgggagaacatcctgctggagccctacctgttctggcagatcctgaatggccagctgagccagtacccaggcagctacagcgacttcagcacccccctggcccactttgacctgaggaactgctggtgtgtggatgaggccggccaggagctggagggcatgaggtctgagcccagcaagctgcccacctgccccggcagctgtgaggaggccaagctgcgggtgctgcagttcatccgggagacagaggagatcgtgtctgccagcaacagcagccgcttccccctgggggagagcttcctggtggccaagggcatccggctgagaaatgaagacctgggcctgcccccactcttccccccccgggaggcctttgctgagcagttcctgcggggcagtgactatgccatccggctggccgcccagagcaccctgtccttctaccagaggcggcgcttctccccagatgattctgctggggccagcgccctgctgcggagcggcccctacatgccccagtgtgatgccttcggctcctgggagcctgtgcagtgccacgccggcaccggccactgctggtgtgtggatgagaagggcggcttcatccctggcagcctgacagcccggagcctgcagatcccccagtgccccaccacctgtgagaagagcaggaccagcggcctgctgagctcctggaagcaggcccggagccaggagaaccccagccccaaggacctgtttgtgcctgcctgcctggagactggagaatatgcccggctgcaggccagcggggccggcacctggtgtgtggaccctgccagcggggaggagctgcggcccggcagcagcagcagcgcccagtgccccagcctgtgcaatgtgctgaagagcggcgtgctgagcagaagagtgtccccaggctacgtgcctgcctgcagagcagaagatggcggcttcagccctgtgcagtgtgaccaggcccagggcagctgctggtgtgtgatggacagcggggaggaggtgcccggcaccagggtgactggaggccagcctgcctgtgagagcccccgctgccccctgcccttcaatgccagcgaggtggtgggcggcaccatcctgtgtgagaccatcagcggccccaccggcagcgccatgcagcagtgccagctgctgtgccggcagggctcctggagcgtcttccccccaggccccctcatctgcagcctggagagcggccgctgggagagccagctgccccagccccgggcctgccagaggccccagctgtggcagaccatccagacccagggccacttccagctgcagctgcccccaggcaagatgtgcagcgctgactatgctgacctgctgcagaccttccaggtgttcatcctggatgagctgacagcccggggcttctgccagatccaggtgaagaccttcggcaccctggtgtccatccctgtgtgcaacaacagctctgtgcaggtgggctgcctgacccgggagcggctgggcgtgaatgtgacctggaagagccggctggaggacatccctgtggccagcctgcctgacctgcatgacatcgagcgggccctggtgggcaaggacctgctgggccgcttcacagacctgatccagagcggcagcttccagctgcacctggacagcaagaccttccctgctgagaccatccgcttcctgcagggcgaccacttcggcaccagccccaggacctggtttggctgcagcgagggcttctaccaggtgctgaccagcgaggccagccaggacggcctgggctgtgtgaagtgcccagagggcagctacagccaggatgaggagtgcatcccctgccctgtgggcttctaccaggagcaggccggcagcctggcctgtgtgccctgccctgtgggccgcaccaccatctctgctggggccttcagccagacccactgtgtgacagactgccagagaaatgaagctggcctgcagtgtgaccagaatggccagtaccgggccagccagaaggaccggggcagcggcaaggccttctgtgtggatggagagggccgccgcctgccctggtgggagacagaggcccccctggaggacagccagtgcctgatgatgcagaagtttgagaaggtgcctgagagcaaggtgatctttgatgccaatgcccctgtggccgtgcgcagcaaggtgcctgacagcgagttccctgtgatgcagtgcctgacagactgcacagaagatgaggcctgcagcttcttcaccgtgtccaccacagagcctgagatcagctgtgacttctacgcctggaccagtgacaacgtggcctgcatgaccagtgaccagaagagagatgccctgggcaacagcaaggccaccagctttggcagcctgcgctgccaggtgaaggtgcgcagccacggccaggacagccctgctgtgtacctgaagaagggccagggcagcaccaccaccctgcagaagagatttgagcccaccggcttccagaacatgctgagcggcctgtacaaccccatcgtgttttctgccagcggggccaacctgacagatgcccacctgttctgcctgctggcctgtgaccgggacctgtgctgtgatggctttgtgctgacccaggtgcagggcggggccatcatctgtggcctgctgagcagccccagcgtgctgctgtgcaatgtgaaggactggatggaccccagcgaggcctgggccaatgccacctgccctggggtgacctatgaccaggagagccaccaggtgatcctgcggctgggggaccaggagttcatcaagagcctgacccccctggagggcacccaggacaccttcaccaacttccagcaggtgtacctgtggaaggacagcgacatgggcagcaggcctgagagcatgggctgcaggaaggacacagtgcccaggcctgccagccccacagaagctggcctgaccacagagctgttcagccctgtggacctgaaccaggtgattgtgaatggaaaccagagcctgagcagccagaagcactggctgttcaagcacctgttcagcgcccagcaggccaacctgtggtgcctgagccgctgtgtgcaggagcacagcttctgccagctggccgagatcacagagagcgccagcctgtacttcacctgcaccctgtacccagaggcccaggtgtgtgatgacatcatggagagcaatgcccagggctgccgcctcatcctgccccagatgcccaaggccctcttcaggaagaaggtgatcctggaggacaaggtgaagaacttctacacccggctgcccttccagaagctgatgggcatcagcatccggaacaaggtgcccatgtctgagaagagcatcagcaatggcttctttgaatgtgagcggcgctgtgatgctgacccctgctgcaccggcttcggcttcctgaatgtgtcccagctgaagggcggggaggtgacctgcctgaccctgaacagcctgggcatccagatgtgcagcgaggagaatggaggagcctggaggatcctggactgtggcagcccagacatcgaggtgcacacctaccccttcggctggtaccagaagcccatcgcccagaacaatgcccccagcttctgccccctggtggtgctgcccagcctgacagagaaggtgtccctggacagctggcagagcctggccctgagctctgtggtggtggaccccagcatccgccactttgatgtggcccacgtgtccacagctgccaccagcaacttctctgctgtgcgggacctgtgcctgtctgaatgttcccagcacgaggcctgcctgatcaccaccctgcagacccagcctggagctgtgcgctgcatgttttatgctgacacccagagctgcacccacagcctgcagggccagaactgccgcctgctgctgcgggaggaggccacccacatctacaggaagccaggcatcagcctgctgtcctatgaggcctctgtgcccagcgtgcccatcagcacccacggccgcctgctgggccgcagccaggccatccaggtgggcacctcctggaagcaggtggaccagttcctgggcgtgccctatgctgccccacccctggccgagcggcgcttccaggcccctgagcccctgaactggacaggctcctgggatgccagcaagccccgggccagctgctggcagcccggcaccaggaccagcaccagccctggggtgtctgaggactgcctgtacctgaatgtgttcatcccccagaatgtggccccaaatgcctctgtgctggtgttcttccacaacaccatggaccgggaggagagcgagggctggccagccattgatggcagcttcctggccgctgtgggcaacctgattgtggtgacagccagctacagagtgggcgtgtttggcttcctgagcagcggcagcggggaggtgtctggcaactggggcctgctggaccaggtggccgccctgacctgggtgcagacccacatccggggctttggaggagacccccggcgggtgtccctggccgctgacagaggaggagcagatgtggccagcatccacctgctgacagcccgggccaccaacagccagctgttccggcgggctgtgctgatgggcggcagcgccctgagccctgctgctgtgatcagccatgagcgggcccagcagcaggccatcgccctggccaaggaggtgtcctgccccatgagcagcagccaggaggtggtgtcctgcctgcggcagaagccagccaacgtgctgaatgatgcccagaccaagctgctggccgtgtctggccccttccactactggggccctgtgattgatggccacttcctgcgggagcccccagcccgggccctgaagaggagcctgtgggtggaggtggacctgctgattggcagcagccaggatgatggcctcatcaacagagccaaggctgtgaagcagtttgaggagagccggggccgcaccagcagcaagacagccttctaccaggccctgcagaacagcctgggcggggaggacagtgatgcccgggtggaggccgccgccacctggtactacagcctggagcacagcacagatgattatgccagcttcagccgggccctggagaatgccacccgggactacttcatcatctgccccatcatcgacatggccagcgcctgggccaagagggcccggggaaatgtgttcatgtaccacgccccagaaaattatggccacggcagcctggagctgctggctgatgtgcagtttgccctgggcctgcccttctacccagcctatgagggccagttcagcctggaggagaagagcctgagcctgaagatcatgcagtacttcagccacttcatccgcagcggcaaccccaactacccctatgagttcagcaggaaggtgcccacctttgccaccccctggccagactttgtgcccagggctggaggagagaactacaaggagttcagcgagctgctgcccaaccggcagggcctgaagaaggctgactgcagcttctggagcaagtacatcagcagcctgaagaccagcgcagatggagccaagggcggccagagcgctgagagcgaggaggaggagctgacagctggcagcggcctgcgggaggacctgctgagcctgcaggagcccggcagcaagacctacagcaagtag

SEQ ID NO: 136490 - DNA, 8136 bp, Artificial Sequence
  derived and/or modified sequence
atggccctggtgctggagatcttcaccctgctggccagcatctgctgggtgtctgccaacatctttgagtaccaggtggatgcccagcccctgcggccctgtgagctgcagcgggagacagccttcctgaagcaggccgactatgtgccccagtgtgccgaggatggcagcttccagacagtgcagtgccagaatgatggccgcagctgctggtgtgtgggcgccaacggcagcgaggtgctgggcagccggcagcccggccggcctgtggcctgcctgtccttctgccagctgcagaagcagcagatcctgctgagcggctacatcaacagcacagacaccagctacctgccccagtgccaggacagcggggactatgcccctgtgcagtgtgatgtgcagcaggtgcagtgctggtgtgtggatgctgagggcatggaggtgtatggcacccggcagctgggccggcccaagcgctgccccaggagctgtgagatccggaacagaaggctgctgcatggagtgggggacaagagccccccccagtgcagcgctgagggggagttcatgcctgtgcagtgcaagtttgtgaacaccacagacatgatgatctttgacctggtgcacagctacaaccgcttcccagatgcctttgtgaccttcagcagcttccagaggcgcttccctgaggtgtctggctactgccactgtgccgacagccagggccgggagctggccgagaccggcctggagctgctgctggatgagatctatgacaccatctttgctggcctggacctgcccagcaccttcacagagaccaccctgtaccgcatcctgcagaggcgcttcctggccgtgcagagcgtcatcagcggccgcttccgctgccccaccaagtgtgaggtggagcgcttcaccgccaccagctttggccacccctacgtgcccagctgcagaagaaatggagactaccaggccgtgcagtgccagacagagggcccctgctggtgtgtggatgcccagggcaaggagatgcacggcacccggcagcagggcgagccccccagctgtgccgagggccagagctgtgccagcgagcggcagcaggccctgagccggctgtacttcggcaccagcggctacttcagccagcacgacctcttcagcagccctgagaagcgctgggccagcccccgggtggccaggtttgccaccagctgcccccccaccatcaaggagctgtttgtggacagcggcctgctgcggcccatggtggagggccagagccagcagttctctgtgtctgagaacctgctgaaggaggccatccgggccatcttccccagccggggcctggcccggctggccctgcagttcaccaccaaccccaagaggctgcagcagaacctgtttggaggcaagttcctggtgaatgtgggccagttcaacctgagcggggccctgggcacccggggcaccttcaacttcagccagttcttccagcagctgggcctggccagcttcctgaatggaggccggcaggaggacctggccaagcccctgtctgtgggcctggacagcaacagcagcacaggcaccccagaggccgccaagaaggatggcaccatgaacaagcccaccgtgggcagctttggatttgagatcaacctgcaggagaaccagaatgccctgaagttcctggccagcctgctggagctgcctgagttcctgctcttcctgcagcacgccatctctgtgcctgaagatgtggcccgggacctgggagatgtgatggagaccgtgctgagcagccagacctgtgagcagaccccagagcggctgtttgtgcccagctgcaccacagagggcagctatgaagatgtgcagtgcttctctggagagtgctggtgtgtgaacagctggggcaaggagctgcccggcagccgggtgcggggcggccagccccgctgccccacagactgtgagaagcagagggccaggatgcagagcctgatgggcagccagcctgctggcagcaccctgtttgtgcctgcctgcaccagcgagggccacttcctgcctgtgcagtgcttcaacagcgagtgctactgtgtggatgctgagggccaggccatccctggcaccaggtctgccatcggcaagcccaagaagtgccccaccccctgccagctgcagagcgagcaggccttcctgaggacagtgcaggccctgctgagcaacagctccatgctgcccaccctgagtgacacctacatcccccagtgcagcacagatggccagtggaggcaggtgcagtgcaatggacctcctgagcaggtgtttgagctgtaccagcgctgggaggcccagaacaagggccaggacctgaccccagccaagctgctggtgaagatcatgagctaccgggaggccgccagcggcaacttcagcctcttcatccagagcctgtatgaagctggccagcaggatgtgtttcctgtgctgagccagtaccccagcctgcaggatgtgcccctggccgccctggagggcaagaggccccagccccgggagaacatcctgctggagccctacctgttctggcagatcctgaatggccagctgagccagtacccaggcagctacagcgacttcagcacccccctggcccactttgacctgaggaactgctggtgtgtggatgaggccggccaggagctggagggcatgaggtctgagcccagcaagctgcccacctgccccggcagctgtgaggaggccaagctgcgggtgctgcagttcatccgggagacagaggagatcgtgtctgccagcaacagcagccgcttccccctgggggagagcttcctggtggccaagggcatccggctgagaaatgaagacctgggcctgcccccactcttccccccccgggaggcctttgctgagcagttcctgcggggcagtgactatgccatccggctggccgcccagagcaccctgtccttctaccagaggcggcgcttctccccagatgattctgctggggccagcgccctgctgcggagcggcccctacatgccccagtgtgatgccttcggctcctgggagcctgtgcagtgccacgccggcaccggccactgctggtgtgtggatgagaagggcggcttcatccctggcagcctgacagcccggagcctgcagatcccccagtgccccaccacctgtgagaagagcaggaccagcggcctgctgagctcctggaagcaggcccggagccaggagaaccccagccccaaggacctgtttgtgcctgcctgcctggagactggagaatatgcccggctgcaggccagcggggccggcacctggtgtgtggaccctgccagcggggaggagctgcggcccggcagcagcagcagcgcccagtgccccagcctgtgcaatgtgctgaagagcggcgtgctgagcagaagagtgtccccaggctacgtgcctgcctgcagagcagaagatggcggcttcagccctgtgcagtgtgaccaggcccagggcagctgctggtgtgtgatggacagcggggaggaggtgcccggcaccagggtgactggaggccagcctgcctgtgagagcccccgctgccccctgcccttcaatgccagcgaggtggtgggcggcaccatcctgtgtgagaccatcagcggccccaccggcagcgccatgcagcagtgccagctgctgtgccggcagggctcctggagcgtcttccccccaggccccctcatctgcagcctggagagcggccgctgggagagccagctgccccagccccgggcctgccagaggccccagctgtggcagaccatccagacccagggccacttccagctgcagctgcccccaggcaagatgtgcagcgctgactatgctgacctgctgcagaccttccaggtgttcatcctggatgagctgacagcccggggcttctgccagatccaggtgaagaccttcggcaccctggtgtccatccctgtgtgcaacaacagctctgtgcaggtgggctgcctgacccgggagcggctgggcgtgaatgtgacctggaagagccggctggaggacatccctgtggccagcctgcctgacctgcatgacatcgagcgggccctggtgggcaaggacctgctgggccgcttcacagacctgatccagagcggcagcttccagctgcacctggacagcaagaccttccctgctgagaccatccgcttcctgcagggcgaccacttcggcaccagccccaggacctggtttggctgcagcgagggcttctaccaggtgctgaccagcgaggccagccaggacggcctgggctgtgtgaagtgcccagagggcagctacagccaggatgaggagtgcatcccctgccctgtgggcttctaccaggagcaggccggcagcctggcctgtgtgccctgccctgtgggccgcaccaccatctctgctggggccttcagccagacccacctgatgcagaagtttgagaaggtgcctgagagcaaggtgatctttgatgccaatgcccctgtggccgtgcgcagcaaggtgcctgattctgagttccctgtgatgcagtgcctgacagactgcacagaagatgaggcctgcagcttcttcaccgtgtccaccacagagcctgagatcagctgtgacttctacgcctggaccagtgacaacgtggcctgcatgaccagtgaccagaagagagatgccctgggcaacagcaaggccaccagctttggcagcctgcgctgccaggtgaaggtgcgcagccacggccaggacagccctgctgtgtacctgaagaagggccagggcagcaccaccaccctgcagaagagatttgagcccaccggcttccagaacatgctgagcggcctgtacaaccccatcgtgttcagcgccagcggggccaacctgacagatgcccacctgttctgcctgctggcctgtgaccgggacctgtgctgtgatggctttgtgctgacccaggtgcagggcggggccatcatctgtggcctgctgagcagccccagcgtgctgctgtgcaatgtgaaggactggatggaccccagcgaggcctgggccaatgccacctgccctggggtgacctatgaccaggagagccaccaggtgatcctgcggctgggggaccaggagttcatcaagagcctgacccccctggagggcacccaggacaccttcaccaacttccagcaggtgtacctgtggaaggacagcgacatgggcagcaggcctgagagcatgggctgcaggaaggacacagtgcccaggcctgccagccccacagaggccggcctgaccacagagctgttcagccctgtggacctgaaccaggtgattgtgaatggaaaccagagcctgagcagccagaagcactggctgttcaagcacctgttcagcgcccagcaggccaacctgtggtgcctgagccgctgtgtgcaggagcacagcttctgccagctggccgagatcacagaaagtgccagcctgtacttcacctgcaccctgtacccagaggcccaggtgtgtgatgacatcatggagagcaatgcccagggctgccgcctcatcctgccccagatgcccaaggccctcttcaggaagaaggtgatcctggaggacaaggtgaagaacttctacacccggctgcccttccagaagctgatgggcatcagcatccggaacaaggtgcccatgtctgagaagagcatcagcaatggcttctttgaatgtgaaagaagatgtgatgctgacccctgctgcaccggcttcggcttcctgaatgtgtcccagctgaagggcggggaggtgacctgcctgaccctgaacagcctgggcatccagatgtgcagtgaagaaaatggaggagcctggaggatcctggactgtggcagcccagacatcgaggtgcacacctaccccttcggctggtaccagaagcccatcgcccagaacaatgcccccagcttctgccccctggtggtgctgcccagcctgacagagaaggtgtccctggacagctggcagagcctggccctgagctctgtggtggtggaccccagcatccgccactttgatgtggcccacgtgtccacagctgccaccagcaacttctctgctgtgcgggacctgtgcctgtctgagtgcagccagcacgaggcctgcctgatcaccaccctgcagacccagcccggggctgtgcgctgcatgttttatgctgacacccagagctgcacccacagcctgcagggccagaactgccgcctgctgctgcgggaggaggccacccacatctacaggaagccaggcatcagcctgctgtcctatgaggcctctgtgcccagcgtgcccatcagcacccacggccgcctgctgggccgcagccaggccatccaggtgggcacctcctggaagcaggtggaccagttcctgggcgtgccctatgctgccccacccctggccgagcggcgcttccaggcccctgagcccctgaactggacaggctcctgggatgccagcaagccccgggccagctgctggcagcccggcaccaggaccagcaccagccctggggtgtctgaggactgcctgtacctgaatgtgttcatcccccagaatgtggccccaaatgcctctgtgctggtgttcttccacaacaccatggaccgggaggagagcgagggctggccagccattgatggcagcttcctggccgctgtgggcaacctgattgtggtgacagccagctacagagtgggcgtgtttggcttcctgagcagcggcagcggggaggtgtctggcaactggggcctgctggaccaggtggccgccctgacctgggtgcagacccacatccggggctttggaggagaccccaggagagtgtccctggccgctgaccggggcggcgcagatgtggccagcatccacctgctgacagcccgggccaccaacagccagctgttcagaagagctgtgctgatgggcggcagcgccctgagccctgctgctgtgatcagccatgagcgggcccagcagcaggccatcgccctggccaaggaggtgtcctgccccatgagcagcagccaggaggtggtgtcctgcctgcggcagaagccagccaacgtgctgaatgatgcccagaccaagctgctggccgtgtctggccccttccactactggggccctgtgattgatggccacttcctgcgggagcccccagcccgggccctgaagaggagcctgtgggtggaggtggacctgctgattggcagcagccaggatgatggcctcatcaacagagccaaggctgtgaagcagtttgaggagagccggggccgcaccagcagcaagacagccttctaccaggccctgcagaacagcctgggcggagaagattctgatgcccgggtggaggccgccgccacctggtactacagcctggagcacagcacagatgattatgccagcttcagccgggccctggagaatgccacccgggactacttcatcatctgccccatcatcgacatggccagcgcctgggccaagagggcccggggaaatgtgttcatgtaccacgcccctgagaactacggccacggcagcctggagctgctggctgatgtgcagtttgccctgggcctgcccttctacccagcctatgagggccagttcagcctggaggagaagagcctgagcctgaagatcatgcagtacttcagccacttcatccgcagcggcaaccccaactacccctatgagttcagcaggaaggtgcccacctttgccaccccctggccagactttgtgcccagggctggaggagagaactacaaggagttcagcgagctgctgcccaaccggcagggcctgaagaaggctgactgcagcttctggagcaagtacatcagcagcctgaagaccagcgcagatggagccaagggcggccagagcgctgagagcgaggaggaggagctgacagctggcagcggcctgcgggaggacctgctgagcctgcaggagcccggcagcaagacctacagcaagtag

SEQ ID NO: 136491 - DNA, 4725 bp, Artificial Sequence
  derived and/or modified sequence
atccccaggaagcccatcagcaagaggcctgtgcggcccagcctgcccaggagcccccgctgccccctgcccttcaatgccagcgaggtggtgggcggcaccatcctgtgtgagaccatcagcggccccaccggcagcgccatgcagcagtgccagctgctgtgccggcagggctcctggagcgtcttccccccaggccccctcatctgcagcctggagagcggccgctgggagagccagctgccccagccccgggcctgccagaggccccagctgtggcagaccatccagacccagggccacttccagctgcagctgcccccaggcaagatgtgcagcgctgactatgctgacctgctgcagaccttccaggtgttcatcctggatgagctgacagcccggggcttctgccagatccaggtgaagaccttcggcaccctggtgtccatccctgtgtgcaacaacagctctgtgcaggtgggctgcctgacccgggagcggctgggcgtgaatgtgacctggaagagccggctggaggacatccctgtggccagcctgcctgacctgcatgacatcgagcgggccctggtgggcaaggacctgctgggccgcttcacagacctgatccagagcggcagcttccagctgcacctggacagcaagaccttccctgctgagaccatccgcttcctgcagggcgaccacttcggcaccagccccaggacctggtttggctgcagcgagggcttctaccaggtgctgaccagcgaggccagccaggacggcctgggctgtgtgaagtgcccagagggcagctacagccaggatgaggagtgcatcccctgccctgtgggcttctaccaggagcaggccggcagcctggcctgtgtgccctgccctgtgggccgcaccaccatctctgctggggccttcagccagacccactgtgtgacagactgccagagaaatgaagctggcctgcagtgtgaccagaatggccagtaccgggccagccagaaggaccggggcagcggcaaggccttctgtgtggatggagagggccgccgcctgccctggtgggagacagaggcccccctggaggacagccagtgcctgatgatgcagaagtttgagaaggtgcctgagagcaaggtgatctttgatgccaatgcccctgtggccgtgcgcagcaaggtgcctgacagcgagttccctgtgatgcagtgcctgacagactgcacagaagatgaggcctgcagcttcttcaccgtgtccaccacagagcctgagatcagctgtgacttctacgcctggaccagtgacaacgtggcctgcatgaccagtgaccagaagagagatgccctgggcaacagcaaggccaccagctttggcagcctgcgctgccaggtgaaggtgcgcagccacggccaggacagccctgctgtgtacctgaagaagggccagggcagcaccaccaccctgcagaagagatttgagcccaccggcttccagaacatgctgagcggcctgtacaaccccatcgtgttttctgccagcggggccaacctgacagatgcccacctgttctgcctgctggcctgtgaccgggacctgtgctgtgatggctttgtgctgacccaggtgcagggcggggccatcatctgtggcctgctgagcagccccagcgtgctgctgtgcaatgtgaaggactggatggaccccagcgaggcctgggccaatgccacctgccctggggtgacctatgaccaggagagccaccaggtgatcctgcggctgggggaccaggagttcatcaagagcctgacccccctggagggcacccaggacaccttcaccaacttccagcaggtgtacctgtggaaggacagcgacatgggcagcaggcctgagagcatgggctgcaggaaggacacagtgcccaggcctgccagccccacagaagctggcctgaccacagagctgttcagccctgtggacctgaaccaggtgattgtgaatggaaaccagagcctgagcagccagaagcactggctgttcaagcacctgttcagcgcccagcaggccaacctgtggtgcctgagccgctgtgtgcaggagcacagcttctgccagctggccgagatcacagagagcgccagcctgtacttcacctgcaccctgtacccagaggcccaggtgtgtgatgacatcatggagagcaatgcccagggctgccgcctcatcctgccccagatgcccaaggccctcttcaggaagaaggtgatcctggaggacaaggtgaagaacttctacacccggctgcccttccagaagctgatgggcatcagcatccggaacaaggtgcccatgtctgagaagagcatcagcaatggcttctttgaatgtgagcggcgctgtgatgctgacccctgctgcaccggcttcggcttcctgaatgtgtcccagctgaagggcggggaggtgacctgcctgaccctgaacagcctgggcatccagatgtgcagcgaggagaatggaggagcctggaggatcctggactgtggcagcccagacatcgaggtgcacacctaccccttcggctggtaccagaagcccatcgcccagaacaatgcccccagcttctgccccctggtggtgctgcccagcctgacagagaaggtgtccctggacagctggcagagcctggccctgagctctgtggtggtggaccccagcatccgccactttgatgtggcccacgtgtccacagctgccaccagcaacttctctgctgtgcgggacctgtgcctgtctgaatgttcccagcacgaggcctgcctgatcaccaccctgcagacccagcctggagctgtgcgctgcatgttttatgctgacacccagagctgcacccacagcctgcagggccagaactgccgcctgctgctgcgggaggaggccacccacatctacaggaagccaggcatcagcctgctgtcctatgaggcctctgtgcccagcgtgcccatcagcacccacggccgcctgctgggccgcagccaggccatccaggtgggcacctcctggaagcaggtggaccagttcctgggcgtgccctatgctgccccacccctggccgagcggcgcttccaggcccctgagcccctgaactggacaggctcctgggatgccagcaagccccgggccagctgctggcagcccggcaccaggaccagcaccagccctggggtgtctgaggactgcctgtacctgaatgtgttcatcccccagaatgtggccccaaatgcctctgtgctggtgttcttccacaacaccatggaccgggaggagagcgagggctggccagccattgatggcagcttcctggccgctgtgggcaacctgattgtggtgacagccagctacagagtgggcgtgtttggcttcctgagcagcggcagcggggaggtgtctggcaactggggcctgctggaccaggtggccgccctgacctgggtgcagacccacatccggggctttggaggagacccccggcgggtgtccctggccgctgacagaggaggagcagatgtggccagcatccacctgctgacagcccgggccaccaacagccagctgttccggcgggctgtgctgatgggcggcagcgccctgagccctgctgctgtgatcagccatgagcgggcccagcagcaggccatcgccctggccaaggaggtgtcctgccccatgagcagcagccaggaggtggtgtcctgcctgcggcagaagccagccaacgtgctgaatgatgcccagaccaagctgctggccgtgtctggccccttccactactggggccctgtgattgatggccacttcctgcgggagcccccagcccgggccctgaagaggagcctgtgggtggaggtggacctgctgattggcagcagccaggatgatggcctcatcaacagagccaaggctgtgaagcagtttgaggagagccggggccgcaccagcagcaagacagccttctaccaggccctgcagaacagcctgggcggggaggacagtgatgcccgggtggaggccgccgccacctggtactacagcctggagcacagcacagatgattatgccagcttcagccgggccctggagaatgccacccgggactacttcatcatctgccccatcatcgacatggccagcgcctgggccaagagggcccggggaaatgtgttcatgtaccacgccccagaaaattatggccacggcagcctggagctgctggctgatgtgcagtttgccctgggcctgcccttctacccagcctatgagggccagttcagcctggaggagaagagcctgagcctgaagatcatgcagtacttcagccacttcatccgcagcggcaaccccaactacccctatgagttcagcaggaaggtgcccacctttgccaccccctggccagactttgtgcccagggctggaggagagaactacaaggagttcagcgagctgctgcccaaccggcagggcctgaagaaggctgactgcagcttctggagcaagtacatcagcagcctgaagaccagcgcagatggagccaagggcggccagagcgctgagagcgaggaggaggagctgacagctggcagcggcctgcgggaggacctgctgagcctgcaggagcccggcagcaagacctacagcaagtag

SEQ ID NO: 136492 - DNA, 8307 bp, Artificial Sequence
  derived and/or modified sequence
atggccctggtgctggagatcttcaccctgctggccagcatctgctgggtgtccgccaatatcttcgaatatcaggtggacgctcagccgttgcgcccgtgtgaattacagcgggaaacagcattcttgaagcaggcagattacgtcccccagtgtgcagaggacggatcctttcagacagtgcagtgccaaaacgatggccgatcctgctggtgcgtcggggctaacggttccgaggttttgggttcccggcagccagggcgccctgtggcctgtctcagtttctgccagctccaaaaacagcaaattctattatccggctatattaacagcacagataccagttatctccctcaatgtcaggatagcggtgattacgctcccgtgcagtgtgacgtacagcaggtgcagtgctggtgtgttgacgcggagggaatggaagtatacggcaccaggcagctggggaggccaaagcgttgtccgagatcttgtgaaattcgaaatcgcaggctcctccacggagtgggcgataaaagcccaccacagtgctcagcagaaggcgaattcatgccggttcaatgcaaatttgtcaataccactgacatgatgatcttcgacttggtgcatagttataaccgatttcccgacgccttcgttacgttttcaagctttcagagaagattccctgaggtaagtggttattgtcattgtgctgacagtcaggggcgagaactggccgagactggattagagttactgctggacgagatttatgatacgatcttcgccgggctggacctaccatctactttcactgaaacaaccctctaccggatcctccagcggagattcttagccgttcagagtgttatctccggacgctttagatgccccactaagtgtgaggtcgagaggtttaccgctactagttttggtcacccatatgtacctagttgcaggaggaacggagattaccaggcagtccagtgccagaccgagggtccatgttggtgtgtggatgcccagggtaaggagatgcatggcacacgacagcagggcgaacctccgagctgcgctgaggggcagtcctgcgcgagcgagaggcagcaagccctgagccggctctatttcggcacaagcggctatttctcacagcatgatttatttagctccccagagaaaagatgggcatctccccgtgtagcccggttcgccacctcctgcccaccaactattaaggaattattcgtggatagcgggctcctgcggcccatggtagaaggccagagtcagcaattcagcgtatccgagaacctcctcaaggaggccatccgggcaattttcccttcccgcggccttgcgaggcttgccctgcagttcacgacaaaccctaagagactacagcagaacctgttcggggggaaatttttggtgaacgtgggccagttcaacctgagcggcgcactgggcacaaggggtacctttaacttctctcaattcttccagcaactgggacttgcatctttcttgaacggaggcagacaggaagacctggctaaacctttgagtgtcgggttagactctaactcatccaccggcacaccagaggcggcaaagaaggacgggaccatgaataagccaaccgtgggcagcttcgggtttgaaatcaacttgcaagagaaccaaaacgctctgaagttcttagcctcccttcttgaactgcccgagttccttctgtttctgcaacatgccataagcgtgcctgaggatgtggctagagatctcggcgacgtaatggaaaccgtcctctcatctcagacttgtgaacagaccccagagagactgtttgtcccatcctgcactacggagggaagctatgaggacgtgcagtgtttcagcggagaatgttggtgtgtcaactcgtggggcaaagaactccctgggtcccgggtcaggggaggacagccaagatgcccaactgactgcgagaagcaaagagcaagaatgcaatcactgatgggcagtcagcccgctggttccaccctttttgtgcctgcttgcactagtgaaggacacttcttacccgttcaatgtttcaattctgagtgttactgcgtggatgcggagggccaagctattcctggcactcggagtgctatcggcaagccgaagaaatgcccgaccccctgccagctgcagagcgaacaagcttttctccgtacagtgcaggccctgctcagcaattcctctatgctgcctacgctgtccgacacctatatcccacagtgtagcacagatgggcagtggagacaggtccagtgcaacggacccccagaacaggtgttcgagctctatcagaggtgggaggcccaaaataaaggacaggatcttacgcccgccaagctcctggttaaaattatgagctaccgggaagccgcatccggaaacttctccttatttatacagagtttatacgaagctggccagcaggatgtctttccagtgctgtcgcagtatccttcactgcaggatgtgccactcgccgcattggaaggaaaacgcccccagccacgagaaaacattctgctggagccctatctgttttggcagatccttaatggacagctctctcagtatcctggctcttactctgacttttcgacccccctggcccactttgaccttcgaaattgctggtgcgtagatgaggccgggcaggaactggaaggaatgcggtccgagccttcgaagttgcctacctgccccggttcctgcgaagaggctaaactacgcgtgctacagttcatccgtgaaactgaggagattgtgtctgcgagtaactcaagccgcttccccttaggggagagctttctggtggccaagggaattaggttgagaaacgaagatttaggactgccacccctgtttcccccacgtgaggcattcgcggaacagttcttaagaggaagcgactacgccatacgactggccgcacagtctactctcagcttttatcagcgcagaaggttctctccagacgactcggctggcgcttctgctctgctgcgcagtgggccatatatgccgcagtgtgacgctttcggctcttgggagcctgtgcagtgtcacgccggaaccggccactgctggtgtgtggatgagaagggcggtttcatcccaggaagcctcaccgcacgctcccttcagattccgcagtgtccaacaacatgtgaaaaatcccgtacaagtggcctgctgagcagctggaaacaggccaggtcccaggagaaccccagccccaaggatctctttgtacccgcctgcctcgagaccggtgagtacgccagacttcaagcatctggtgctggaacatggtgcgtggacccggctagcggtgaggagttgcgccctggctccagcagctcagctcagtgcccatcactgtgcaacgttttgaagagtggcgtgttaagccgtcgcgtttcacctggatacgtgcccgcgtgcagagccgaagacggagggttctcacccgtccagtgcgaccaggctcagggcagttgctggtgcgtcatggactccggcgaagaagttccggggactagagtcacggggggtcagcccgcttgtgaaagtcccaggtgtcccctgccgttcaacgcctccgaagtggttggcgggactatcttatgtgaaacgattagcggcccgaccggtagcgccatgcagcagtgccaactgctgtgccggcaaggcagctggtctgtgtttccacctggaccattgatatgctcattagagagtggacgatgggagtctcagctgccacagccaagagcctgtcaacgcccccagctttggcagactatacaaacccagggccatttccagttacagcttccccccggcaagatgtgtagcgccgactatgccgatttgctgcagacgttccaggtgttcatattggatgaactaaccgcccggggtttctgccagatccaagttaagactttcgggacattggtctccatacctgtttgcaataatagctctgttcaggtgggttgtctaacacgcgaacggctgggggtgaacgtcacatggaagtcacggttggaggatatccccgtggcaagcttgcccgatctgcatgatatagaacgggctctggtgggcaaggatctgctgggcaggttcaccgacctcatccagtccggtagttttcagctgcatttggatagtaaaacattcccagccgagaccatccgctttctacagggagaccactttggaacatctcccaggacttggttcgggtgtagcgaaggattctaccaagtactgacctccgaggcttctcaggatggcctgggctgtgtcaagtgtccagaagggtcctactcccaagacgaagagtgtataccttgccccgtcgggttctaccaagaacaggcgggttctctggcctgcgtcccttgtcctgtgggaagaacaaccataagtgctggagccttcagccagactcactgcgtaactgactgccagcggaacgaggcaggactgcagtgcgaccaaaacggacagtatagggctagtcaaaaggacagaggaagcgggaaagccttttgcgtcgacggcgaaggccgaagattaccttggtgggagaccgaggcgcctcttgaagacagtcagtgcctgatgatgcagaaatttgagaaggtcccagaatcaaaagtgatcttcgatgccaatgcgcccgtcgccgtcagatccaaagttccagactccgaattccccgtgatgcagtgcttgacagattgtaccgaggacgaggcgtgttcattcttcacggtgagcacaactgaacccgaaatcagctgtgatttttatgcgtggaccagtgacaacgtggcctgtatgactagcgaccagaaacgggacgcccttggaaatagcaaggctacaagctttggatccctccgatgccaggtgaaagttcggtcgcatggccaggatagccccgccgtctacctcaagaagggccaaggctccactaccactttgcaaaagcgatttgaacccaccggctttcagaacatgctttcgggtctttacaatcctattgtctttagtgcgtccggtgctaacctgactgatgcccacctgttttgcctcttggcgtgtgacagggatctgtgttgtgacggattcgtgctcacacaagtgcaaggaggcgcaataatctgcggcctgttgtcctccccgtcagttctcttgtgtaacgtgaaggattggatggacccatctgaggcctgggcaaatgcaacgtgccccggagtgacctacgatcaagaatctcaccaggtgatactgcgcctgggcgaccaggaatttattaagtcattaacccctttggaaggcacccaggacacctttactaatttccagcaggtgtatctctggaaggacagtgacatgggctccaggccagagtcaatgggctgtagaaaagatacagtgcccagaccggctagtccaacagaagcaggccttacaaccgagctgtttagcccagttgatctgaatcaggtcattgtgaacggtaaccagtcccttagctcccagaagcactggctgttcaagcatttgtttagtgcccagcaggctaatctttggtgcctgtctcgatgtgttcaggaacattctttctgtcagctggctgaaatcacagagtccgcctcgctatattttacctgtacgctgtatcccgaggcccaggtatgtgatgatataatggaaagcaacgcccagggctgtagacttatcctgcctcagatgcccaaggctcttttcagaaaaaaggttatcctggaagacaaggtgaagaatttttacaccaggctgcctttccagaaactgatgggaatatccatccggaacaaagtgccaatgtcagagaaatctatctcaaatggatttttcgagtgcgagcggagatgcgacgccgatccctgctgcactggattcggcttcctcaacgttagccagctgaaaggtggggaggtgacctgcctgactctgaactctctgggtatacagatgtgcagtgaagagaacggcggggcatggagaatcctggactgcgggtccccagacatcgaagtgcacacatacccctttggctggtatcagaagcccatcgcacagaataacgcccctagcttctgtcctcttgtcgtactgccgagtctgacagaaaaagtgtctctcgattcatggcagtcattggctctgtccagcgtagtggtcgaccctagtatcaggcactttgacgtcgcccacgtgtctacagctgcaacaagcaacttctcagccgtgcgcgacctctgcctgtccgagtgtagtcagcatgaggcatgtctgatcacgacgctccagacacaaccgggtgccgtacgttgcatgttctatgccgacacacaaagctgcacccattccctccagggccaaaactgtaggcttctcttgagagaggaggcaacccacatctacagaaaaccgggcatcagtctactgtcttacgaggcgagcgtgccctccgtccctatcagtactcatggaagacttctgggccggtcgcaggcaatccaggtgggcacaagctggaagcaagtggaccagtttttaggcgtgccttatgccgctccaccccttgctgagcgccggtttcaggctcccgagcctctcaactggactggctcctgggacgccagtaagcccagagcaagctgctggcagccgggaaccagaacaagtacctcccctggggtttcagaagactgtctctatttgaacgtcttcattccccagaacgttgctcccaatgccagtgtcctggtcttcttccacaacacaatggatagggaggagagcgagggttggccagccattgacgggagcttcctggctgcggtggggaacctgatcgtggttactgcatcataccgggtgggggtgtttggcttcctctcctccggctccggtgaggtgtccggtaactggggtctgttggatcaggtggcagcactgacttgggtgcagacccacatccgggggttcggtggagacccaaggagggtgagcttagctgcggaccgcggcggagccgatgtcgcctcaatccatctgctcactgctcgcgccaccaattcacagctgtttcgcagagcagtgctcatgggcggttctgccctctcccctgccgctgtcattagtcacgagcgtgctcagcagcaggccatagccctggccaaagaggtgtcttgtcctatgtccagtagccaggaagtggtgagctgcttgcgacagaaaccagctaatgttctgaatgatgcacaaactaagttgttagctgtgtccggaccttttcactattgggggcctgttattgatggccactttctgcgggaaccaccagcccgggctctgaagagatccctctgggtcgaggtggatttacttatcggatcctcccaggacgacggcctgatcaatcgcgccaaagcagtgaaacagttcgaggagagtaggggacgaacctcctctaagacggctttctaccaggcacttcagaacagtctaggcggcgaagactctgatgcccgagtcgaggccgccgctacctggtactatagccttgagcacagcaccgacgactatgcatccttttcacgagccctcgagaacgctactagagactacttcatcatatgcccaatcattgacatggcttccgcatgggcgaagcgcgcccgcggtaatgtgtttatgtaccacgcccccgagaactacggccacgggtcacttgaactgctggccgacgtccaattcgctctggggctgcctttctaccccgcttacgagggccagtttagtctggaggagaagagcctgtcgctcaagatcatgcagtacttctcccactttataagaagtggaaatccgaactacccgtatgagttcagtaggaaggttcccacattcgctacaccttggccagacttcgtgcctcgtgcaggtggcgagaattataaagagttctccgaactacttcccaatcgacagggccttaagaaggcagactgctcgttctggagcaaatacattagcagcctgaagacctccgctgatggagccaaggggggtcagagcgcagagagcgaagaagaagagctgactgccggctccgggctcagggaggacctgctcagcctccaggaacccggcagtaagacctatagcaagtag

SEQ ID NO: 136493 - DNA, 8136 bp, Artificial Sequence
  derived and/or modified sequence
atggccctggtgctggagatcttcaccctgctggccagcatctgctgggtatcagctaatatatttgaatatcaagttgacgcccaaccactgagaccttgtgagcttcaaagggaaactgctttcctcaagcaggctgattacgtccctcaatgcgcagaggatggtagtttccagaccgtgcagtgtcagaacgatggccgatcatgctggtgtgtgggggctaatggaagcgaggtgttgggctcccgacaacccggtagaccagtggcgtgtttgtccttctgtcagctccaaaaacagcaaatactcctgtctggatatattaactccacggacacatcctacctgccccagtgccaggatagcggggattatgcaccagtgcagtgtgacgtgcaacaggtgcaatgttggtgcgttgacgctgaaggaatggaagtttacggcacccgccagctgggaagaccgaaaaggtgcccccgatcttgcgagattcggaatcgtcgtttactgcacggagtaggcgacaaaagtcccccacagtgttccgccgagggagaattcatgcccgtgcaatgcaagtttgtcaacacaactgacatgatgatcttcgacttagtccactcttacaatcggttccccgacgcatttgtgacattttcgagctttcaaaggaggttccccgaagtgagtggttactgtcattgtgccgactcccaagggagggagctggccgaaacaggactagagctcctgctcgatgagatatatgataccattttcgcgggcctcgatctgccctctaccttcacagagacaacactgtaccgaatcctgcagaggaggttcctggctgtgcaaagcgtgatctctggtcgcttccggtgccctaccaagtgtgaggtggagagatttaccgccaccagttttgggcacccgtatgtaccctcatgtagacggaatggagactaccaggcagtacaatgccagaccgagggaccctgttggtgtgttgacgctcaaggtaaagaaatgcacgggacccgacaacaaggtgagcctccaagctgtgccgaaggtcagtcatgtgccagtgaacggcagcaggccctctcacgtctttacttcgggacatccgggtacttctctcagcatgacctgtttagctcaccagagaagcgttgggcttcgcccagagtcgcacgcttcgcaacctcctgtcctcctaccatcaaagaactgtttgtggactcaggcctactgagacctatggtggaaggacaatcgcaacaatttagcgtgagcgagaacttgttgaaggaagctatacgcgccatctttccctcacgaggactcgccagacttgctttacagtttacaactaatccaaagaggttacagcagaacctgttcggtggaaaatttctggtgaatgtgggacagttcaatctctccggtgccctgggtacccggggcacctttaacttttctcagttctttcagcagctgggtcttgcatcgtttctcaatgggggccggcaggaggaccttgctaagcccctatccgttgggctcgactctaactcaagcacaggcacacccgaagcagcgaagaaagacgggaccatgaataagcccacggtggggagctttggtttcgaaattaacctgcaagaaaaccagaatgcactgaagttcttggcctccctactagagttgccggagttcctgctcttcctgcagcacgctataagtgtccctgaagacgtggcacgagacctgggggatgtgatggagactgttttgagttcacagacgtgtgaacaaactccagagcggctcttcgtacctagttgcacaacagagggcagttacgaagacgtgcagtgttttagcggggagtgctggtgtgtgaactcctggggcaaagagctcccggggtcacgcgtgcggggaggccagccacggtgccctaccgattgtgaaaaacaaagggcccggatgcagagcctgatgggttctcaaccagccgggtcaaccctgtttgtgcctgcttgcacgtcagagggacatttcttgcctgtgcaatgctttaactcggagtgttattgcgtagatgccgaggggcaggcgatccccgggacgcggagcgccattggcaagccaaagaagtgtcccactccctgccagctgcagagcgaacaagcttttcttcgaacagtccaggctctgctttccaacagctcaatgttgccaactctcagcgatacatacatcccacagtgttcgaccgacggacagtggaggcaggtacaatgtaatggccctcccgagcaggtgtttgaactctaccagcgttgggaggctcagaacaagggccaggacctgacgcctgccaagctattggtcaagataatgtcatacagagaagcagcctctggcaacttttcactgttcattcagtctttgtatgaggccgggcagcaagacgtattccccgtcctgtctcagtatcctagcctccaggacgtcccgctcgcggccctggaggggaagagaccccagccacgcgagaatatcctgcttgagccctacctgttctggcagattctgaatgggcagctctctcaataccctggctcctactctgatttctccactcctctggcacacttcgacctcagaaattgctggtgtgtggacgaagccggacaggaacttgagggcatgcgctctgaaccttcgaagcttccgacatgcccggggagctgtgaagaggcaaaacttcgcgtgttgcagttcatccgcgaaaccgaggagatcgtgagcgctagtaattcatcaaggtttcctctcggtgagtcgttcttggttgccaaaggtattcggctgaggaatgaagatcttggcctgcctcctctgtttcctcccagagaagcattcgccgagcaatttcttcggggttcagactacgctattaggctggcagcacagagtacgctttccttttatcagcgccggaggttctcacccgacgatagcgccggagcctccgcgctgctacggtcaggcccctacatgccacagtgcgacgcctttggctcctgggagccagtacagtgccatgcaggcactggacattgttggtgtgtcgatgagaaaggcggctttatcccggggagcttgaccgctcgatcactgcagatcccacagtgcccgacgacgtgtgagaaaagccgcacctccgggctcctgagttcgtggaagcaggcccgaagccaggagaaccccagccctaaggatctgttcgtgccggcttgtttagagacaggcgagtacgcacggcttcaggcgagcggcgcaggaacatggtgcgtggatcccgccagtggcgaagaactgaggccaggctcatcttcaagcgctcagtgcccctcactctgcaacgtactgaagtcaggcgtgctttctagaagggtctccccaggctatgttcccgcctgccgcgctgaggatggcggtttttctcctgttcaatgtgatcaggcccagggtagttgttggtgtgtcatggactctggggaggaggtcccaggcacccgcgtaaccggtggtcaacctgcgtgcgaatcccctaggtgtcctctccccttcaatgcaagcgaggtagtgggcggaactatcttgtgtgaaaccatctcgggacctaccggctctgccatgcagcaatgccagctgctttgccgccagggctcctggagtgtgtttcccccaggtccactaatctgctcactcgagagtgggcggtgggagtcccaactcccacagcctagggcttgtcaaaggccgcagttgtggcaaaccatccagacgcagggtcacttccagctccagctgccccctgggaaaatgtgctcggccgactatgctgatttgctccagacgtttcaggtgtttattctggatgaattgacagcccggggtttttgtcagatccaggtgaagacgttcggaactttggtgtctattcccgtctgcaataacagtagcgtccaggtcggatgcttgacccgcgagagattgggcgtgaacgtgacctggaagagcaggcttgaggacattcccgtggcatccttgccagacctccacgacatcgagcgggctttagtgggtaaggatttgctcggccgctttacggacctcatccaatccgggagcttccaacttcatctggacagcaaaacttttcctgctgagacaatccgcttcctgcagggtgaccattttgggacatcaccacgtacctggtttgggtgctctgagggattttatcaggtgctaacctctgaggcctcccaggacgggcttgggtgtgtgaagtgtccggaaggatcatactctcaggacgaggagtgcattccctgccccgtgggcttctaccaagaacaggccggatcactcgcctgtgtgccctgccccgtagggcgcacgacgatttcagccggcgcttttagtcagacccacctgatgcagaaattcgagaaggttcctgaaagcaaggtgatatttgatgcgaacgcacctgtcgcagttagatcgaaggtgcccgacagcgaatttcctgttatgcagtgcctcacagattgcactgaagacgaagcctgttctttttttacagtgagcacaaccgagccagagattagttgcgacttttacgcctggacaagcgacaatgtcgcttgcatgacaagcgatcaaaaacgcgacgcccttggaaactccaaagccacgagtttcggcagtctccgttgccaggtgaaagtgagaagccacggacaggattcccccgctgtctacctgaagaagggacagggttctacaactacgctccagaaaagattcgagcccaccggcttccagaacatgctgagtgggctctacaatcccatagtatttagcgcttccggtgccaacctaaccgatgcccatcttttttgcttgcttgcttgtgatagggatttgtgctgcgacgggtttgtcctcacacaggtgcaagggggagctataatttgcggcctcctctccagtccatccgtgctactctgcaatgtgaaagattggatggacccgtctgaggcctgggctaacgctacctgtcccggtgtcacctatgaccaagagtctcaccaggtgatccttcgcctgggcgatcaagagtttataaaatctcttactccgctggaggggactcaggacacgtttactaatttccaacaggtgtatctgtggaaagactccgacatgggtagtagacctgagagtatgggatgtaggaaggatacagttcctcggccagccagcccgactgaggcaggtcttacaaccgaacttttctccccagtggatcttaatcaagtcatagtgaacggaaatcagagtttgagttcacagaaacactggctcttcaagcacttgttctcggcccaacaggcaaatctctggtgcctgtctcgttgtgtgcaggagcatagcttctgtcagctcgcagagatcacggaatcagcttcactgtacttcacatgcacactctacccggaagcccaggtgtgcgacgatattatggaaagcaatgcccagggctgccgcttgattcttccccaaatgcctaaagctctgttcagaaagaaggtgatcctcgaagacaaggttaagaacttttataccaggctgccatttcagaagctgatgggaatcagtatccggaacaaggtgcccatgtcggagaaatccattagcaacgggttcttcgaatgtgagcgtaggtgtgatgctgacccttgctgtactggcttcggctttcttaacgtttcacagctgaaggggggagaagtcacctgtctcacattaaactctctaggaattcaaatgtgctccgaggagaatgggggcgcgtggcgtatcctcgattgtggcagccctgacattgaagtgcatacttacccctttggctggtatcagaagcccatcgcccaaaacaatgcaccaagcttttgtcctctggtcgttcttccctccttgactgagaaagtcagcttggatagctggcagtctctggcattgtcctccgtggtggtggatccatcgatcagacactttgacgtcgctcatgtgtcaacagccgctacatcgaacttttctgcggtgcgtgatctgtgtttaagcgagtgttcacagcacgaggcgtgcctcattaccaccctccagactcaaccaggagccgtgaggtgcatgttctacgccgatacacagagctgcacccacagtctccagggacaaaactgtcggctgctgctcagggaagaggccacccacatctacagaaagcccggcattagcctattgtcttatgaagccagtgtcccttcagtccctatctctacacacggcagattactcggccgttctcaagctatacaagtggggaccagttggaaacaggtggaccagttcctgggcgtgccttacgccgcccctccacttgccgagagacggtttcaggccccagagcccttgaattggactggctcatgggatgcttctaagccacgcgccagctgttggcagccagggacccggacctccactagtccaggagtatctgaagactgcctttaccttaatgtgttcatcccccagaatgtggcccctaacgcgagcgttctggtgtttttccacaacacaatggatagggaagagagcgagggatggccagcgatcgatggcagtttccttgcggcggtaggcaacttgattgtggtaacggcaagttacagggtgggcgtctttgggttcctgtcatcggggtcaggcgaggtatcaggaaactggggtctcctggaccaagtggccgcgttgacttgggttcaaacccatatcaggggattcggcggtgacccccggagagtgtcacttgcagcggaccgtgggggtgctgatgtggccagcatccaccttctcaccgcccgggcgactaatagccagttgtttcggagggcagtcctgatgggagggagcgccctgtcacccgccgctgtgatatcccacgagcgcgcccaacagcaagctatcgccctggctaaagaggtctcttgccctatgtctagttcccaagaggttgtttcatgcttaagacaaaaacccgctaacgtgctcaatgacgcccaaactaagctccttgccgtgtctggaccatttcattattggggccctgttatcgacggccactttctcagggaaccgcccgcgcgcgccctcaaacggagcctgtgggtggaggttgatcttcttattgggtcttctcaggacgatggcttgattaatcgcgctaaggcagttaaacagtttgaggagagtcggggcaggacatcttcgaagactgccttctaccaggcactacaaaactcactcggtggggaggactcggatgcacgagtggaggctgccgctacatggtactatagcctggaacatagcacagacgattacgcaagcttttctagagctctcgagaatgcaaccagagattactttattatttgccccatcatcgacatggccagcgcctgggcaaaacgggctcggggaaatgtttttatgtaccacgcccccgagaattatggacacggcagcctggagttactcgcagatgtgcagtttgcactcggtttaccattctatccagcatatgagggccagtttagtttagaagaaaagtcactgtcactcaagatcatgcagtatttctcacactttatcagatctgggaaccccaactatccatatgagttcagcaggaaggtgcccacgttcgctaccccctggcctgatttcgtcccacgcgcgggcggggaaaactacaaagagtttagtgagttgcttcctaatagacaaggtctgaagaaagcagattgctctttctggagcaagtacatatctagcctgaaaacatccgctgatggcgccaaaggagggcaatcggccgagtcagaagaagaggaactgacggctggatctggactgagggaggacctcctgagcttacaagaacccggcagcaagacctactccaagtag

SEQ ID NO: 136494 - DNA, 4725 bp, Artificial Sequence
  derived and/or modified sequence
atcccccggaagcccatcagcaagcggcccgtgcggcccagcctgccaagatctccgcggtgtcctctgcctttcaacgcttcggaagtcgtgggcggtaccatcctttgcgagaccatctcagggcctacagggtcagcaatgcagcagtgtcagctactctgtaggcagggatcctggtccgtgtttccccctgggcccctcatctgcagcctcgaaagcggccggtgggaaagccagctgccacagccgcgagcttgccaaagaccccagctttggcaaaccatccagacacaggggcacttccagctccagctgccacccggaaaaatgtgttcggccgattacgccgacctgttacagacgtttcaagtcttcatactggacgagcttacggctagaggattttgtcaaatccaggtcaaaacttttgggaccttagtgtccataccagtgtgcaataatagctccgtccaggtcggatgcttgactcgggagcgccttggggtcaatgtgacctggaaaagtaggctggaggatattcccgtcgcctctttgccagatctgcatgatatcgagcgggctctggtgggaaaagatctactgggacgtttcacggaccttattcagagcgggtcctttcagctgcatttggacagcaagacctttcccgccgaaacaattcggttcctacagggagaccacttcgggacctctccacgaacatggtttggatgtagtgaagggttttatcaggtgctgacctcagaggcctcgcaagacggactggggtgcgtcaagtgtcctgagggatcttattcacaggacgaggagtgtatcccatgtccagtcggattttaccaggagcaggctggctcactcgcatgcgtcccatgccctgtaggaagaaccaccattagcgctggtgcatttagccagacgcactgcgtgacagactgtcagagaaatgaggctggactccagtgtgaccagaatggtcagtatagggcttctcagaaggatagaggatccggcaaggcgttctgcgtcgacggggaaggcaggcgcctaccctggtgggagacagaagctcctctggaagatagccaatgtctaatgatgcagaagtttgaaaaagtccccgagagcaaagtaattttcgacgctaatgctcccgtggccgtgcgctcgaaagtgcctgattcagagtttcccgtaatgcagtgcctgaccgattgtacggaggacgaagcttgctcgttttttactgtatccactaccgagccagaaatctcctgtgacttttatgcatggacatcagacaatgtcgcttgtatgaccagtgatcagaagcgggatgccctgggaaattcaaaggccacttccttcggaagcctccgctgtcaagtgaaggtgcgcagtcatggacaggattcaccagcagtgtacttgaaaaaaggccagggctcaaccaccaccctccagaagcgattcgagccaaccggcttccagaacatgttgagcggactgtacaaccctattgttttcagcgcatcaggcgcaaatttgaccgacgcacacctgttttgtctgttagcttgtgatagagatctttgctgcgatggatttgtgcttacccaggttcaaggaggggctattatctgcggcctgctatctagtccatctgtgctgctgtgtaacgtaaaagactggatggatccttcagaggcttgggccaatgcgacctgcccaggagtgacttatgatcaagagagtcatcaagtcatcttgaggctcggggaccaggaattcatcaagtccctgactcctttagagggtactcaggatacctttactaatttccaacaggtgtacctttggaaagattcagatatgggcagccgccccgaaagtatgggttgccgcaaggacactgtgcctcgacctgcctcaccaactgaagcgggattgaccaccgaactgttctctccggttgatttaaaccaagtgatcgtgaatggcaaccagagcctgtcttcccagaaacactggcttttcaaacatctcttttccgctcagcaggccaatctttggtgtctgtcacgttgcgtacaggagcactccttttgtcagcttgcagagatcaccgagtcagcttctctgtacttcacctgtaccttataccctgaagcccaggtttgcgacgatatcatggagagcaacgcccagggctgtagactgatattacctcaaatgccgaaggccttattccggaaaaaggtcatcctcgaagacaaggtaaagaatttttacaccaggcttcccttccaaaagcttatgggaatctctatccgtaataaggtgccaatgtctgaaaagtcaatatcgaatggctttttcgaatgtgagagaaggtgtgatgctgatccttgctgcactggcttcggtttcttaaacgtgagtcagctcaaggggggggaagtgacctgtcttactctgaacagcctcggaattcagatgtgttcggaggaaaacggtggcgcctggcgaatcctagattgcggatcacccgacatcgaggttcacacatacccgtttggttggtatcaaaagccaatcgcccagaacaacgcaccatccttctgtccacttgtggtcctgcctagtctgaccgagaaagtcagtctggacagctggcagtcgctggcgctctcatccgtggtggttgatccttccattcggcatttcgacgtagcccatgtgagcaccgccgccacctcaaacttctctgccgtacgtgacctgtgcctttccgagtgctcccagcacgaggcctgccttatcacaaccttacagacacaacctggggctgtgagatgtatgttttatgcggacacacagagctgcactcacagcctgcaaggacagaactgccgactgcttctccgagaagaggcgactcatatatacagaaaaccggggatctctcttctctcttacgaagctagcgtaccttctgttcccatctccacgcacggccgactgctgggccgctcacaggccatccaggtggggactagctggaaacaggtcgaccaatttctcggggtgccatacgcggctccacccttggccgagcgccggtttcaagcacctgaacctctgaattggactggttcatgggacgcgtcaaaaccccgtgcgtcatgttggcagcccggcacccgtaccagcacctccccaggtgtgtccgaggattgtctttatttgaatgtattcatccctcagaacgtcgctcctaacgcttctgttctcgttttttttcataacacgatggatagggaggagagtgagggctggccagcgatagacggctcatttctggcagccgtgggcaatcttatagttgtgaccgcctcatatcgcgtcggcgttttcggcttccttagttcaggaagcggcgaggttagcggcaattgggggctcctcgatcaggtagctgcgttaacctgggtccaaacacatatccgcggattcggcggggatccccgccgcgtatccctcgccgctgaccgtggcggcgcggatgtcgcctccatccatctgttgaccgcccgggcaacaaacagccaattgttccgtagggccgtcttgatggggggcagcgctttgtcccccgccgcggtgatctctcacgagcgcgctcaacagcaggctattgcgctggcaaaagaagtgagctgtcccatgtcgtccagccaggaagtggtttcgtgtttgcggcagaagccagccaatgtattgaatgacgcccagactaaactcctggccgtgtcggggccatttcactactggggacctgtcatcgacggccacttccttcgggagccccccgcccgcgccctgaaacgttctctgtgggtggaggtagatctcttaatcgggtcctcacaagatgacgggctgatcaatcgagccaaagccgtcaagcagttcgaggagtccaggggcagaacttcatccaagaccgccttctaccaggctctgcaaaacagtttgggcggtgaggactctgacgccagagttgaagcagcagcaacttggtactattctctcgagcacagtactgacgactacgcctccttttcacgggccctggagaatgccacaagggattatttcatcatctgtcccataatcgatatggcctcagcctgggccaagagggcccgcgggaatgtgttcatgtaccacgcacccgagaactacggtcacggcagcctggagcttctcgctgacgtacagttcgcactgggtcttccattttatccggcctacgaaggacagttcagcttagaagagaaatcactttccctgaaaattatgcagtattttagccacttcatacggtctggaaatccaaactacccatacgaattttctcggaaggtccccaccttcgcaacgccgtggcccgattttgtgccacgtgcgggaggagaaaactataaagaattcagcgagttgttacccaatcgacaggggttgaaaaaggctgactgctcgttctggtccaagtatatatccagcctcaaaacatccgccgacggtgcgaaggggggtcagagcgcagagtctgaggaggaggaactcactgcaggatccggtcttcgggaggacctgctgagtctgcaggagcctggctcaaaaacttattcaaagtag

SEQ ID NO: 136495 - DNA, 8306 bp, Artificial Sequence
  derived and/or modified sequence
atggccctggtgctggaaatcttcactctgttggcctcaatatgttgggtctctgcgaacattttcgagtatcaagtggacgcacaacccctccggccttgtgaacttcagagagaaacagccttccttaagcaggccgattatgtcccccaatgcgcggaggacggaagctttcagactgtgcaatgccagaatgacggcaggtcatgctggtgtgtgggggcaaatggctccgaagtgctcggaagccgccagcctggacgccctgtggcatgtttgagtttctgccagctccagaaacagcaaatcctattgtcaggctacatcaatagtaccgatacctcttatcttccccaatgccaagactctggagactatgctccagtccaatgtgatgtgcagcaggtgcagtgttggtgcgtcgatgcagaaggaatggaagtgtatggcacaaggcagctaggcaggcctaaacgatgcccacgcagttgcgagatcaggaacaggcggctgttgcatggtgtgggcgacaagtctccccctcagtgttctgccgaaggagaatttatgcctgttcagtgcaagtttgtgaacacgaccgacatgatgattttcgatttggtacactcttacaaccggttcccagacgccttcgtgacatttagctcatttcagagaaggtttcccgaggttagtgggtactgccactgcgccgactcacaaggccgagagctcgcagaaacaggactggagctcttactggacgagatctacgatacaattttcgccggtctggaccttccatctacatttacagaaacgacattatacagaattctgcagcggaggtttcttgccgtccagagcgtaatcagcggaagattccgctgcccgaccaagtgcgaggtggagaggttcaccgccaccagctttggacatccatacgtaccctcttgccggagaaacggagactaccaggctgtccagtgccagaccgaaggtccttgttggtgcgtggatgcccagggaaaagagatgcatgggactcggcagcaaggggaacccccttcctgcgccgaaggccaatcctgtgcctccgaacggcaacaggctctctctcgactgtatttcggtacatccgggtatttcagccaacacgatttattttcgagtccagaaaagcgctgggcatccccacgtgtggccagattcgccactagctgcccgcctaccataaaggagctgttcgtcgacagtggccttttaaggcctatggttgaagggcagagccaacagttctccgtttccgaaaatctgctcaaagaagcaattagagctatcttcccgtcacgtggtctcgccagactcgctttgcagtttacaaccaaccccaaacgactacaacagaacttatttggcggtaagttcctcgtgaatgtgggccagttcaacctgtctggcgctcttggcacccgcggtacttttaactttagccaattttttcagcagttaggactagccagttttttgaacgggggacgacaggaggatcttgctaaaccgctgtctgtggggcttgatagtaactcttcaaccggaactcccgaggctgcaaagaaggatggaacgatgaacaaaccgaccgtcggcagtttcggcttcgaaatcaacctgcaggagaaccaaaatgccctgaaatttctggccagcctgctggagctgcccgagttcctcctgttcctgcagcacgcgatcagtgtcccggaagacgtcgccagggatctcggtgacgtcatggagacagttctatctagtcagacttgtgaacaaacacctgagcgcctcttcgtgccctcgtgtaccaccgaaggaagctacgaggacgtacagtgcttcagcggcgagtgctggtgtgtaaacagttgggggaaagaactcccgggaagcagagtgcgtggcggacagccaagatgtccaaccgactgcgaaaagcagagggctagaatgcaatcactgatgggctcccagcccgcaggctccactctgttcgttcccgcttgcacaagtgagggacatttcctccccgtccagtgtttcaactctgagtgttattgcgttgatgcagagggccaggctatcccagggacgcggagcgcgatcgggaaaccaaagaagtgccctactccttgccagctgcagagcgagcaggcttttctgagaactgtgcaggcgttactgagcaactcttccatgctccctactctgtctgacacgtacattccacagtgttcaaccgatggacagtggcgccaggtacagtgtaacgggccaccagaacaggtgtttgagctctatcaacgctgggaagcccaaaataagggacaggacctgaccccggcaaagctactggtgaaaatcatgtcctacagggaggcagcctctggtaacttctcactctttattcagtctctttacgaagcaggccagcaagacgtcttccccgtcctgtctcagtaccccagccttcaagacgttccattagctgcactggaagggaagcggcctcagcccagagagaatatcctgcttgagccttatcttttttggcagatactcaatggccagctgtcacagtatccaggttcatattctgacttttcaacacctctcgcacatttcgatctgcgaaattgttggtgtgtggatgaagccggacaggaactcgaaggaatgcggagtgaaccttctaagcttccgacgtgccccggaagctgcgaggaggctaagctccgggttcttcagttcataagggagacggaagaaatcgtgtccgcctccaacagttcacgttttcctctcggggagtcgttcctcgttgctaaaggcatcaggctccgtaacgaggacctgggtctgcccccactcttccctccacgggaagctttcgccgagcagttcctgcggggaagcgactacgccattcgcttagccgcacagtcgaccctgtctttctaccagcggaggaggttctcacctgacgacagcgccggtgcctcggcgctgcttagatctggcccttacatgccccaatgtgacgctttcggcagctgggagccagtgcagtgccacgccggaacaggccactgttggtgtgttgacgaaaaaggaggtttcatccccggatcgctaaccgccagatcactgcagatcccgcagtgcccaacaacttgtgagaaaagccgcacttccggtctactcagttcctggaagcaggctcggtctcaggaaaatccttctcctaaagatctcttcgtgcccgcttgcctggagaccggggagtacgcgagacttcaggcgagtggggcaggcacttggtgcgtcgatcctgccagcggggaagagctgaggccagggagctccagcagtgcacagtgtcccagtttatgcaatgttctaaagagtggggtattatcacgacgggtgtctccaggatatgtcccggcatgccgcgcagaggacgggggtttcagcccggttcaatgtgatcaggcgcaaggctcatgttggtgcgtgatggactccggagaggaagtgcccggaacaagagttacagggggtcaaccagcctgtgagtccccaagatgccctcttcccttcaacgcctccgaggtcgtcggaggaaccatcctctgcgaaaccatttccgggccaacaggctccgctatgcagcagtgtcagctgctttgccgacagggtagctggagcgtcttcccacccggtccccttatttgctcattagaatcaggtaggtgggagtcccagcttcctcaaccacgggcatgtcaacggccacagctctggcagacgattcaaacgcagggccactttcagcttcagctccctccgggtaaaatgtgttccgccgattacgcggatctgctgcagacattccaggtatttatcctcgacgagttgactgctcgtgggttttgtcaaatccaggttaaaaccttcggaaccctggtgtctattccagtgtgcaacaattcatctgtccaggtggggtgtcttacacgagaaagactgggcgtgaatgtgacttggaaaagccgcctcgaagacatccctgttgctagtctgcctgacttacacgatatcgaacgagccctagttggtaaagaccttctggggagattcactgaccttatccagtctggctcattccaactgcacctggacagcaaaacattccctgccgaaactattagatttctacagggagaccattttggcacctctcctagaacctggtttggttgctctgagggcttttatcaggtgctcaccagcgaagcctcgcaggatggcttgggctgcgtaaaatgcccagaagggtcttactcacaagacgaagagtgtattccatgtccagtcggcttctaccaggagcaggccggttccctagcatgtgtgccttgccctgtgggacgaacgactatttcagctggagcctttagccaaacccactgcgtcacagattgtcagcgtaatgaggcaggtttgcagtgtgaccagaatggccagtacagggcatcacagaaggatcgcggttctggcaaagccttctgcgtagatggggagggaagacgactcccctggtgggagacagaagctccattggaggactcacagtgtcttatgatgcagaaattcgagaaggtgccagaaagtaaggtgatttttgacgccaacgcgcctgtggcagtgcggtcaaaagtgcctgattctgagtttccagtcatgcagtgtctcaccgattgtactgaagacgaggcttgttcttttttcacggtgtctacaacagagccagagatttcctgcgatttctatgcctggacttccgacaatgtcgcgtgtatgacctctgaccagaaacgtgacgccctcggaaacagcaaagcaactagttttgggagcctaaggtgtcaggtgaaagtccggtcgcacggtcaagacagcccagcagtgtacctgaagaaggggcagggctccaccaccacactgcagaagcgcttcgaacccacaggttttcaaaacatgctctccgggctgtacaatccaatagtgttttctgcctccggagccaatttgactgatgcccatttgttttgtttgcttgcatgcgatcgagacctatgttgcgacggctttgtcctcactcaggtacaaggcggagcaatcatctgtggtttgctgagctcacccagcgtcctgctatgtaacgttaaagattggatggaccctagcgaagcttgggctaatgccacatgtccaggtgttacgtacgatcaggaatcccaccaggttatcctcagactgggtgaccaggaatttattaagtctctaaccccgctggaaggcacgcaggatacatttaccaacttccagcaagtctacctgtggaaagactctgatatgggctctcgtccagaaagcatgggctgtagaaaagatacagtgcccagacctgccagccccacggaggccggtctgactacggagctcttcagcccggtggatctgaatcaggtgatcgtcaatggcaaccagagcctgtcttctcagaaacattggctcttcaaacatctattttcagcacagcaggctaacctgtggtgcttgtcccgctgcgtgcaggagcactccttctgccagctcgccgagatcacagagagcgcgtccctgtactttacctgcaccctttatcccgaagcccaggtatgcgacgatattatggagtctaacgctcagggatgtcgcctgatcctccctcagatgccaaaggctctgtttcgcaagaaggtgatccttgaggacaaagtcaagaatttctacaccaggctgccttttcagaagctgatggggatctcaattcgcaataaagtgcccatgtcagagaagagtatttccaacgggttcttcgaatgcgagagacgctgcgacgccgatccatgttgtactggcttcgggttcctgaacgtgagtcagctaaagggaggggaggtgacctgcctcaccctcaactccctggggatccagatgtgctccgaagaaaacggaggcgcttggagaatcctggactgtggctcacctgatatagaagtgcacacctatccctttgggtggtatcaaaagcctatcgcccagaataacgccccatcgttttgcccattggtcgtgttacccagtttgactgagaaggtcagcctggacagttggcagagcctcgccttgagcagtgtggtcgtggatccgtcgatccgtcattttgatgtggcacatgtgtcgaccgcagcgactagtaactttagtgccgtgagagatctgtgcctgtccgagtgttcccagcacgaagcctgtctcatcaccacgctgcaaacccagcctggagccgtcaggtgtatgttctacgccgatacccagagctgcacccacagcttacagggacagaattgccggttgttacttagagaggaggccacgcatatttacagaaagcccggaattagcctactaagctacgaagctagcgtgccatccgtccccatctctacacatggcagactgttaggccgttcacaagccatccaggtcggcacctcttggaagcaggttgaccagtttctaggtgtgccatacgccgctcccccactcgcagagcggagattccaggcgccagagcccctgaactggaccggatcttgggatgcaagcaagcctcgggcttcctgttggcagcccggtactagaacctccactagccctggggtttcagaagactgtttgtacctgaacgtgttcattcctcagaatgtcgcccctaacgccagcgtgctggtgtttttccacaacaccatggacagggaagagagcgaaggttggccggcaatcgatggctccttcttagccgctgtggggaacctgatcgtggtgactgcctcctaccgcgtgggggtattcggctttctgagcagcgggtccggtgaagtttctggcaactggggactcctggatcaggtcgccgctctgacctgggtgcagacacacattcgcggattcggcggtgatccaaggcgcgtgtccctcgctgccgataggggcggtgctgatgtggcaagcatacatctcttgaccgcaagagcaactaattctcagctttttcggcgagcagtactcatggggggttccgcactcagcccagcggcagttatcagccacgagcgggctcaacagcaggcaatagctttggcaaaagaggtgtcttgcccaatgtcctcgtcccaggaagtggtgtcctgcctccgccagaaacccgcaaacgttttgaacgacgcccagactaagctacttgccgtgtccggaccgtttcactattggggtcccgtgattgacgggcattttctgcgtgagccgcctgccagggccctcaagagatctctttgggtcgaggttgatttgctgataggaagttcccaggacgacggacttatcaatcgagccaaagcagtcaaacagttcgaggaatcacgtggccgaacgtcatccaagaccgcattctatcaggccctgcaaaactccctggggggagaggactctgatgctcgcgtggaggctgcggctacatggtattacagcctagagcattccaccgacgattatgcgtctttttcccgggctctcgaaaacgccactcgcgattatttcatcatatgtccaatcattgatatggcttccgcttgggcaaagagagcaagaggaaatgtctttatgtaccacgccccagagaactacggccatggctctctagagctattggccgacgtgcagtttgcgctcgggctccccttttacccggcatatgagggccagtttagcctggaagagaagagcctcagcctgaagattatgcagtatttctctcactttatacgaagcggaaaccctaattacccctatgagttctctagaaaggtgcccaccttcgcgacgccttggcccgattttgtcccgagagcaggcggagagaattataaagagtttagtgagctgctgccaaatcgccagggcctgaaaaaagctgactgtagtttctggtctaagtacatctctagcttaaagacatctgcggacggagctaagggaggccaaagcgccgagtccgaggaggaggagctaactgctgggagcgggcttagggaggatctgctgtctcttcaggaacccggatcaaaaacctattcaaaata

SEQ ID NO: 136496 - DNA, 8135 bp, Artificial Sequence
  derived and/or modified sequence
atggcccttgtgctggaaatcttcacgctcttggcctcgatctgctgggtgagtgccaatattttcgagtatcaggtggatgctcagccacttcgtccttgcgagttgcagagggagaccgctttccttaagcaggcagactacgtcccccagtgtgccgaagacggtagtttccagactgtgcagtgtcagaacgacggtcgctcttgttggtgtgtaggagcgaatggatcggaggtcctgggtagtcgccagccaggcaggcctgtcgcatgtctgagcttttgccagctccagaagcagcagatcctgctgtctggatacatcaactcaaccgatactagctacctcccccagtgccaggattcaggtgattatgctcccgttcagtgcgacgtccagcaggtgcagtgttggtgcgtggatgccgaaggaatggaagtgtatggaacacgacagctgggcagacccaagcggtgcccgaggtcatgtgagatccggaaccggcgacttctgcatggggtgggcgataaatcccctcctcagtgtagtgcagaaggtgaatttatgcccgtgcaatgtaagtttgtcaatactaccgacatgatgattttcgatctggtccattcttacaaccgcttccccgacgcttttgtcacatttagctcatttcagcggcgatttcctgaggtgtccggttactgtcactgtgctgactcacagggcagggaactcgcagaaaccggtctggagctgctgctggatgagatttatgacaccatctttgcgggattggacttgcccagcacattcacagagacaaccctgtacagaattcttcagcggaggttcttggctgtgcagtctgtcatctcaggccgttttcgatgccccaccaagtgtgaggtcgagcgcttcaccgcaacaagttttggccatccttatgttcccagttgtcgcagaaatggtgattatcaggcagtgcagtgccagaccgagggtccctgctggtgcgttgacgctcagggaaaggagatgcatggcacacggcaacagggggagcccccaagctgcgccgaaggccagtcatgcgcatcagaacggcaacaagccctgagcagactgtactttggcacaagcggctatttttcccagcacgacctgttttcaagtccagagaagagatgggctagcccacgggtggccaggttcgcgacctcttgccctcctaccatcaaagagctgtttgtggactctgggcttttgcgcccaatggttgaggggcagtcacagcagtttagcgtgtcagagaatctgttgaaggaagctataagggccatcttcccttcaagaggacttgccagactagccctgcagtttaccacaaaccctaaacgcctccagcaaaacctgttcggagggaaattcctggttaacgttggccagtttaatctcagcggcgctctcgggacccggggaacctttaatttttcacagtttttccagcagctgggcttagcttcatttctcaacggcggaagacaggaagacctagctaaacccctctccgtaggcctggactccaatagctccaccggaactcctgaagccgctaagaaggacggaactatgaacaaacccaccgtcgggtcctttggcttcgaaatcaatctacaggaaaaccagaacgccctgaagttccttgcctccctgctggaattaccagagtttctcctgtttttacagcatgcaatctccgtccccgaggatgtagccagggatctgggcgacgtgatggaaaccgtgctgtcttcacagacgtgtgaacagaccccagagcgcctgtttgtacctagttgcaccactgaaggaagttacgaggacgttcagtgtttttcaggggaatgctggtgcgtaaactcgtgggggaaggagctgcccggttcaagggtccgtggtggccagcctagatgtccgactgactgcgagaaacagagggctaggatgcagtcccttatgggcagtcagccagccggtagcacattattcgtaccggcttgcacaagcgagggccattttctccccgtccaatgcttcaacagcgaatgttattgtgtagatgccgaggggcaggccatccccggaactcgcagtgcaatcggtaagccaaaaaagtgcccaaccccctgtcagctgcaaagtgagcaggcattcctgcgtaccgtgcaggccctgctgagcaactcaagcatgctgccgaccctgtcggatacatacatcccacagtgctctactgacggccagtggcggcaggttcagtgtaacggtcctccagagcaggtgtttgagctgtaccagcgttgggaggctcagaacaagggtcaagacctaactccagctaaactgctagtgaaaatcatgagttatcgcgaggccgcttccggaaacttcagtctttttattcagtcgctctacgaagccggacagcaggatgtttttccagtactgtcacaatacccatctctgcaggatgttcccctggcagcactggagggaaagaggccacagcctcgtgaaaacatcctgcttgagccataccttttttggcagatacttaacgggcagctcagccaatatcctgggagctattcagacttctccactcctctggcgcacttcgatctcagaaattgctggtgtgtggacgaggctgggcaagaactggagggcatgcgcagcgagccatctaagcttcccacttgtcccggaagttgtgaggaagccaagttacgcgttttgcagttcatccgcgagactgaggaaatcgtgtcagcttccaattcttcccgttttcctctcggcgaatcctttctggtggctaaggggataaggctccgaaacgaggatctcggactacccccacttttcccaccacgtgaggccttcgctgagcaattcctgcggggaagtgactacgccataaggttagcagctcagagcactttgagcttctatcagcgtcgtaggtttagccccgatgactctgccggagcgtccgcccttctccgctctggcccatacatgccacaatgtgacgcttttggctcgtgggaacctgtgcagtgtcatgccggtacaggtcactgctggtgcgtcgatgagaagggaggcttcattccaggatcactgaccgctaggtccttacaaatacctcagtgtcctacaacatgtgaaaaatcccgtacttctgggctgctgtccagctggaaacaggcgaggtcacaagagaatccgagcccaaaagatctctttgtgccagcatgcctggagaccggtgagtacgccagacttcaagcgtctggggcagggacctggtgtgtggatcctgcctcaggcgaggagctgcgcccagggtcgagcagctccgcccagtgtcctagcctgtgcaacgtccttaagtccggcgtcctgagtaggcgagtgagtccaggctacgtgccagcgtgtcgtgcagaagatggcggtttttcccctgtccagtgcgatcaggcacagggctcttgttggtgcgttatggattccggcgaagaggtgcctggtacacgggtaacagggggacaaccagcttgtgaaagccctagatgcccactccctttcaacgccagtgaggtcgttggcggaactatcctctgcgagactatcagcggacctacgggatcggccatgcagcagtgccagcttctctgccgacagggaagttggtctgtgttcccccctggcccactgatctgcagcctggaatctggtaggtgggagtcacaacttccgcagcccagagcctgtcaaaggccccagctgtggcagaccatacagacgcagggacatttccaacttcagctgccaccgggaaagatgtgttcggcagattacgccgatttacttcagaccttccaagtgtttatcctggatgaactgaccgccagaggcttttgccagatccaggtcaagacgtttggtacgctggtgagcatccctgtatgtaacaacagctccgtgcaggtggggtgtctaaccagggagcgcttgggtgtaaacgtgacctggaagtctcggctggaggatattcccgtagccagccttcctgatctgcatgacatcgagagggccctggtgggaaaggatcttctgggacgattcacagacctgatccagtccgggtccttccagctccacctcgattctaagactttccctgctgaaacaattcggtttctccagggagatcatttcggcacttcccctcggacctggttcgggtgcagcgaaggtttctatcaagtcctaacatcagaggcatcacaggacggactcggctgtgtaaaatgccccgaggggtcttactcgcaggatgaggaatgcatcccatgccccgtaggtttttaccaggaacaggccggatcattagcttgcgtcccctgtccagtggggagaaccacgatctccgctggcgcattctctcaaactcacctaatgcagaaattcgagaaggtgccagagtctaaggttattttcgacgcaaatgctcccgtcgcagttcgctcgaaagtgcccgacagcgaatttcctgtcatgcagtgtctaaccgactgcacggaagacgaagcttgcagcttttttacagtaagcacaaccgaaccagaaatctcctgtgatttttatgcctggacaagcgacaacgtcgcttgcatgacatcagatcagaagcgcgacgcactgggcaatagcaaagctacctcatttggctctttgagatgccaggtgaaagttcggagccatggtcaggacagccctgcagtctacctgaaaaaaggacaagggtccacaaccacattgcaaaagcgttttgagccaacaggtttccaaaatatgctgagcggcctctacaaccccatcgttttctcggctagtggggcaaacctgaccgacgcacacttattctgtttattggcttgcgatcgagatttgtgttgcgatggctttgttcttacccaggtgcaggggggagccataatatgcgggctgttatcgagcccgtcagtcctgctttgcaacgtgaaggattggatggatcctagcgaagcttgggccaacgccacctgccctggagtgacgtatgatcaggagtctcatcaggtgatactgagacttggggatcaggagttcattaagtccctgactcctcttgaggggacccaggacacattcacgaattttcagcaggtgtacctgtggaaggacagcgatatgggatcgaggccggaatcaatggggtgtaggaaagataccgtgcctcgcccagcgagccctacagaggccggattgaccactgagttgttctcacccgtggacctgaaccaggtgatcgttaatggaaatcaatctcttagttcgcaaaaacactggctgttcaaacatcttttctcagcccaacaggctaacctctggtgcctcagcagatgcgtgcaggagcactctttttgtcaactggccgagatcactgagtccgcatccctgtacttcacctgcacactgtacccggaggcccaggtgtgcgacgatatcatggagtctaatgcccaaggatgtagactgatcctgcctcaaatgccaaaagctctgttcaggaagaaagtgatcttggaagataaggtcaaaaacttctacacaagactgcctttccagaaactgatgggaatcagcattcggaataaagtgcccatgtccgaaaagtcgatctcaaacgggttctttgagtgtgaaagacgttgcgacgctgatccttgctgcaccggattcggctttctgaatgtatctcagttaaaaggaggcgaggttacatgcctcacactcaattccctgggcatccaaatgtgctcggaggaaaatggcggagcgtggaggattctggactgtggctcacccgacattgaggtccacacttatcctttcggttggtaccagaaaccgatcgcccagaataatgccccttccttttgccctctggtggtgctgccttctctgacagagaaggtatctttggattcttggcagtcacttgcattatccagtgtcgtggtggacccctccataagacatttcgacgtcgcacatgtctcaaccgctgccacctccaacttttctgctgtgagagatctgtgcctgtccgagtgttcccaacatgaggcatgtctcatcaccactctccaaacccagcccggtgccgtgcgctgtatgttttatgccgatacccagagctgtacccacagcttacagggccagaactgcagactgctgctacgcgaagaggccacccacatctaccggaaacccggaatctcgttgctttcatatgaagcttcagttccatcagttcccatttctacacatggcagattgctcggcagatcgcaggctatccaggtggggacatcatggaaacaggtggatcagttcctgggtgtgccatatgctgctccacctctggcagaacggcgtttccaggcccctgagccgctgaactggacgggaagctgggacgcatccaagcccagggctagctgttggcagcccggaaccagaacgtccacgagtccaggcgtctccgaagattgtttatatctgaacgttttcattccgcaaaatgttgccccaaacgccagcgtgcttgtatttttccataacacaatggatagagaggaaagtgagggatggcctgcaattgatggctcatttctggccgcagtgggtaacctcatagtggtgactgccagctatcgggttggggtttttggcttcctgtcatccgggagcggggaagtgtccggtaattggggcctccttgaccaagtcgccgcactgacatgggtccaaacccacattcgcggattcggtggagacccccgaagggtttccctggcggctgatcgaggcggagcggatgttgcgtccattcatctcctcaccgctcgcgctaccaatagccagttgttccgcagagccgtccttatgggcggaagcgcactctccccagctgctgtaatctcacatgaaagggcgcagcaacaggccattgcccttgccaaggaggtcagctgtcccatgtcctcttcccaggaagtggtcagttgtctgagacagaagcccgcaaacgtgctcaacgatgcacagactaaacttttggcagtgagtggtccatttcactactggggccctgtgatagacggccactttctcagagaacctcctgccagggcactgaaaaggagtctgtgggtggaggtcgatctattgattgggtccagtcaggatgacggactcattaaccgcgcaaaggccgtgaagcaattcgaagaatcaagagggcgaacaagctcaaaaacagcgttctaccaggctctgcagaacagtctaggaggggaggattccgacgccagagtggaagccgcagccacgtggtattattctcttgaacattctacggacgactacgctagcttttctagagccctggagaacgccacacgggattactttatcatctgtccaataatcgacatggcctcagcctgggcaaagcgtgctcgcggtaatgtgttcatgtaccatgctcccgagaattatgggcacggcagcctggaactcctggccgatgtgcagtttgcactgggcctgcccttttaccccgcatatgagggccagttcagcttggaggaaaagtcactgtcccttaagataatgcaatatttctcgcactttatcagaagcggtaacccgaattacccttacgaattctccagaaaagtccctacattcgccacaccctggcctgactttgtgcccagggccggaggcgagaattataaggaatttagcgaactgctgcctaatcgccaggggttaaagaaggcggactgctcattctggtctaagtacataagttctcttaaaacctctgccgacggagccaagggtggccaatccgctgaaagtgaggaagaggagctgacagccggatctggtttgcgagaggatcttctgagcctgcaggagcccggatccaaaacatattctaaata

SEQ ID NO: 136497 - DNA, 4724 bp, Artificial Sequence
  derived and/or modified sequence
atacccagaaagccgatttccaagagaccagtgcggccatccctccccagatcccctcggtgtcccctgcccttcaacgccagcgaggtggtgggcggtaccatcctatgcgagaccatctccgggcctactgggtcagctatgcagcagtgtcagctgttatgtcggcagggatcttggtctgtcttcccgcctggccctctcatatgttctcttgagagcgggagatgggaatctcagcttcctcagccaagagcttgccagcgaccacagctatggcaaaccatacagacccagggccacttccagctgcagttaccaccaggaaagatgtgcagcgcggactacgcagatctgctgcagacattccaggtgtttattttggacgaactgaccgcccgtgggttttgtcagatccaggtaaagacctttgggactttagtaagcatcccagtgtgtaacaactcctcagtccaggttgggtgtttgacgcgtgagagattaggtgtgaatgtaacatggaaatctcgcttagaggatattcctgtggctagcctgcccgacctgcacgacattgaacgggcactggttggaaaggacctgcttgggcgatttacagacctcatccaaagcggaagtttccagctacatttagactcaaagacatttccagcagagaccatcagatttctgcagggagatcactttggtacttctcctcggacctggtttgggtgcagcgagggattctatcaggttctcaccagtgaggcttcacaagatggcctcggctgtgttaaatgcccggagggtagctattcccaggacgaagaatgcataccttgccccgtcggattctatcaggagcaggccggttccctcgcatgcgtgccctgccccgtcggcagaacaaccatctcagccggtgcattttcacagacacattgcgtcaccgattgtcagcgcaacgaggccggtctgcagtgcgaccaaaatgggcaataccgcgcttcacaaaaagatagaggctcaggaaaagccttctgcgtcgacggagagggacgaagactgccatggtgggaaacggaggccccactcgaggactctcagtgtctcatgatgcagaaattcgagaaagtccccgaatccaaggtaattttcgacgccaacgcccctgtggctgtccggagcaaggtgcctgacagcgaattcccagtcatgcagtgtcttacggactgcacagaggatgaggcctgcagttttttcactgtgagtacaactgagccggaaatcagctgcgacttctatgcttggacttccgacaatgtcgcctgtatgacctcagatcagaaaagagatgccctgggtaacagcaaagccaccagttttggctccctgaggtgccaggtgaaggtcaggtcacacggtcaggacagtcccgctgtatatttgaaaaaagggcaagggtctacaaccacgctccagaagcgatttgaaccgacaggctttcagaacatgttatcaggactctataatcctattgtattttctgcttcaggtgcaaatcttaccgacgctcatttattctgcctcttagcttgtgatcgggacctgtgctgcgacgggttcgtgttgacccaggtccagggcggagcaatcatctgcgggctcctcagttccccctccgtgctgctttgcaatgtgaaagattggatggacccgagcgaggcttgggcaaatgcaacctgtccaggcgtgacatatgatcaggaaagccaccaggttattctgcgcctcggggatcaagagttcatcaaatccctgacaccactggagggtacacaggataccttcacaaattttcagcaggtgtatctgtggaaagattccgatatgggatcccggcctgagtccatggggtgtagaaaagacacggttccccgtcccgcttccccaacagaggcaggactgacgaccgagctctttagccctgtagacctgaatcaggtcattgtcaacggcaatcagtctctttcaagtcagaaacactggctgtttaagcacctgttttcagcacaacaggcaaatttgtggtgccttagcaggtgtgtacaagaacactccttctgccagctggcagaaattaccgaatcagcctctctctacttcacatgtactctctacccagaggcccaagtgtgtgacgacatcatggaatccaatgcgcaggggtgtcggctcatattgcctcagatgcctaaagccctcttcagaaaaaaggtgattctggaggataaggtcaagaatttctacacaaggcttccctttcagaaactgatgggcatcagcattaggaacaaggtccccatgagtgagaagtctatttccaatggatttttcgaatgcgaacgaaggtgtgatgcagatccgtgctgtacaggattcggattccttaacgtttcccagctgaagggaggggaagtcacgtgtttgaccctgaactctctcggaattcagatgtgcagcgaagaaaacggaggagcatggagaatcttggattgcggaagccccgacatcgaggttcacacttacccctttggctggtaccagaaacccatcgcacaaaataatgccccttcgttctgtccgctcgtggttttaccctcactgacagaaaaggtctctctggacagctggcaatctctggccctgtcctcagtcgtcgtcgatccttccatccggcactttgatgtcgcccacgtttcaacagctgccaccagtaatttttcggccgttcgggatctgtgtctctcagagtgcagccagcatgaagcatgccttatcactacactccagacccagcccggagctgtgagatgcatgttctatgcagacactcagtcatgtacacactctctgcagggtcagaattgtcgactgcttctaagagaagaggctacccacatctatagaaaaccagggatttccctgttatcctacgaagcctcggtgccctctgttcccatcagcactcacggtcgccttctcggaagaagtcaggccatacaagtcggtactagctggaaacaggtggatcagttcctgggggtgccctacgccgcaccccctctggctgaaaggcgcttccaggccccagagccactaaattggactggctcctgggatgcttctaagcccagagcatcatgctggcagcctgggaccaggacgtcaacctcacctggcgtgagcgaagactgtctctatctgaatgtattcatacctcaaaatgtagcaccgaatgcaagcgtcctggtgttctttcacaatacaatggacagagaagaatctgaagggtggcccgctatcgacgggtcattcctggctgcagtggggaatttaattgtggtgaccgcctcctatagggtcggggtttttggctttttgagcagcggatctggggaggtgtcagggaactggggtctgctggaccaggtggctgctctgacctgggttcagacgcatatacgaggattcgggggagacccaagaagggtctccctagctgcggaccgtggaggggcagatgtagcgtccatccatctgctcaccgcacgggctactaattctcagttgtttaggcgcgctgtgctaatgggaggcagtgccttatcccccgcagcagtcatttctcatgagagagcacagcagcaggccatagcactggctaaggaggtctcctgtccgatgagctcttcccaggaagttgtgagctgtctcaggcagaaacccgctaacgtcctgaatgatgcccagaccaagttactggcggtgtcagggccttttcactactggggtcctgtgatcgacggtcactttttgagggagcctccagcccgtgcactgaagaggtctctgtgggtagaagtagacttgctgattggatcaagtcaggatgacgggcttattaatagagctaaggccgtgaaacagttcgaggagagtcgaggacgaaccagctcaaagaccgctttttaccaggctcttcagaatagcctgggaggagaagattccgacgcgagagtagaagcagccgctacctggtattacagcctggagcatagcactgacgactacgcctcatttagccgtgcactcgaaaacgctacccgggattactttattatctgcccaatcatcgacatggcctccgcgtgggcaaagcgcgcacgtgggaatgtatttatgtatcatgcccctgaaaattatgggcatggaagtctcgaactgttggcagatgtgcagtttgcattgggcctgcctttctatcctgcttacgaggggcagttcagtctggaggagaagtcgctatctctcaaaatcatgcagtatttctctcacttcataagatccggtaatcctaattacccctacgagtttagtcgcaaagtccccacattcgctactccttggccagattttgtgccaagggccggaggggaaaactataaagaattttccgagttgttacctaacaggcagggtctgaagaaagcggattgctccttctggtctaagtacattagctctcttaagacgagcgcagacggagcgaaaggaggacagtccgccgaatctgaagaggaggagcttaccgctggctccgggctgcgtgaagaccttctgtcactgcaggaacctgggtctaaaacttattctaagta

SEQ ID NO: 136498 - DNA, 8450 bp, Artificial Sequence
  derived and/or modified sequence
cagtggtttctcctccttcctcccaggaagggccaggaaaatggccctggtcctggagatcttcaccctgctggcctccatctgctgggtgtcggccaatatcttcgagtaccaggtggatgcccagccccttcgtccctgtgagctgcagagggaaacggcctttctgaagcaagcagactacgtgccccagtgtgcagaggatggcagcttccagactgtccagtgccagaacgacggccgctcctgctggtgtgtgggtgccaacggcagtgaagtgctgggcagcaggcagccaggacggcctgtggcttgtctgtcattttgtcagctacagaaacagcagatcttactgagtggctacattaacagcacagacacctcctacctccctcagtgtcaggattcaggggactacgcgcctgttcagtgtgatgtgcagcaggtccagtgctggtgtgtggacgcagaggggatggaggtgtatgggacccgccagctggggaggccaaagcgatgtccaaggagctgtgaaataagaaatcgtcgtcttctccacggggtgggagataagtcaccaccccagtgttctgcggagggagagtttatgcctgtccagtgcaaatttgtcaacaccacagacatgatgatttttgatctggtccacagctacaacaggtttccagatgcatttgtgaccttcagttccttccagaggaggttccctgaggtatctgggtattgccactgtgctgacagccaagggcgggaactggctgagacaggtttggagttgttactggatgaaatttatgacaccatttttgctggcctggaccttccttccaccttcactgaaaccaccctgtaccggatactgcagagacggttcctcgcagttcaatcagtcatctctggcagattccgatgccccacaaaatgtgaagtggagcggtttacagcaaccagctttggtcacccctatgttccaagctgccgccgaaatggcgactatcaggcggtgcagtgccagacggaagggccctgctggtgtgtggacgcccaggggaaggaaatgcatggaacccggcagcaaggggagccgccatcttgtgctgaaggccaatcttgtgcctccgaaaggcagcaggccttgtccagactctactttgggacctcaggctacttcagccagcacgacctgttctcttccccagagaaaagatgggcctctccaagagtagccagatttgccacatcctgcccacccacgatcaaggagctctttgtggactctgggcttctccgcccaatggtggagggacagagccaacagttttctgtctcagaaaatcttctcaaagaagccatccgagcaatttttccctcccgagggctggctcgtcttgcccttcagtttaccaccaacccaaagagactccagcaaaacctttttggagggaaatttttggtgaatgttggccagtttaacttgtctggagcccttggcacaagaggcacatttaacttcagtcaatttttccagcaacttggtcttgcaagcttcttgaatggagggagacaagaagatttggccaagccactctctgtgggattagattcaaattcttccacaggaacccctgaagctgctaagaaggatggtactatgaataagccaactgtgggcagctttggctttgaaattaacctacaagagaaccaaaatgccctcaaattccttgcttctctcctggagcttccagaattccttctcttcttgcaacatgctatctctgtgccagaagatgtggcaagagatttaggtgatgtgatggaaacggtactcagctcccagacctgtgagcagacacctgaaaggctatttgtcccatcatgcacgacagaaggaagctatgaggatgtccaatgcttttccggagagtgctggtgtgtgaattcctggggcaaagagcttccaggctcaagagtcagaggtggacagccaaggtgccccacagactgtgaaaagcaaagggctcgcatgcaaagcctcatgggcagccagcctgctggctccaccttgtttgtccctgcttgtactagtgagggacatttcctgcctgtccagtgcttcaactcagagtgctactgtgttgatgctgagggtcaggccattcctggaactcgaagtgcaatagggaagcccaagaaatgccccacgccctgtcaattacagtctgagcaagctttcctcaggacggtgcaggccctgctctctaactccagcatgctacccaccctttccgacacctacatcccacagtgcagcaccgatgggcagtggagacaagtgcaatgcaatgggcctcctgagcaggtcttcgagttgtaccaacgatgggaggctcagaacaagggccaggatctgacgcctgccaagctgctagtgaagatcatgagctacagagaagcagcttccggaaacttcagtctctttattcaaagtctgtatgaggctggccagcaagatgtcttcccggtgctgtcacaatacccttctctgcaagatgtcccactagcagcactggaagggaaacggccccagcccagggagaatatcctcctggagccctacctcttctggcagatcttaaatggccaactcagccaatacccggggtcctactcagacttcagcactcctttggcacattttgatcttcggaactgctggtgtgtggatgaggctggccaagaactggaaggaatgcggtctgagccaagcaagctcccaacatgtcctggctcctgtgaggaagcaaagctccgtgtactgcagttcattagggaaacggaagagattgtttcagcttccaacagttctcggttccctctgggggagagtttcctggtggccaagggaatccggctgaggaatgaggacctcggccttcctccgctcttcccgccccgggaggctttcgcggagcagtttctgcgtgggagtgattacgccattcgcctggcggctcagtctaccttaagcttctatcagagacgccgcttttccccggacgactcggctggagcatccgcccttctgcggtcgggcccctacatgccacagtgtgatgcgtttggaagttgggagcctgtgcagtgccacgctgggactgggcactgctggtgtgtagatgagaaaggagggttcatccctggctcactgactgcccgctctctgcagattccacagtgcccgacaacctgcgagaaatctcgaaccagtgggctgctttccagttggaaacaggctagatcccaagaaaacccatctccaaaagacctgttcgtcccagcctgcctagaaacaggagagtatgccaggctgcaggcatcgggggctggcacctggtgtgtggaccctgcatcaggagaagagttgcggcctggctcgagcagcagtgcccagtgcccaagcctctgcaatgtgctcaagagtggagtcctctccaggagagtcagcccaggctatgtcccagcctgcagggcagaggatgggggcttttccccagtgcaatgtgaccaggcccagggcagctgctggtgtgtcatggacagcggagaagaggtgcctgggacgcgcgtgaccgggggccagcccgcctgtgagagcccgcggtgtccgctgccattcaacgcgtcggaggtggttggtggaacaatcctgtgtgagacaatctcgggccccacaggctctgccatgcagcagtgccaattgctgtgccgccagggctcctggagcgtgtttccaccagggccattgatatgtagcctggagagcggacgctgggagtcacagctgcctcagccccgggcctgccaacggccccagctgtggcagaccatccagacccaagggcactttcagctccagctcccgccgggcaagatgtgcagtgctgactacgcggatttgctgcagactttccaggttttcatattggatgagctgacagcccgcggcttctgccagatccaggtgaagacttttggcaccctggtttccattcctgtctgcaacaactcctctgtgcaggtgggttgtctgaccagggagcgtttaggagtgaatgttacatggaaatcacggcttgaggacatcccagtggcttctcttcctgacttacatgacattgagagagccttggtgggcaaggatctccttgggcgcttcacagatctgatccagagtggctcattccagcttcatctggactccaagacgttcccagcggaaaccatccgcttcctccaaggggaccactttggcacctctcccaggacatggtttgggtgctcggaaggattctaccaagtcttgacaagtgaggccagtcaggacggactgggatgcgttaagtgtcctgaaggaagctattcccaagatgaggaatgcattccttgtcctgttggattctaccaagaacaggcagggagcttggcctgtgtcccatgtcctgtgggcagaacgaccatttctgctggagctttcagccagactcactgtgtcactgactgtcagaggaacgaagcaggcctgcaatgtgaccagaatggccagtatcgagccagccagaaggacaggggcagtgggaaggccttctgtgtggacggcgaggggcggaggctgccatggtgggaaacagaggcccctcttgaggactcacagtgtttgatgatgcagaagtttgagaaggttccagaatcaaaggtgatcttcgacgccaatgctcctgtggctgtcagatccaaagttcctgattctgagttccccgtgatgcagtgcttgacagattgcacagaggacgaggcctgcagcttcttcaccgtgtccacgacggagccagagatttcctgtgatttctatgcttggacaagtgacaatgttgcctgcatgacttctgaccagaaacgagatgcactggggaactcaaaggccaccagctttggaagtcttcgctgccaggtgaaagtgaggagccatggtcaagattctccagctgtgtatttgaaaaagggccaaggatccaccacaacacttcagaaacgctttgaacccactggtttccaaaacatgctttctggattgtacaaccccattgtgttctcagcctcaggagccaatctaaccgatgctcacctcttctgtcttcttgcatgcgaccgtgatctgtgttgcgatggcttcgtcctcacacaggttcaaggaggtgccatcatctgtgggttgctgagctcacccagtgtcctgctttgtaatgtcaaagactggatggatccctctgaagcctgggctaatgctacatgtcctggtgtgacatatgaccaggagagccaccaggtgatattgcgtcttggagaccaggagttcatcaagagtctgacacccttagaaggaactcaagacacctttaccaattttcagcaggtttatctctggaaagattctgacatggggtctcggcctgagtctatgggatgtagaaaagacacagtgccaaggccagcatctccaacagaagcaggtttgacaacagaacttttctcccctgtggacctcaaccaggtcattgtcaatggaaatcaatcactatccagccagaagcactggcttttcaagcacctgttttcagcccagcaggcaaacctatggtgcctttctcgttgtgtgcaggagcactctttctgtcagctcgcagagataacagagagtgcatccttgtacttcacctgcaccctctacccagaggcacaggtgtgtgatgacatcatggagtccaatgcccagggctgcagactgatcctgcctcagatgccaaaggccctgttccggaagaaagttatactggaagataaagtgaagaacttttacactcgcctgccgttccaaaaactgatggggatatccattagaaataaagtgcccatgtctgaaaaatctatttctaatgggttctttgaatgtgaacgacggtgcgatgcggacccatgctgcactggctttggatttctaaatgtttcccagttaaaaggaggagaggtgacatgtctcactctgaacagcttgggaattcagatgtgcagtgaggagaatggaggagcctggcgcattttggactgtggctctcctgacattgaagtccacacctatcccttcggatggtaccagaagcccattgctcaaaataatgctcccagtttttgccctttggttgttctgccttccctcacagagaaagtgtctctggactcgtggcagtccctggccctctcttcagtggttgttgatccatccattaggcactttgatgttgcccatgtcagcactgctgccaccagcaatttctctgctgtccgagacctctgtttgtcggaatgttcccaacatgaggcctgtctcatcaccactctgcaaacccaacctggggctgtgagatgtatgttctatgctgatactcaaagctgcacacatagtctgcagggtcagaactgccgacttctgcttcgtgaagaggccacccacatctaccggaagccaggaatctctctgctcagctatgaggcatctgtaccttctgtgcccatttccacccatggccggctgctgggcaggtcccaggccatccaggtgggtacctcatggaagcaagtggaccagttccttggagttccatatgctgccccgcccctggcagagaggcgcttccaggcaccagagcccttgaactggacaggctcctgggatgccagcaagccaagggccagctgctggcagccaggcaccagaacatccacgtctcctggagtcagtgaagattgtttgtatctcaatgtgttcatccctcagaatgtggcccctaacgcgtctgtgctggtgttcttccacaacaccatggacagggaggagagtgaaggatggccggctatcgacggctccttcttggctgctgttggcaacctcatcgtggtcactgccagctaccgagtgggtgtcttcggcttcctgagttctgggtccggagaggtgagtggcaactgggggctgctggaccaggtggcggctctgacctgggtgcagacccacatccgaggatttggcggggaccctcggcgcgtgtccctggcagcagaccgtggcggggctgatgtggccagcatccaccttctcacggccagggccaccaactcccaacttttccggagagctgtgctgatgggaggctccgcactctccccggccgccgtcatcagccatgagagggctcagcagcaggcaattgctttggcaaaggaggtcagttgccccatgtcatccagccaagaagtggtgtcctgcctccgccagaagcctgccaatgtcctcaatgatgcccagaccaagctcctggccgtgagtggccctttccactactggggtcctgtgatcgatggccacttcctccgtgagcctccagccagagcactgaagaggtctttatgggtagaggtcgatctgctcattgggagttctcaggacgacgggctcatcaacagagcaaaggctgtgaagcaatttgaggaaagtcgaggccggaccagtagcaaaacagccttttaccaggcactgcagaattctctgggtggcgaggactcagatgcccgcgtcgaggctgctgctacatggtattactctctggagcactccacggatgactatgcctccttctcccgggctctggagaatgccacccgggactactttatcatctgccctataatcgacatggccagtgcctgggcaaagagggcccgaggaaacgtcttcatgtaccatgctcctgaaaactacggccatggcagcctggagctgctggcggatgttcagtttgccttggggcttcccttctacccagcctacgaggggcagttttctctggaggagaagagcctgtcgctgaaaatcatgcagtacttttcccacttcatcagatcaggaaatcccaactacccttatgagttctcacggaaagtacccacatttgcaaccccctggcctgactttgtaccccgtgctggtggagagaactacaaggagttcagtgagctgctccccaatcgacagggcctgaagaaagccgactgctccttctggtccaagtacatctcgtctctgaagacatctgcagatggagccaagggcgggcagtcagcagagagtgaagaggaggagttgacggctggatctgggctaagagaagatctcctaagcctccaggaaccaggctctaagacctacagcaagtgaccagcccttgagctccccaaaaacctcacccgaggctgcccactatggtcatctttttctctaaaatagccacttaccttcaataaagtatctacatgcggtg

SEQ ID NO: 136499 - DNA, 8282 bp, Artificial Sequence
  derived and/or modified sequence
gcagtggtttctcctccttcctcccaggaagggccaggaaaatggccctggtcctggagatcttcaccctgctggcctccatctgctgggtgtcggccaatatcttcgagtaccaggtggatgcccagccccttcgtccctgtgagctgcagagggaaacggcctttctgaagcaagcagactacgtgccccagtgtgcagaggatggcagcttccagactgtccagtgccagaacgacggccgctcctgctggtgtgtgggtgccaacggcagtgaagtgctgggcagcaggcagccaggacggcctgtggcttgtctgtcattttgtcagctacagaaacagcagatcttactgagtggctacattaacagcacagacacctcctacctccctcagtgtcaggattcaggggactacgcgcctgttcagtgtgatgtgcagcaggtccagtgctggtgtgtggacgcagaggggatggaggtgtatgggacccgccagctggggaggccaaagcgatgtccaaggagctgtgaaataagaaatcgtcgtcttctccacggggtgggagataagtcaccaccccagtgttctgcggagggagagtttatgcctgtccagtgcaaatttgtcaacaccacagacatgatgatttttgatctggtccacagctacaacaggtttccagatgcatttgtgaccttcagttccttccagaggaggttccctgaggtatctgggtattgccactgtgctgacagccaagggcgggaactggctgagacaggtttggagttgttactggatgaaatttatgacaccatttttgctggcctggaccttccttccaccttcactgaaaccaccctgtaccggatactgcagagacggttcctcgcagttcaatcagtcatctctggcagattccgatgccccacaaaatgtgaagtggagcggtttacagcaaccagctttggtcacccctatgttccaagctgccgccgaaatggcgactatcaggcggtgcagtgccagacggaagggccctgctggtgtgtggacgcccaggggaaggaaatgcatggaacccggcagcaaggggagccgccatcttgtgctgaaggccaatcttgtgcctccgaaaggcagcaggccttgtccagactctactttgggacctcaggctacttcagccagcacgacctgttctcttccccagagaaaagatgggcctctccaagagtagccagatttgccacatcctgcccacccacgatcaaggagctctttgtggactctgggcttctccgcccaatggtggagggacagagccaacagttttctgtctcagaaaatcttctcaaagaagccatccgagcaatttttccctcccgagggctggctcgtcttgcccttcagtttaccaccaacccaaagagactccagcaaaacctttttggagggaaatttttggtgaatgttggccagtttaacttgtctggagcccttggcacaagaggcacatttaacttcagtcaatttttccagcaacttggtcttgcaagcttcttgaatggagggagacaagaagatttggccaagccactctctgtgggattagattcaaattcttccacaggaacccctgaagctgctaagaaggatggtactatgaataagccaactgtgggcagctttggctttgaaattaacctacaagagaaccaaaatgccctcaaattccttgcttctctcctggagcttccagaattccttctcttcttgcaacatgctatctctgtgccagaagatgtggcaagagatttaggtgatgtgatggaaacggtactcagctcccagacctgtgagcagacacctgaaaggctatttgtcccatcatgcacgacagaaggaagctatgaggatgtccaatgcttttccggagagtgctggtgtgtgaattcctggggcaaagagcttccaggctcaagagtcagaggtggacagccaaggtgccccacagactgtgaaaagcaaagggctcgcatgcaaagcctcatgggcagccagcctgctggctccaccttgtttgtccctgcttgtactagtgagggacatttcctgcctgtccagtgcttcaactcagagtgctactgtgttgatgctgagggtcaggccattcctggaactcgaagtgcaatagggaagcccaagaaatgccccacgccctgtcaattacagtctgagcaagctttcctcaggacggtgcaggccctgctctctaactccagcatgctacccaccctttccgacacctacatcccacagtgcagcaccgatgggcagtggagacaagtgcaatgcaatgggcctcctgagcaggtcttcgagttgtaccaacgatgggaggctcagaacaagggccaggatctgacgcctgccaagctgctagtgaagatcatgagctacagagaagcagcttccggaaacttcagtctctttattcaaagtctgtatgaggctggccagcaagatgtcttcccggtgctgtcacaatacccttctctgcaagatgtcccactagcagcactggaagggaaacggccccagcccagggagaatatcctcctggagccctacctcttctggcagatcttaaatggccaactcagccaatacccggggtcctactcagacttcagcactcctttggcacattttgatcttcggaactgctggtgtgtggatgaggctggccaagaactggaaggaatgcggtctgagccaagcaagctcccaacatgtcctggctcctgtgaggaagcaaagctccgtgtactgcagttcattagggaaacggaagagattgtttcagcttccaacagttctcggttccctctgggggagagtttcctggtggccaagggaatccggctgaggaatgaggacctcggccttcctccgctcttcccgccccgggaggctttcgcggagcagtttctgcgtgggagtgattacgccattcgcctggcggctcagtctaccttaagcttctatcagagacgccgcttttccccggacgactcggctggagcatccgcccttctgcggtcgggcccctacatgccacagtgtgatgcgtttggaagttgggagcctgtgcagtgccacgctgggactgggcactgctggtgtgtagatgagaaaggagggttcatccctggctcactgactgcccgctctctgcagattccacagtgcccgacaacctgcgagaaatctcgaaccagtgggctgctttccagttggaaacaggctagatcccaagaaaacccatctccaaaagacctgttcgtcccagcctgcctagaaacaggagagtatgccaggctgcaggcatcgggggctggcacctggtgtgtggaccctgcatcaggagaagagttgcggcctggctcgagcagcagtgcccagtgcccaagcctctgcaatgtgctcaagagtggagtcctctccaggagagtcagcccaggctatgtcccagcctgcagggcagaggatgggggcttttccccagtgcaatgtgaccaggcccagggcagctgctggtgtgtcatggacagcggagaagaggtgcctgggacgcgcgtgaccgggggccagcccgcctgtgagagcccgcggtgtccgctgccattcaacgcgtcggaggtggttggtggaacaatcctgtgtgagacaatctcgggccccacaggctctgccatgcagcagtgccaattgctgtgccgccagggctcctggagcgtgtttccaccagggccattgatatgtagcctggagagcggacgctgggagtcacagctgcctcagccccgggcctgccaacggccccagctgtggcagaccatccagacccaagggcactttcagctccagctcccgccgggcaagatgtgcagtgctgactacgcggatttgctgcagactttccaggttttcatattggatgagctgacagcccgcggcttctgccagatccaggtgaagacttttggcaccctggtttccattcctgtctgcaacaactcctctgtgcaggtgggttgtctgaccagggagcgtttaggagtgaatgttacatggaaatcacggcttgaggacatcccagtggcttctcttcctgacttacatgacattgagagagccttggtgggcaaggatctccttgggcgcttcacagatctgatccagagtggctcattccagcttcatctggactccaagacgttcccagcggaaaccatccgcttcctccaaggggaccactttggcacctctcccaggacatggtttgggtgctcggaaggattctaccaagtcttgacaagtgaggccagtcaggacggactgggatgcgttaagtgtcctgaaggaagctattcccaagatgaggaatgcattccttgtcctgttggattctaccaagaacaggcagggagcttggcctgtgtcccatgtcctgtgggcagaacgaccatttctgctggagctttcagccagactcacttgatgcagaagtttgagaaggttccagaatcaaaggtgatcttcgacgccaatgctcctgtggctgtcagatccaaagttcctgattctgagttccccgtgatgcagtgcttgacagattgcacagaggacgaggcctgcagcttcttcaccgtgtccacgacggagccagagatttcctgtgatttctatgcttggacaagtgacaatgttgcctgcatgacttctgaccagaaacgagatgcactggggaactcaaaggccaccagctttggaagtcttcgctgccaggtgaaagtgaggagccatggtcaagattctccagctgtgtatttgaaaaagggccaaggatccaccacaacacttcagaaacgctttgaacccactggtttccaaaacatgctttctggattgtacaaccccattgtgttctcagcctcaggagccaatctaaccgatgctcacctcttctgtcttcttgcatgcgaccgtgatctgtgttgcgatggcttcgtcctcacacaggttcaaggaggtgccatcatctgtgggttgctgagctcacccagtgtcctgctttgtaatgtcaaagactggatggatccctctgaagcctgggctaatgctacatgtcctggtgtgacatatgaccaggagagccaccaggtgatattgcgtcttggagaccaggagttcatcaagagtctgacacccttagaaggaactcaagacacctttaccaattttcagcaggtttatctctggaaagattctgacatggggtctcggcctgagtctatgggatgtagaaaagacacagtgccaaggccagcatctccaacagaagcaggtttgacaacagaacttttctcccctgtggacctcaaccaggtcattgtcaatggaaatcaatcactatccagccagaagcactggcttttcaagcacctgttttcagcccagcaggcaaacctatggtgcctttctcgttgtgtgcaggagcactctttctgtcagctcgcagagataacagagagtgcatccttgtacttcacctgcaccctctacccagaggcacaggtgtgtgatgacatcatggagtccaatgcccagggctgcagactgatcctgcctcagatgccaaaggccctgttccggaagaaagttatactggaagataaagtgaagaacttttacactcgcctgccgttccaaaaactgatggggatatccattagaaataaagtgcccatgtctgaaaaatctatttctaatgggttctttgaatgtgaacgacggtgcgatgcggacccatgctgcactggctttggatttctaaatgtttcccagttaaaaggaggagaggtgacatgtctcactctgaacagcttgggaattcagatgtgcagtgaggagaatggaggagcctggcgcattttggactgtggctctcctgacattgaagtccacacctatcccttcggatggtaccagaagcccattgctcaaaataatgctcccagtttttgccctttggttgttctgccttccctcacagagaaagtgtctctggactcgtggcagtccctggccctctcttcagtggttgttgatccatccattaggcactttgatgttgcccatgtcagcactgctgccaccagcaatttctctgctgtccgagacctctgtttgtcggaatgttcccaacatgaggcctgtctcatcaccactctgcaaacccaacctggggctgtgagatgtatgttctatgctgatactcaaagctgcacacatagtctgcagggtcagaactgccgacttctgcttcgtgaagaggccacccacatctaccggaagccaggaatctctctgctcagctatgaggcatctgtaccttctgtgcccatttccacccatggccggctgctgggcaggtcccaggccatccaggtgggtacctcatggaagcaagtggaccagttccttggagttccatatgctgccccgcccctggcagagaggcgcttccaggcaccagagcccttgaactggacaggctcctgggatgccagcaagccaagggccagctgctggcagccaggcaccagaacatccacgtctcctggagtcagtgaagattgtttgtatctcaatgtgttcatccctcagaatgtggcccctaacgcgtctgtgctggtgttcttccacaacaccatggacagggaggagagtgaaggatggccggctatcgacggctccttcttggctgctgttggcaacctcatcgtggtcactgccagctaccgagtgggtgtcttcggcttcctgagttctgggtccggagaggtgagtggcaactgggggctgctggaccaggtggcggctctgacctgggtgcagacccacatccgaggatttggcggggaccctcggcgcgtgtccctggcagcagaccgtggcggggctgatgtggccagcatccaccttctcacggccagggccaccaactcccaacttttccggagagctgtgctgatgggaggctccgcactctccccggccgccgtcatcagccatgagagggctcagcagcaggcaattgctttggcaaaggaggtcagttgccccatgtcatccagccaagaagtggtgtcctgcctccgccagaagcctgccaatgtcctcaatgatgcccagaccaagctcctggccgtgagtggccctttccactactggggtcctgtgatcgatggccacttcctccgtgagcctccagccagagcactgaagaggtctttatgggtagaggtcgatctgctcattgggagttctcaggacgacgggctcatcaacagagcaaaggctgtgaagcaatttgaggaaagtcgaggccggaccagtagcaaaacagccttttaccaggcactgcagaattctctgggtggcgaggactcagatgcccgcgtcgaggctgctgctacatggtattactctctggagcactccacggatgactatgcctccttctcccgggctctggagaatgccacccgggactactttatcatctgccctataatcgacatggccagtgcctgggcaaagagggcccgaggaaacgtcttcatgtaccatgctcctgaaaactacggccatggcagcctggagctgctggcggatgttcagtttgccttggggcttcccttctacccagcctacgaggggcagttttctctggaggagaagagcctgtcgctgaaaatcatgcagtacttttcccacttcatcagatcaggaaatcccaactacccttatgagttctcacggaaagtacccacatttgcaaccccctggcctgactttgtaccccgtgctggtggagagaactacaaggagttcagtgagctgctccccaatcgacagggcctgaagaaagccgactgctccttctggtccaagtacatctcgtctctgaagacatctgcagatggagccaagggcgggcagtcagcagagagtgaagaggaggagttgacggctggatctgggctaagagaagatctcctaagcctccaggaaccaggctctaagacctacagcaagtgaccagcccttgagctccccaaaaacctcacccgaggctgcccactatggtcatctttttctctaaaatagccacttaccttcaataaagtatctacatgcggtgaa

SEQ ID NO: 136500 - DNA, 8149 bp, Artificial Sequence
  derived and/or modified sequence
gcagtggtttctcctccttcctcccaggaagggccaggaaaatggccctggtcctggagatcttcaccctgctggcctccatctgctgggtgtcggccaatatcttcgagtaccaggtggatgcccagccccttcgtccctgtgagctgcagagggaaacggcctttctgaagcaagcagactacgtgccccagtgtgcagaggatggcagcttccagactgtccagtgccagaacgacggccgctcctgctggtgtgtgggtgccaacggcagtgaagtgctgggcagcaggcagccaggacggcctgtggcttgtctgtcattttgtcagctacagaaacagcagatcttactgagtggctacattaacagcacagacacctcctacctccctcagtgtcaggattcaggggactacgcgcctgttcagtgtgatgtgcagcaggtccagtgctggtgtgtggacgcagaggggatggaggtgtatgggacccgccagctggggaggccaaagcgatgtccaaggagctgtgaaataagaaatcgtcgtcttctccacggggtgggagataagtcaccaccccagtgttctgcggagggagagtttatgcctgtccagtgcaaatttgtcaacaccacagacatgatgatttttgatctggtccacagctacaacaggtttccagatgcatttgtgaccttcagttccttccagaggaggttccctgaggtatctgggtattgccactgtgctgacagccaagggcgggaactggctgagacaggtttggagttgttactggatgaaatttatgacaccatttttgctggcctggaccttccttccaccttcactgaaaccaccctgtaccggatactgcagagacggttcctcgcagttcaatcagtcatctctggcagattccgatgccccacaaaatgtgaagtggagcggtttacagcaaccagctttggtcacccctatgttccaagctgccgccgaaatggcgactatcaggcggtgcagtgccagacggaagggccctgctggtgtgtggacgcccaggggaaggaaatgcatggaacccggcagcaaggggagccgccatcttgtgctgaaggccaatcttgtgcctccgaaaggcagcaggccttgtccagactctactttgggacctcaggctacttcagccagcacgacctgttctcttccccagagaaaagatgggcctctccaagagtagccagatttgccacatcctgcccacccacgatcaaggagctctttgtggactctgggcttctccgcccaatggtggagggacagagccaacagttttctgtctcagaaaatcttctcaaagaagccatccgagcaatttttccctcccgagggctggctcgtcttgcccttcagtttaccaccaacccaaagagactccagcaaaacctttttggagggaaatttttggtgaatgttggccagtttaacttgtctggagcccttggcacaagaggcacatttaacttcagtcaatttttccagcaacttggtcttgcaagcttcttgaatggagggagacaagaagatttggccaagccactctctgtgggattagattcaaattcttccacaggaacccctgaagctgctaagaaggatggtactatgaataagccaactgtgggcagctttggctttgaaattaacctacaagagaaccaaaatgccctcaaattccttgcttctctcctggagcttccagaattccttctcttcttgcaacatgctatctctgtgccagaagatgtggcaagagatttaggtgatgtgatggaaacggtactcagctcccagacctgtgagcagacacctgaaaggctatttgtcccatcatgcacgacagaaggaagctatgaggatgtccaatgcttttccggagagtgctggtgtgtgaattcctggggcaaagagcttccaggctcaagagtcagaggtggacagccaaggtgccccacagactgtgaaaagcaaagggctcgcatgcaaagcctcatgggcagccagcctgctggctccaccttgtttgtccctgcttgtactagtgagggacatttcctgcctgtccagtgcttcaactcagagtgctactgtgttgatgctgagggtcaggccattcctggaactcgaagtgcaatagggaagcccaagaaatgccccacgccctgtcaattacagtctgagcaagctttcctcaggacggtgcaggccctgctctctaactccagcatgctacccaccctttccgacacctacatcccacagtgcagcaccgatgggcagtggagacaagtgcaatgcaatgggcctcctgagcaggtcttcgagttgtaccaacgatgggaggctcagaacaagggccaggatctgacgcctgccaagctgctagtgaagatcatgagctacagagaagcagcttccggaaacttcagtctctttattcaaagtctgtatgaggctggccagcaagatgtcttcccggtgctgtcacaatacccttctctgcaagatgtcccactagcagcactggaagggaaacggccccagcccagggagaatatcctcctggagccctacctcttctggcagatcttaaatggccaactcagccaatacccggggtcctactcagacttcagcactcctttggcacattttgatcttcggaactgctggtgtgtggatgaggctggccaagaactggaaggaatgcggtctgagccaagcaagctcccaacatgtcctggctcctgtgaggaagcaaagctccgtgtactgcagttcattagggaaacggaagagattgtttcagcttccaacagttctcggttccctctgggggagagtttcctggtggccaagggaatccggctgaggaatgaggacctcggccttcctccgctcttcccgccccgggaggctttcgcggagcagtttctgcgtgggagtgattacgccattcgcctggcggctcagtctaccttaagcttctatcagagacgccgcttttccccggacgactcggctggagcatccgcccttctgcggtcgggcccctacatgccacagtgtgatgcgtttggaagttgggagcctgtgcagtgccacgctgggactgggcactgctggtgtgtagatgagaaaggagggttcatccctggctcactgactgcccgctctctgcagattccacagtgcccgacaacctgcgagaaatctcgaaccagtgggctgctttccagttggaaacaggctagatcccaagaaaacccatctccaaaagacctgttcgtcccagcctgcctagaagcccgcggtgtccgctgccattcaacgcgtcggaggtggttggtggaacaatcctgtgtgagacaatctcgggccccacaggctctgccatgcagcagtgccaattgctgtgccgccagggctcctggagcgtgtttccaccagggccattgatatgtagcctggagagcggacgctgggagtcacagctgcctcagccccgggcctgccaacggccccagctgtggcagaccatccagacccaagggcactttcagctccagctcccgccgggcaagatgtgcagtgctgactacgcggatttgctgcagactttccaggttttcatattggatgagctgacagcccgcggcttctgccagatccaggtgaagacttttggcaccctggtttccattcctgtctgcaacaactcctctgtgcaggtgggttgtctgaccagggagcgtttaggagtgaatgttacatggaaatcacggcttgaggacatcccagtggcttctcttcctgacttacatgacattgagagagccttggtgggcaaggatctccttgggcgcttcacagatctgatccagagtggctcattccagcttcatctggactccaagacgttcccagcggaaaccatccgcttcctccaaggggaccactttggcacctctcccaggacatggtttgggtgctcggaaggattctaccaagtcttgacaagtgaggccagtcaggacggactgggatgcgttaagtgtcctgaaggaagctattcccaagatgaggaatgcattccttgtcctgttggattctaccaagaacaggcagggagcttggcctgtgtcccatgtcctgtgggcagaacgaccatttctgctggagctttcagccagactcactgtgtcactgactgtcagaggaacgaagcaggcctgcaatgtgaccagaatggccagtatcgagccagccagaaggacaggggcagtgggaaggccttctgtgtggacggcgaggggcggaggctgccatggtgggaaacagaggcccctcttgaggactcacagtgtttgatgatgcagaagtttgagaaggttccagaatcaaaggtgatcttcgacgccaatgctcctgtggctgtcagatccaaagttcctgattctgagttccccgtgatgcagtgcttgacagattgcacagaggacgaggcctgcagcttcttcaccgtgtccacgacggagccagagatttcctgtgatttctatgcttggacaagtgacaatgttgcctgcatgacttctgaccagaaacgagatgcactggggaactcaaaggccaccagctttggaagtcttcgctgccaggtgaaagtgaggagccatggtcaagattctccagctgtgtatttgaaaaagggccaaggatccaccacaacacttcagaaacgctttgaacccactggtttccaaaacatgctttctggattgtacaaccccattgtgttctcagcctcaggagccaatctaaccgatgctcacctcttctgtcttcttgcatgcgaccgtgatctgtgttgcgatggcttcgtcctcacacaggttcaaggaggtgccatcatctgtgggttgctgagctcacccagtgtcctgctttgtaatgtcaaagactggatggatccctctgaagcctgggctaatgctacatgtcctggtgtgacatatgaccaggagagccaccaggtgatattgcgtcttggagaccaggagttcatcaagagtctgacacccttagaaggaactcaagacacctttaccaattttcagcaggtttatctctggaaagattctgacatggggtctcggcctgagtctatgggatgtagaaaagacacagtgccaaggccagcatctccaacagaagcaggtttgacaacagaacttttctcccctgtggacctcaaccaggtcattgtcaatggaaatcaatcactatccagccagaagcactggcttttcaagcacctgttttcagcccagcaggcaaacctatggtgcctttctcgttgtgtgcaggagcactctttctgtcagctcgcagagataacagagagtgcatccttgtacttcacctgcaccctctacccagaggcacaggtgtgtgatgacatcatggagtccaatgcccagggctgcagactgatcctgcctcagatgccaaaggccctgttccggaagaaagttatactggaagataaagtgaagaacttttacactcgcctgccgttccaaaaactgatggggatatccattagaaataaagtgcccatgtctgaaaaatctatttctaatgggttctttgaatgtgaacgacggtgcgatgcggacccatgctgcactggctttggatttctaaatgtttcccagttaaaaggaggagaggtgacatgtctcactctgaacagcttgggaattcagatgtgcagtgaggagaatggaggagcctggcgcattttggactgtggctctcctgacattgaagtccacacctatcccttcggatggtaccagaagcccattgctcaaaataatgctcccagtttttgccctttggttgttctgccttccctcacagagaaagtgtctctggactcgtggcagtccctggccctctcttcagtggttgttgatccatccattaggcactttgatgttgcccatgtcagcactgctgccaccagcaatttctctgctgtccgagacctctgtttgtcggaatgttcccaacatgaggcctgtctcatcaccactctgcaaacccaacctggggctgtgagatgtatgttctatgctgatactcaaagctgcacacatagtctgcagggtcagaactgccgacttctgcttcgtgaagaggccacccacatctaccggaagccaggaatctctctgctcagctatgaggcatctgtaccttctgtgcccatttccacccatggccggctgctgggcaggtcccaggccatccaggtgggtacctcatggaagcaagtggaccagttccttggagttccatatgctgccccgcccctggcagagaggcgcttccaggcaccagagcccttgaactggacaggctcctgggatgccagcaagccaagggccagctgctggcagccaggcaccagaacatccacgtctcctggagtcagtgaagattgtttgtatctcaatgtgttcatccctcagaatgtggcccctaacgcgtctgtgctggtgttcttccacaacaccatggacagggaggagagtgaaggatggccggctatcgacggctccttcttggctgctgttggcaacctcatcgtggtcactgccagctaccgagtgggtgtcttcggcttcctgagttctgggtccggagaggtgagtggcaactgggggctgctggaccaggtggcggctctgacctgggtgcagacccacatccgaggatttggcggggaccctcggcgcgtgtccctggcagcagaccgtggcggggctgatgtggccagcatccaccttctcacggccagggccaccaactcccaacttttccggagagctgtgctgatgggaggctccgcactctccccggccgccgtcatcagccatgagagggctcagcagcaggcaattgctttggcaaaggaggtcagttgccccatgtcatccagccaagaagtggtgtcctgcctccgccagaagcctgccaatgtcctcaatgatgcccagaccaagctcctggccgtgagtggccctttccactactggggtcctgtgatcgatggccacttcctccgtgagcctccagccagagcactgaagaggtctttatgggtagaggtcgatctgctcattgggagttctcaggacgacgggctcatcaacagagcaaaggctgtgaagcaatttgaggaaagtcgaggccggaccagtagcaaaacagccttttaccaggcactgcagaattctctgggtggcgaggactcagatgcccgcgtcgaggctgctgctacatggtattactctctggagcactccacggatgactatgcctccttctcccgggctctggagaatgccacccgggactactttatcatctgccctataatcgacatggccagtgcctgggcaaagagggcccgaggaaacgtcttcatgtaccatgctcctgaaaactacggccatggcagcctggagctgctggcggatgttcagtttgccttggggcttcccttctacccagcctacgaggggcagttttctctggaggagaagagcctgtcgctgaaaatcatgcagtacttttcccacttcatcagatcaggaaatcccaactacccttatgagttctcacggaaagtacccacatttgcaaccccctggcctgactttgtaccccgtgctggtggagagaactacaaggagttcagtgagctgctccccaatcgacagggcctgaagaaagccgactgctccttctggtccaagtacatctcgtctctgaagacatctgcagatggagccaagggcgggcagtcagcagagagtgaagaggaggagttgacggctggatctgggctaagagaagatctcctaagcctccaggaaccaggctctaagacctacagcaagtgaccagcccttgagctccccaaaaacctcacccgaggctgcccactatggtcatctttttctctaaaatagccacttaccttcaataaagtatctacatgcggtgaa

SEQ ID NO: 136501 - DNA, 8307 bp, Artificial Sequence
  derived and/or modified sequence
atggccctggtgctggagatcttcaccctgctggccagcatctgctgggtgagcgccaacatcttcgagtaccaggtggacgcccagcccctgagaccctgcgagctgcagagagagaccgccttcctgaagcaggccgactacgtgccccagtgcgccgaggacggcagcttccagaccgtgcagtgccagaacgacggcagaagctgctggtgcgtgggcgccaacggcagcgaggtgctgggcagcagacagcccggcagacccgtggcctgcctgagcttctgccagctgcagaagcagcagatcctgctgagcggctacatcaacagcaccgacaccagctacctgccccagtgccaggacagcggcgactacgcccccgtgcagtgcgacgtgcagcaggtgcagtgctggtgcgtggacgccgagggcatggaggtgtacggcaccagacagctgggcagacccaagagatgccccagaagctgcgagatcagaaacagaagactgctgcacggcgtgggcgacaagagccccccccagtgcagcgccgagggcgagttcatgcccgtgcagtgcaagttcgtgaacaccaccgacatgatgatcttcgacctggtgcacagctacaacagattccccgacgccttcgtgaccttcagcagcttccagagaagattccccgaggtgagcggctactgccactgcgccgacagccagggcagagagctggccgagaccggcctggagctgctgctggacgagatctacgacaccatcttcgccggcctggacctgcccagcaccttcaccgagaccaccctgtacagaatcctgcagagaagattcctggccgtgcagagcgtgatcagcggcagattcagatgccccaccaagtgcgaggtggagagattcaccgccaccagcttcggccacccctacgtgcccagctgcagaagaaacggcgactaccaggccgtgcagtgccagaccgagggcccctgctggtgcgtggacgcccagggcaaggagatgcacggcaccagacagcagggcgagccccccagctgcgccgagggccagagctgcgccagcgagagacagcaggccctgagcagactgtacttcggcaccagcggctacttcagccagcacgacctgttcagcagccccgagaagagatgggccagccccagagtggccagattcgccaccagctgcccccccaccatcaaggagctgttcgtggacagcggcctgctgagacccatggtggagggccagagccagcagttcagcgtgagcgagaacctgctgaaggaggccatcagagccatcttccccagcagaggcctggccagactggccctgcagttcaccaccaaccccaagagactgcagcagaacctgttcggcggcaagttcctggtgaacgtgggccagttcaacctgagcggcgccctgggcaccagaggcaccttcaacttcagccagttcttccagcagctgggcctggccagcttcctgaacggcggcagacaggaggacctggccaagcccctgagcgtgggcctggacagcaacagcagcaccggcacccccgaggccgccaagaaggacggcaccatgaacaagcccaccgtgggcagcttcggcttcgagatcaacctgcaggagaaccagaacgccctgaagttcctggccagcctgctggagctgcccgagttcctgctgttcctgcagcacgccatcagcgtgcccgaggacgtggccagagacctgggcgacgtgatggagaccgtgctgagcagccagacctgcgagcagacccccgagagactgttcgtgcccagctgcaccaccgagggcagctacgaggacgtgcagtgcttcagcggcgagtgctggtgcgtgaacagctggggcaaggagctgcccggcagcagagtgagaggcggccagcccagatgccccaccgactgcgagaagcagagagccagaatgcagagcctgatgggcagccagcccgccggcagcaccctgttcgtgcccgcctgcaccagcgagggccacttcctgcccgtgcagtgcttcaacagcgagtgctactgcgtggacgccgagggccaggccatccccggcaccagaagcgccatcggcaagcccaagaagtgccccaccccctgccagctgcagagcgagcaggccttcctgagaaccgtgcaggccctgctgagcaacagcagcatgctgcccaccctgagcgacacctacatcccccagtgcagcaccgacggccagtggagacaggtgcagtgcaacggcccccccgagcaggtgttcgagctgtaccagagatgggaggcccagaacaagggccaggacctgacccccgccaagctgctggtgaagatcatgagctacagagaggccgccagcggcaacttcagcctgttcatccagagcctgtacgaggccggccagcaggacgtgttccccgtgctgagccagtaccccagcctgcaggacgtgcccctggccgccctggagggcaagagaccccagcccagagagaacatcctgctggagccctacctgttctggcagatcctgaacggccagctgagccagtaccccggcagctacagcgacttcagcacccccctggcccacttcgacctgagaaactgctggtgcgtggacgaggccggccaggagctggagggcatgagaagcgagcccagcaagctgcccacctgccccggcagctgcgaggaggccaagctgagagtgctgcagttcatcagagagaccgaggagatcgtgagcgccagcaacagcagcagattccccctgggcgagagcttcctggtggccaagggcatcagactgagaaacgaggacctgggcctgccccccctgttcccccccagagaggccttcgccgagcagttcctgagaggcagcgactacgccatcagactggccgcccagagcaccctgagcttctaccagagaagaagattcagccccgacgacagcgccggcgccagcgccctgctgagaagcggcccctacatgccccagtgcgacgccttcggcagctgggagcccgtgcagtgccacgccggcaccggccactgctggtgcgtggacgagaagggcggcttcatccccggcagcctgaccgccagaagcctgcagatcccccagtgccccaccacctgcgagaagagcagaaccagcggcctgctgagcagctggaagcaggccagaagccaggagaaccccagccccaaggacctgttcgtgcccgcctgcctggagaccggcgagtacgccagactgcaggccagcggcgccggcacctggtgcgtggaccccgccagcggcgaggagctgagacccggcagcagcagcagcgcccagtgccccagcctgtgcaacgtgctgaagagcggcgtgctgagcagaagagtgagccccggctacgtgcccgcctgcagagccgaggacggcggcttcagccccgtgcagtgcgaccaggcccagggcagctgctggtgcgtgatggacagcggcgaggaggtgcccggcaccagagtgaccggcggccagcccgcctgcgagagccccagatgccccctgcccttcaacgccagcgaggtggtgggcggcaccatcctgtgcgagaccatcagcggccccaccggcagcgccatgcagcagtgccagctgctgtgcagacagggcagctggagcgtgttcccccccggccccctgatctgcagcctggagagcggcagatgggagagccagctgccccagcccagagcctgccagagaccccagctgtggcagaccatccagacccagggccacttccagctgcagctgccccccggcaagatgtgcagcgccgactacgccgacctgctgcagaccttccaggtgttcatcctggacgagctgaccgccagaggcttctgccagatccaggtgaagaccttcggcaccctggtgagcatccccgtgtgcaacaacagcagcgtgcaggtgggctgcctgaccagagagagactgggcgtgaacgtgacctggaagagcagactggaggacatccccgtggccagcctgcccgacctgcacgacatcgagagagccctggtgggcaaggacctgctgggcagattcaccgacctgatccagagcggcagcttccagctgcacctggacagcaagaccttccccgccgagaccatcagattcctgcagggcgaccacttcggcaccagccccagaacctggttcggctgcagcgagggcttctaccaggtgctgaccagcgaggccagccaggacggcctgggctgcgtgaagtgccccgagggcagctacagccaggacgaggagtgcatcccctgccccgtgggcttctaccaggagcaggccggcagcctggcctgcgtgccctgccccgtgggcagaaccaccatcagcgccggcgccttcagccagacccactgcgtgaccgactgccagagaaacgaggccggcctgcagtgcgaccagaacggccagtacagagccagccagaaggacagaggcagcggcaaggccttctgcgtggacggcgagggcagaagactgccctggtgggagaccgaggcccccctggaggacagccagtgcctgatgatgcagaagttcgagaaggtgcccgagagcaaggtgatcttcgacgccaacgcccccgtggccgtgagaagcaaggtgcccgacagcgagttccccgtgatgcagtgcctgaccgactgcaccgaggacgaggcctgcagcttcttcaccgtgagcaccaccgagcccgagatcagctgcgacttctacgcctggaccagcgacaacgtggcctgcatgaccagcgaccagaagagagacgccctgggcaacagcaaggccaccagcttcggcagcctgagatgccaggtgaaggtgagaagccacggccaggacagccccgccgtgtacctgaagaagggccagggcagcaccaccaccctgcagaagagattcgagcccaccggcttccagaacatgctgagcggcctgtacaaccccatcgtgttcagcgccagcggcgccaacctgaccgacgcccacctgttctgcctgctggcctgcgacagagacctgtgctgcgacggcttcgtgctgacccaggtgcagggcggcgccatcatctgcggcctgctgagcagccccagcgtgctgctgtgcaacgtgaaggactggatggaccccagcgaggcctgggccaacgccacctgccccggcgtgacctacgaccaggagagccaccaggtgatcctgagactgggcgaccaggagttcatcaagagcctgacccccctggagggcacccaggacaccttcaccaacttccagcaggtgtacctgtggaaggacagcgacatgggcagcagacccgagagcatgggctgcagaaaggacaccgtgcccagacccgccagccccaccgaggccggcctgaccaccgagctgttcagccccgtggacctgaaccaggtgatcgtgaacggcaaccagagcctgagcagccagaagcactggctgttcaagcacctgttcagcgcccagcaggccaacctgtggtgcctgagcagatgcgtgcaggagcacagcttctgccagctggccgagatcaccgagagcgccagcctgtacttcacctgcaccctgtaccccgaggcccaggtgtgcgacgacatcatggagagcaacgcccagggctgcagactgatcctgccccagatgcccaaggccctgttcagaaagaaggtgatcctggaggacaaggtgaagaacttctacaccagactgcccttccagaagctgatgggcatcagcatcagaaacaaggtgcccatgagcgagaagagcatcagcaacggcttcttcgagtgcgagagaagatgcgacgccgacccctgctgcaccggcttcggcttcctgaacgtgagccagctgaagggcggcgaggtgacctgcctgaccctgaacagcctgggcatccagatgtgcagcgaggagaacggcggcgcctggagaatcctggactgcggcagccccgacatcgaggtgcacacctaccccttcggctggtaccagaagcccatcgcccagaacaacgcccccagcttctgccccctggtggtgctgcccagcctgaccgagaaggtgagcctggacagctggcagagcctggccctgagcagcgtggtggtggaccccagcatcagacacttcgacgtggcccacgtgagcaccgccgccaccagcaacttcagcgccgtgagagacctgtgcctgagcgagtgcagccagcacgaggcctgcctgatcaccaccctgcagacccagcccggcgccgtgagatgcatgttctacgccgacacccagagctgcacccacagcctgcagggccagaactgcagactgctgctgagagaggaggccacccacatctacagaaagcccggcatcagcctgctgagctacgaggccagcgtgcccagcgtgcccatcagcacccacggcagactgctgggcagaagccaggccatccaggtgggcaccagctggaagcaggtggaccagttcctgggcgtgccctacgccgccccccccctggccgagagaagattccaggcccccgagcccctgaactggaccggcagctgggacgccagcaagcccagagccagctgctggcagcccggcaccagaaccagcaccagccccggcgtgagcgaggactgcctgtacctgaacgtgttcatcccccagaacgtggcccccaacgccagcgtgctggtgttcttccacaacaccatggacagagaggagagcgagggctggcccgccatcgacggcagcttcctggccgccgtgggcaacctgatcgtggtgaccgccagctacagagtgggcgtgttcggcttcctgagcagcggcagcggcgaggtgagcggcaactggggcctgctggaccaggtggccgccctgacctgggtgcagacccacatcagaggcttcggcggcgaccccagaagagtgagcctggccgccgacagaggcggcgccgacgtggccagcatccacctgctgaccgccagagccaccaacagccagctgttcagaagagccgtgctgatgggcggcagcgccctgagccccgccgccgtgatcagccacgagagagcccagcagcaggccatcgccctggccaaggaggtgagctgccccatgagcagcagccaggaggtggtgagctgcctgagacagaagcccgccaacgtgctgaacgacgcccagaccaagctgctggccgtgagcggccccttccactactggggccccgtgatcgacggccacttcctgagagagccccccgccagagccctgaagagaagcctgtgggtggaggtggacctgctgatcggcagcagccaggacgacggcctgatcaacagagccaaggccgtgaagcagttcgaggagagcagaggcagaaccagcagcaagaccgccttctaccaggccctgcagaacagcctgggcggcgaggacagcgacgccagagtggaggccgccgccacctggtactacagcctggagcacagcaccgacgactacgccagcttcagcagagccctggagaacgccaccagagactacttcatcatctgccccatcatcgacatggccagcgcctgggccaagagagccagaggcaacgtgttcatgtaccacgcccccgagaactacggccacggcagcctggagctgctggccgacgtgcagttcgccctgggcctgcccttctaccccgcctacgagggccagttcagcctggaggagaagagcctgagcctgaagatcatgcagtacttcagccacttcatcagaagcggcaaccccaactacccctacgagttcagcagaaaggtgcccaccttcgccaccccctggcccgacttcgtgcccagagccggcggcgagaactacaaggagttcagcgagctgctgcccaacagacagggcctgaagaaggccgactgcagcttctggagcaagtacatcagcagcctgaagaccagcgccgacggcgccaagggcggccagagcgccgagagcgaggaggaggagctgaccgccggcagcggcctgagagaggacctgctgagcctgcaggagcccggcagcaagacctacagcaagtag

SEQ ID NO: 136502 - protein, 160 aa, Artificial Sequence
  derived and/or modified sequence
MVPSAGQLALFALGIVLAACQALENSTSPLSADPPVAAAVVSHFNDCPDSHTQFCFHGTCRFLVQEDKPACVCHSGYVGARCEHADLLAVVAASQKKQAITALVVVSIVALAVLIITCVLIHCCQVRKHCEWCRALICRHEKPSALLKGRTACCHSETVV

SEQ ID NO: 136503 - DNA, 4264 bp, Artificial Sequence
  derived and/or modified sequence
agccgccttcctatttccgcccggcgggcagcgctgcggggcgagtgccagcagagaggcgctcggtcctccctccgccctcccgcgccgggggcaggccctgcctagtctgcgtctttttcccccgcaccgcggcgccgctccgccactcgggcaccgcaggtagggcaggaggctggagagcctgctgcccgcccgcccgtaaaatggtcccctcggctggacagctcgccctgttcgctctgggtattgtgttggctgcgtgccaggccttggagaacagcacgtccccgctgagtgcagacccgcccgtggctgcagcagtggtgtcccattttaatgactgcccagattcccacactcagttctgcttccatggaacctgcaggtttttggtgcaggaggacaagccagcatgtgtctgccattctgggtacgttggtgcacgctgtgagcatgcggacctcctggccgtggtggctgccagccagaagaagcaggccatcaccgccttggtggtggtctccatcgtggccctggctgtccttatcatcacatgtgtgctgatacactgctgccaggtccgaaaacactgtgagtggtgccgggccctcatctgccggcacgagaagcccagcgccctcctgaagggaagaaccgcttgctgccactcagaaacagtggtctgaagagcccagaggaggagtttggccaggtggactgtggcagatcaataaagaaaggcttcttcaggacagcactgccagagatgcctgggtgtgccacagaccttcctacttggcctgtaatcacctgtgcagccttttgtgggccttcaaaactctgtcaagaactccgtctgcttggggttattcagtgtgacctagagaagaaatcagcggaccacgatttcaagacttgttaaaaaagaactgcaaagagacggactcctgttcacctaggtgaggtgtgtgcagcagttggtgtctgagtccacatgtgtgcagttgtcttctgccagccatggattccaggctatatatttctttttaatgggccacctccccacaacagaattctgcccaacacaggagatttctatagttattgttttctgtcatttgcctactggggaagaaagtgaaggaggggaaactgtttaatatcacatgaagaccctagctttaagagaagctgtatcctctaaccacgagaccctcaaccagcccaacatcttccatggacacatgacattgaagaccatcccaagctatcgccacccttggagatgatgtcttatttattagatggataatggttttatttttaatctcttaagtcaatgtaaaaagtataaaaccccttcagacttctacattaatgatgtatgtgttgctgactgaaaagctatactgattagaaatgtctggcctcttcaagacagctaaggcttgggaaaagtcttccagggtgcggagatggaaccagaggctgggttactggtaggaataaaggtaggggttcagaaatggtgccattgaagccacaaagccggtaaatgcctcaatacgttctgggagaaaacttagcaaatccatcagcagggatctgtcccctctgttggggagagaggaagagtgtgtgtgtctacacaggataaacccaatacatattgtactgctcagtgattaaatgggttcacttcctcgtgagccctcggtaagtatgtttagaaatagaacattagccacgagccataggcatttcaggccaaatccatgaaagggggaccagtcatttattttccattttgttgcttggttggtttgttgctttatttttaaaaggagaagtttaactttgctatttattttcgagcactaggaaaactattccagtaatttttttttcctcatttccattcaggatgccggctttattaacaaaaactctaacaagtcacctccactatgtgggtcttcctttcccctcaagagaaggagcaattgttcccctgagcatctgggtccatctgacccatggggcctgcctgtgagaaacagtgggtcccttcaaatacatagtggatagctcatccctaggaattttcattaaaatttggaaacagagtaatgaagaaataatatataaactccttatgtgaggaaatgctactaatatctgaaaagtgaaagatttctatgtattaactcttaagtgcacctagcttattacatcgtgaaaggtacatttaaaatatgttaaattggcttgaaattttcagagaattttgtcttcccctaattcttcttccttggtctggaagaacaatttctatgaattttctctttatttttttttataattcagacaattctatgacccgtgtcttcatttttggcactcttatttaacaatgccacacctgaagcacttggatctgttcagagctgaccccctagcaacgtagttgacacagctccaggtttttaaattactaaaataagttcaagtttacatcccttgggccagatatgtgggttgaggcttgactgtagcatcctgcttagagaccaatcaacggacactggtttttagacctctatcaatcagtagttagcatccaagagactttgcagaggcgtaggaatgaggctggacagatggcggaagcagaggttccctgcgaagacttgagatttagtgtctgtgaatgttctagttcctaggtccagcaagtcacacctgccagtgccctcatccttatgcctgtaacacacatgcagtgagaggcctcacatatacgcctccctagaagtgccttccaagtcagtcctttggaaaccagcaggtctgaaaaagaggctgcatcaatgcaagcctggttggaccattgtccatgcctcaggatagaacagcctggcttatttggggatttttcttctagaaatcaaatgactgataagcattggatccctctgccatttaatggcaatggtagtctttggttagctgcaaaaatactccatttcaagttaaaaatgcatcttctaatccatctctgcaagctccctgtgtttccttgccctttagaaaatgaattgttcactacaattagagaatcatttaacatcctgacctggtaagctgccacacacctggcagtggggagcatcgctgtttccaatggctcaggagacaatgaaaagcccccatttaaaaaaataacaaacattttttaaaaggcctccaatactcttatggagcctggatttttcccactgctctacaggctgtgactttttttaagcatcctgacaggaaatgttttcttctacatggaaagatagacagcagccaaccctgatctggaagacagggccccggctggacacacgtggaaccaagccagggatgggctggccattgtgtccccgcaggagagatgggcagaatggccctagagttcttttccctgagaaaggagaaaaagatgggattgccactcacccacccacactggtaagggaggagaatttgtgcttctggagcttctcaagggattgtgttttgcaggtacagaaaactgcctgttatcttcaagccaggttttcgagggcacatgggtcaccagttgctttttcagtcaatttggccgggatggactaatgaggctctaacactgctcaggagacccctgccctctagttggttctgggctttgatctcttccaacctgcccagtcacagaaggaggaatgactcaaatgcccaaaaccaagaacacattgcagaagtaagacaaacatgtatatttttaaatgttctaacataagacctgttctctctagccattgatttaccaggctttctgaaagatctagtggttcacacagagagagagagagtactgaaaaagcaactcctcttcttagtcttaataatttactaaaatggtcaacttttcattatctttattataataaacctgatgcttttttttagaactccttactctgatgtctgtatatgttgcactgaaaaggttaatatttaatgttttaatttattttgtgtggtaagttaattttgatttctgtaatgtgttaatgtgattagcagttattttccttaatatctgaattatacttaaagagtagtgagcaatataagacgcaattgtgtttttcagtaatgtgcattgttattgagttgtactgtaccttatttggaaggatgaaggaatgaatctttttttcctaaa

SEQ ID NO: 136504 - DNA, 483 bp, Artificial Sequence
  derived and/or modified sequence
atggtgcccagcgccggccagctggccctgttcgccctgggcatcgtgctggccgcctgccaggccctggagaacagcaccagccccctgagcgccgacccccccgtggccgccgccgtggtgagccacttcaacgactgccccgacagccacacccagttctgcttccacggcacctgcagattcctggtgcaggaggacaagcccgcctgcgtgtgccacagcggctacgtgggcgccagatgcgagcacgccgacctgctggccgtggtggccgccagccagaagaagcaggccatcaccgccctggtggtggtgagcatcgtggccctggccgtgctgatcatcacctgcgtgctgatccactgctgccaggtgagaaagcactgcgagtggtgcagagccctgatctgcagacacgagaagcccagcgccctgctgaagggcagaaccgcctgctgccacagcgagaccgtggtgtag

SEQ ID NO: 136505 - DNA, 483 bp, Artificial Sequence
  derived and/or modified sequence
atggttccatctgccggacagttagccctctttgctttagggatcgtcttggccgcatgtcaagccctcgaaaactccacatccccgctgagcgccgatcctccggtagctgcagcagtggtctcgcacttcaacgattgtcccgactcacatactcagttttgcttccacggcacttgtagatttcttgtccaggaggacaaaccggcttgtgtatgccacagcgggtatgtgggtgccagatgtgagcatgcagatttgctagccgtagttgctgcgtctcaaaagaaacaggctataacagccctggtcgttgtgtcaatcgtggccctcgcggtcctaattataacttgcgttctgatacactgctgccaagtgcggaaacactgcgaatggtgcagggctctgatctgcaggcacgaaaaaccttcagccctgttaaaggggcgtacagcttgctgtcattccgaaactgttgtttag

SEQ ID NO: 136506 - DNA, 483 bp, Artificial Sequence
  derived and/or modified sequence
atggtgcccagcgctggccagctggccctgtttgccctgggcatcgtgctggccgcctgccaggccctggagaacagcaccagccccctgtctgctgacccccctgtggccgctgctgtggtgagccacttcaatgactgcccagacagccacacccagttctgcttccacggcacctgccgcttcctggtgcaggaggacaagccagcctgtgtgtgccacagcggctacgtgggcgcccgctgtgagcacgccgacctgctggccgtggtggccgccagccagaagaagcaggccatcacagccctggtggtggtgtccatcgtggccctggccgtgctgatcatcacctgtgtgctgatccactgctgccaggtgaggaagcactgtgagtggtgccgggccctgatctgcagacatgagaagcccagcgccctgctgaagggccgcacagcctgctgccacagcgagaccgtggtgtag

SEQ ID NO: 136507 - DNA, 483 bp, Artificial Sequence
  derived and/or modified sequence
atggtgcccagcgccggccagctggccctgttcgccctgggcatcgtgctagcggcttgtcaagcactggagaatagtacgtccccactgtcagccgaccccccagttgccgcggcggtggtgtcacatttcaatgattgccctgactcccatacacagttctgtttccacggtacgtgcaggttcctcgtacaggaagataaacccgcgtgtgtatgccactccggatacgtgggcgcccggtgtgagcacgccgatcttctcgcggtcgtggctgcaagccagaagaagcaggctatcacggcattggttgtcgtgtctatcgtcgccctggcagtactgataatcacctgcgtgctgatccactgttgccaagtgaggaaacattgtgaatggtgccgcgcactcatctgcagacacgagaaaccctcagcactgctaaaaggacgaactgcgtgttgtcactccgagacagtggtttag

SEQ ID NO: 136508 - DNA, 483 bp, Artificial Sequence
  derived and/or modified sequence
atggtgccaagtgcaggccaactggcattgttcgcactgggcatcgtgttggcggcatgccaggccctggagaactccacaagccccctctccgcagatccaccagtggcggcagcagtggtgagccatttcaatgactgcccggattctcacactcagttctgttttcatgggacatgtcgttttttagtgcaggaagataaacccgcatgcgtgtgtcactctggctatgtgggcgcacggtgcgaacatgccgacctcctggcagtcgtcgccgcaagccaaaagaagcaggccattaccgccctggttgttgtgagtatcgtcgccctggctgtgctgattatcacgtgtgtgctaatacattgttgtcaggttcggaagcactgcgagtggtgcagagcactcatttgccggcacgagaaaccgtcggcgctgctcaaagggaggaccgcctgctgccactctgaaaccgtggtctag

SEQ ID NO: 136509 - DNA, 4310 bp, Artificial Sequence
  derived and/or modified sequence
gtcagctgtgccccggtcgccgagtggcgaggaggtgacggtagccgccttcctatttccgcccggcgggcagcgctgcggggcgagtgccagcagagaggcgctcggtcctccctccgccctcccgcgccgggggcaggccctgcctagtctgcgtctttttcccccgcaccgcggcgccgctccgccactcgggcaccgcaggtagggcaggaggctggagagcctgctgcccgcccgcccgtaaaatggtcccctcggctggacagctcgccctgttcgctctgggtattgtgttggctgcgtgccaggccttggagaacagcacgtccccgctgagtgcagacccgcccgtggctgcagcagtggtgtcccattttaatgactgcccagattcccacactcagttctgcttccatggaacctgcaggtttttggtgcaggaggacaagccagcatgtgtctgccattctgggtacgttggtgcacgctgtgagcatgcggacctcctggccgtggtggctgccagccagaagaagcaggccatcaccgccttggtggtggtctccatcgtggccctggctgtccttatcatcacatgtgtgctgatacactgctgccaggtccgaaaacactgtgagtggtgccgggccctcatctgccggcacgagaagcccagcgccctcctgaagggaagaaccgcttgctgccactcagaaacagtggtctgaagagcccagaggaggagtttggccaggtggactgtggcagatcaataaagaaaggcttcttcaggacagcactgccagagatgcctgggtgtgccacagaccttcctacttggcctgtaatcacctgtgcagccttttgtgggccttcaaaactctgtcaagaactccgtctgcttggggttattcagtgtgacctagagaagaaatcagcggaccacgatttcaagacttgttaaaaaagaactgcaaagagacggactcctgttcacctaggtgaggtgtgtgcagcagttggtgtctgagtccacatgtgtgcagttgtcttctgccagccatggattccaggctatatatttctttttaatgggccacctccccacaacagaattctgcccaacacaggagatttctatagttattgttttctgtcatttgcctactggggaagaaagtgaaggaggggaaactgtttaatatcacatgaagaccctagctttaagagaagctgtatcctctaaccacgagaccctcaaccagcccaacatcttccatggacacatgacattgaagaccatcccaagctatcgccacccttggagatgatgtcttatttattagatggataatggttttatttttaatctcttaagtcaatgtaaaaagtataaaaccccttcagacttctacattaatgatgtatgtgttgctgactgaaaagctatactgattagaaatgtctggcctcttcaagacagctaaggcttgggaaaagtcttccagggtgcggagatggaaccagaggctgggttactggtaggaataaaggtaggggttcagaaatggtgccattgaagccacaaagccggtaaatgcctcaatacgttctgggagaaaacttagcaaatccatcagcagggatctgtcccctctgttggggagagaggaagagtgtgtgtgtctacacaggataaacccaatacatattgtactgctcagtgattaaatgggttcacttcctcgtgagccctcggtaagtatgtttagaaatagaacattagccacgagccataggcatttcaggccaaatccatgaaagggggaccagtcatttattttccattttgttgcttggttggtttgttgctttatttttaaaaggagaagtttaactttgctatttattttcgagcactaggaaaactattccagtaatttttttttcctcatttccattcaggatgccggctttattaacaaaaactctaacaagtcacctccactatgtgggtcttcctttcccctcaagagaaggagcaattgttcccctgagcatctgggtccatctgacccatggggcctgcctgtgagaaacagtgggtcccttcaaatacatagtggatagctcatccctaggaattttcattaaaatttggaaacagagtaatgaagaaataatatataaactccttatgtgaggaaatgctactaatatctgaaaagtgaaagatttctatgtattaactcttaagtgcacctagcttattacatcgtgaaaggtacatttaaaatatgttaaattggcttgaaattttcagagaattttgtcttcccctaattcttcttccttggtctggaagaacaatttctatgaattttctctttatttttttttataattcagacaattctatgacccgtgtcttcatttttggcactcttatttaacaatgccacacctgaagcacttggatctgttcagagctgaccccctagcaacgtagttgacacagctccaggtttttaaattactaaaataagttcaagtttacatcccttgggccagatatgtgggttgaggcttgactgtagcatcctgcttagagaccaatcaacggacactggtttttagacctctatcaatcagtagttagcatccaagagactttgcagaggcgtaggaatgaggctggacagatggcggaagcagaggttccctgcgaagacttgagatttagtgtctgtgaatgttctagttcctaggtccagcaagtcacacctgccagtgccctcatccttatgcctgtaacacacatgcagtgagaggcctcacatatacgcctccctagaagtgccttccaagtcagtcctttggaaaccagcaggtctgaaaaagaggctgcatcaatgcaagcctggttggaccattgtccatgcctcaggatagaacagcctggcttatttggggatttttcttctagaaatcaaatgactgataagcattggatccctctgccatttaatggcaatggtagtctttggttagctgcaaaaatactccatttcaagttaaaaatgcatcttctaatccatctctgcaagctccctgtgtttccttgccctttagaaaatgaattgttcactacaattagagaatcatttaacatcctgacctggtaagctgccacacacctggcagtggggagcatcgctgtttccaatggctcaggagacaatgaaaagcccccatttaaaaaaataacaaacattttttaaaaggcctccaatactcttatggagcctggatttttcccactgctctacaggctgtgactttttttaagcatcctgacaggaaatgttttcttctacatggaaagatagacagcagccaaccctgatctggaagacagggccccggctggacacacgtggaaccaagccagggatgggctggccattgtgtccccgcaggagagatgggcagaatggccctagagttcttttccctgagaaaggagaaaaagatgggattgccactcacccacccacactggtaagggaggagaatttgtgcttctggagcttctcaagggattgtgttttgcaggtacagaaaactgcctgttatcttcaagccaggttttcgagggcacatgggtcaccagttgctttttcagtcaatttggccgggatggactaatgaggctctaacactgctcaggagacccctgccctctagttggttctgggctttgatctcttccaacctgcccagtcacagaaggaggaatgactcaaatgcccaaaaccaagaacacattgcagaagtaagacaaacatgtatatttttaaatgttctaacataagacctgttctctctagccattgatttaccaggctttctgaaagatctagtggttcacacagagagagagagagtactgaaaaagcaactcctcttcttagtcttaataatttactaaaatggtcaacttttcattatctttattataataaacctgatgcttttttttagaactccttactctgatgtctgtatatgttgcactgaaaaggttaatatttaatgttttaatttattttgtgtggtaagttaattttgatttctgtaatgtgttaatgtgattagcagttattttccttaatatctgaattatacttaaagagtagtgagcaatataagacgcaattgtgtttttcagtaatgtgcattgttattgagttgtactgtaccttatttggaaggatgaaggaatgaatctttttttcctaaatcaa

SEQ ID NO: 136510 - DNA, 4326 bp, Artificial Sequence
  derived and/or modified sequence
gtcagctgtgccccggtcgccgagtggcgaggaggtgacggtagccgccttcctatttccgcccggcgggcagcgctgcggggcgagtgccagcagagaggcgctcggtcctccctccgccctcccgcgccgggggcaggccctgcctagtctgcgtctttttcccccgcaccgcggcgccgctccgccactcgggcaccgcaggtagggcaggaggctggagagcctgctgcccgcccgcccgtaaaatggtcccctcggctggacagctcgccctgttcgctctgggtattgtgttggctgcgtgccaggccttggagaacagcacgtccccgctgagtgcagacccgcccgtggctgcagcagtggtgtcccattttaatgactgcccagattcccacactcagttctgcttccatggaacctgcaggtttttggtgcaggaggacaagccagcatgtgtctgccattctgggtacgttggtgcacgctgtgagcatgcggacctcctggccgtggtggctgccagccagaagaagcaggccatcaccgccttggtggtggtctccatcgtggccctggctgtccttatcatcacatgtgtgctgatacactgctgccaggtccgaaaacactgtgagtggtgccgggccctcatctgccggcacgagaagcccagcgccctcctgaagggaagaaccgcttgctgccactcagaaacagtggtctgaagagcccagaggaggagtttggccaggtggactgtggcagatcaataaagaaaggcttcttcaggacagcactgccagagatgcctgggtgtgccacagaccttcctacttggcctgtaatcacctgtgcagccttttgtgggccttcaaaactctgtcaagaactccgtctgcttggggttattcagtgtgacctagagaagaaatcagcggaccacgatttcaagacttgttaaaaaagaactgcaaagagacggactcctgttcacctaggtgaggtgtgtgcagcagttggtgtctgagtccacatgtgtgcagttgtcttctgccagccatggattccaggctatatatttctttttaatgggccacctccccacaacagaattctgcccaacacaggagatttctatagttattgttttctgtcatttgcctactggggaagaaagtgaaggaggggaaactgtttaatatcacatgaagaccctagctttaagagaagctgtatcctctaaccacgagaccctcaaccagcccaacatcttccatggacacatgacattgaagaccatcccaagctatcgccacccttggagatgatgtcttatttattagatggataatggttttatttttaatctcttaagtcaatgtaaaaagtataaaaccccttcagacttctacattaatgatgtatgtgttgctgactgaaaagctatactgattagaaatgtctggcctcttcaagacagctaaggcttgggaaaagtcttccagggtgcggagatggaaccagaggctgggttactggtaggaataaaggtaggggttcagaaatggtgccattgaagccacaaagccggtaaatgcctcaatacgttctgggagaaaacttagcaaatccatcagcagggatctgtcccctctgttggggagagaggaagagtgtgtgtgtctacacaggataaacccaatacatattgtactgctcagtgattaaatgggttcacttcctcgtgagccctcggtaagtatgtttagaaatagaacattagccacgagccataggcatttcaggccaaatccatgaaagggggaccagtcatttattttccattttgttgcttggttggtttgttgctttatttttaaaaggagaagtttaactttgctatttattttcgagcactaggaaaactattccagtaatttttttttcctcatttccattcaggatgccggctttattaacaaaaactctaacaagtcacctccactatgtgggtcttcctttcccctcaagagaaggagcaattgttcccctgagcatctgggtccatctgacccatggggcctgcctgtgagaaacagtgggtcccttcaaatacatagtggatagctcatccctaggaattttcattaaaatttggaaacagagtaatgaagaaataatatataaactccttatgtgaggaaatgctactaatatctgaaaagtgaaagatttctatgtattaactcttaagtgcacctagcttattacatcgtgaaaggtacatttaaaatatgttaaattggcttgaaattttcagagaattttgtcttcccctaattcttcttccttggtctggaagaacaatttctatgaattttctctttatttttttttataattcagacaattctatgacccgtgtcttcatttttggcactcttatttaacaatgccacacctgaagcacttggatctgttcagagctgaccccctagcaacgtagttgacacagctccaggtttttaaattactaaaataagttcaagtttacatcccttgggccagatatgtgggttgaggcttgactgtagcatcctgcttagagaccaatcaacggacactggtttttagacctctatcaatcagtagttagcatccaagagactttgcagaggcgtaggaatgaggctggacagatggcggaagcagaggttccctgcgaagacttgagatttagtgtctgtgaatgttctagttcctaggtccagcaagtcacacctgccagtgccctcatccttatgcctgtaacacacatgcagtgagaggcctcacatatacgcctccctagaagtgccttccaagtcagtcctttggaaaccagcaggtctgaaaaagaggctgcatcaatgcaagcctggttggaccattgtccatgcctcaggatagaacagcctggcttatttggggatttttcttctagaaatcaaatgactgataagcattggatccctctgccatttaatggcaatggtagtctttggttagctgcaaaaatactccatttcaagttaaaaatgcatcttctaatccatctctgcaagctccctgtgtttccttgccctttagaaaatgaattgttcactacaattagagaatcatttaacatcctgacctggtaagctgccacacacctggcagtggggagcatcgctgtttccaatggctcaggagacaatgaaaagcccccatttaaaaaaataacaaacattttttaaaaggcctccaatactcttatggagcctggatttttcccactgctctacaggctgtgactttttttaagcatcctgacaggaaatgttttcttctacatggaaagatagacagcagccaaccctgatctggaagacagggccccggctggacacacgtggaaccaagccagggatgggctggccattgtgtccccgcaggagagatgggcagaatggccctagagttcttttccctgagaaaggagaaaaagatgggattgccactcacccacccacactggtaagggaggagaatttgtgcttctggagcttctcaagggattgtgttttgcaggtacagaaaactgcctgttatcttcaagccaggttttcgagggcacatgggtcaccagttgctttttcagtcaatttggccgggatggactaatgaggctctaacactgctcaggagacccctgccctctagttggttctgggctttgatctcttccaacctgcccagtcacagaaggaggaatgactcaaatgcccaaaaccaagaacacattgcagaagtaagacaaacatgtatatttttaaatgttctaacataagacctgttctctctagccattgatttaccaggctttctgaaagatctagtggttcacacagagagagagagagtactgaaaaagcaactcctcttcttagtcttaataatttactaaaatggtcaacttttcattatctttattataataaacctgatgcttttttttagaactccttactctgatgtctgtatatgttgcactgaaaaggttaatatttaatgttttaatttattttgtgtggtaagttaattttgatttctgtaatgtgttaatgtgattagcagttattttccttaatatctgaattatacttaaagagtagtgagcaatataagacgcaattgtgtttttcagtaatgtgcattgttattgagttgtactgtaccttatttggaaggatgaaggaatgaatctttttttcctaaatcaaaaaaaaaaaaaaaaaa

SEQ ID NO: 136511 - protein, 414 aa, Artificial Sequence
  derived and/or modified sequence
MHYCVLSAFLILHLVTVALSLSTCSTLDMDQFMRKRIEAIRGQILSKLKLTSPPEDYPEPEEVPPEVISIYNSTRDLLQEKASRRAAACERERSDEEYYAKEVYKIDMPPFFPSENAIPPTFYRPYFRIVRFDVSAMEKNASNLVKAEFRVFRLQNPKARVPEQRIELYQILKSKDLTSPTQRYIDSKVVKTRAEGEWLSFDVTDAVHEWLHHKDRNLGFKISLHCPCCTFVPSNNYIIPNKSEELEARFAGIDGTSTYTSGDQKTIKSTRKKNSGKTPHLLLMLLPSYRLESQQTNRRKKRALDAAYCFRNVQDNCCLRPLYIDFKRDLGWKWIHEPKGYNANFCAGACPYLWSSDTQHSRVLSLYNTINPEASASPCCVSQDLEPLTILYYIGKTPKIEQLSNMIVKSCKCS

SEQ ID NO: 136512 - DNA, 1245 bp, Artificial Sequence
  derived and/or modified sequence
atgcactactgcgtgctgagcgccttcctgatcctgcacctggtgaccgtggccctgagcctgagcacctgcagcaccctggacatggaccagttcatgagaaagagaatcgaggccatcagaggccagatcctgagcaagctgaagctgaccagcccccccgaggactaccccgagcccgaggaggtgccccccgaggtgatcagcatctacaacagcaccagagacctgctgcaggagaaggccagcagaagagccgccgcctgcgagagagagagaagcgacgaggagtactacgccaaggaggtgtacaagatcgacatgccccccttcttccccagcgagaacgccatcccccccaccttctacagaccctacttcagaatcgtgagattcgacgtgagcgccatggagaagaacgccagcaacctggtgaaggccgagttcagagtgttcagactgcagaaccccaaggccagagtgcccgagcagagaatcgagctgtaccagatcctgaagagcaaggacctgaccagccccacccagagatacatcgacagcaaggtggtgaagaccagagccgagggcgagtggctgagcttcgacgtgaccgacgccgtgcacgagtggctgcaccacaaggacagaaacctgggcttcaagatcagcctgcactgcccctgctgcaccttcgtgcccagcaacaactacatcatccccaacaagagcgaggagctggaggccagattcgccggcatcgacggcaccagcacctacaccagcggcgaccagaagaccatcaagagcaccagaaagaagaacagcggcaagaccccccacctgctgctgatgctgctgcccagctacagactggagagccagcagaccaacagaagaaagaagagagccctggacgccgcctactgcttcagaaacgtgcaggacaactgctgcctgagacccctgtacatcgacttcaagagagacctgggctggaagtggatccacgagcccaagggctacaacgccaacttctgcgccggcgcctgcccctacctgtggagcagcgacacccagcacagcagagtgctgagcctgtacaacaccatcaaccccgaggccagcgccagcccctgctgcgtgagccaggacctggagcccctgaccatcctgtactacatcggcaagacccccaagatcgagcagctgagcaacatgatcgtgaagagctgcaagtgcagctag

SEQ ID NO: 136513 - DNA, 1245 bp, Artificial Sequence
  derived and/or modified sequence
atgcattattgtgtcctgtcggccttcctcatcctgcatctagtaactgtagcgctaagcctgtctacatgcagcacactggacatggatcagtttatgcgcaaaagaatcgaggccattagaggccagatcctatccaagttaaaactaaccagtccccctgaagactacccggaaccagaggaagtcccacctgaagtcatttccatttataattccactagagatctgctgcaggagaaggcctcaaggcgtgcggccgcctgtgagcgcgagcgaagcgacgaggaatattacgcaaaggaggtttacaagattgatatgccccccttcttccctagtgagaacgccattcccccgacattttacaggccctattttagaattgtgcgtttcgacgtctccgctatggagaaaaatgcgagtaatctcgtgaaagctgagttccgtgtgtttagacttcaaaatcctaaagcacgcgtaccagagcagcgcattgaactgtatcaaattctgaaatctaaagatctgacctccccgactcagagatacattgattctaaagtggtcaaaacacgggcggagggggaatggctcagctttgacgttactgatgctgttcacgagtggctccatcataaggatcgaaatttgggttttaaaatttcactgcactgcccctgttgtacctttgtgccgagcaacaattacatcatccctaataagagcgaagagctagaagcccggtttgcagggattgacggtactagcacatacacctccggggatcagaagacaattaagagtacccggaaaaaaaattcagggaagaccccacacctgctcctcatgctgctcccaagttatcgccttgaaagtcaacagacaaatcgtcgcaaaaaacgggcccttgacgccgcatattgctttcgcaatgtgcaggataattgctgcctgcgacctttgtacatcgattttaagcgggatctgggctggaagtggatccatgaaccaaaaggctacaatgcgaatttctgtgccggtgcatgcccatacctgtggagtagtgatacgcagcactctcgcgttctgagtttgtataacaccatcaaccctgaagcctctgcgagcccttgttgtgtttcccaggatcttgagccccttaccatcctttactatattggcaagactccgaaaattgaacagctatcaaatatgattgtaaagtcttgtaaatgctcgtag

SEQ ID NO: 136514 - DNA, 1245 bp, Artificial Sequence
  derived and/or modified sequence
atgcactactgtgtgctgagcgccttcctgatcctgcacctggtgacagtggccctgagcctgagcacctgcagcaccctggacatggaccagttcatgaggaagagaattgaggccatccggggccagatcctgagcaagctgaagctgaccagccccccagaggactacccagagcctgaggaggtgcccccagaggtgatcagcatctacaacagcacccgggacctgctgcaggagaaggccagccggcgggctgctgcctgtgagcgggagaggagtgatgaggagtactatgccaaggaggtgtacaagattgacatgccacccttcttccccagtgaaaatgccatcccccccaccttctaccggccctacttcagaattgtgcgctttgatgtgtctgccatggagaagaatgccagcaacctggtgaaggccgagttccgggtcttccggctgcagaaccccaaggcccgggtgcctgagcagagaattgagctgtaccagatcctgaagagcaaggacctgaccagccccacccagcgctacatcgacagcaaggtggtgaagaccagggctgagggggagtggctgagctttgatgtgacagatgctgtgcatgagtggctgcaccacaaggacaggaacctgggcttcaagatcagcctgcactgcccctgctgcacctttgtgcccagcaacaactacatcatccccaacaagtctgaggagctggaggccaggtttgctggcattgatggcaccagcacctacaccagcggggaccagaagaccatcaagagcaccaggaagaagaacagcggcaagaccccccacctgctgctgatgctgctgcccagctaccgcctggagagccagcagaccaacagaaggaagaagagggccctggatgctgcctactgcttcagaaatgtgcaggacaactgctgcctgcggcccctgtacatcgacttcaagagggacctgggctggaagtggatccacgagcccaagggctacaatgccaacttctgtgccggggcctgcccctacctgtggagcagtgacacccagcacagccgggtgctgagcctgtacaacaccatcaaccctgaggccagcgccagcccctgctgcgtgtcccaggacctggagcccctgaccatcctgtactacatcggcaagacccccaagattgagcagctgagcaacatgattgtgaagagctgcaagtgcagctag

SEQ ID NO: 136515 - DNA, 1245 bp, Artificial Sequence
  derived and/or modified sequence
atgcactactgcgtgctgagcgccttcctgatcctgcacctggtgacagtggccctgtccctgtcaacatgctctaccctggacatggatcaatttatgcggaaacgcattgaagcaattcgtggccagatactgagtaaactgaagctgacaagcccgcccgaagactacccagagcctgaggaggtcccaccagaagtgatctccatttacaattccactcgtgacttgctccaagagaaagcctcaagacgggccgctgcatgtgagcgggaaagaagcgatgaggaatattacgcaaaggaggtctacaaaatcgatatgccccccttctttccaagcgagaatgccatccctcccaccttttaccggccctactttagaattgtgcggtttgatgtgtctgctatggaaaagaacgccagtaatctcgttaaagccgagttcagagtttttcggcttcagaatcccaaagcacgtgtgcccgagcagcgcatcgaactctaccagatactcaaatctaaggacttgacctctcccacccagaggtatatcgactcaaaggttgtgaaaaccagggcagagggtgagtggctctctttcgacgtaaccgacgccgttcacgaatggcttcatcacaaagacagaaatttaggctttaagatttcccttcactgcccctgctgcactttcgtgccgtccaacaattacattattcccaataagagcgaagagctggaagcccgatttgccggtatcgatggaacttcaacctacacatctggggatcagaaaacaataaaatctactcggaagaagaatagcggcaagacccctcatctcctcttgatgcttctgcctagctacagactggaatcccaacagacaaaccgtcggaagaagcgggccctcgacgccgcctactgcttcaggaatgttcaggacaattgctgccttcggcctctgtatatagacttcaagagagatctgggctggaaatggatacacgagccaaaaggatacaacgcgaacttctgtgctggcgcctgtccttacctgtggtcaagcgatactcagcattccagggtgctctccttgtacaatactattaatcctgaggcctctgcaagcccatgttgtgtaagtcaggatctggaaccccttactatcctctattacatcggcaagaccccaaagattgagcagctgagcaatatgatcgttaagagctgtaaatgttcttag

SEQ ID NO: 136516 - DNA, 1245 bp, Artificial Sequence
  derived and/or modified sequence
atgcattattgcgtcctgtccgcatttctcatcctccacctggtaaccgttgccctgtccctgtcgacctgtagcactctcgacatggaccagtttatgaggaaacgcattgaagcaatcagagggcaaatattaagtaaattgaaattgacctcgccgcctgaggattaccccgagcccgaggaggttcctccagaagtgatatccatttataatagtactcgcgatttactccaggagaaagcctcccgtcgggctgccgcttgcgaacgggaacgctcagacgaggaatactacgctaaagaggtgtataagatcgatatgccaccattttttccaagtgaaaatgctatacctccaaccttttaccggccttacttcagaatagtgcgttttgacgtctctgccatggaaaagaacgcatcgaacctggtcaaagccgaattccgcgtgttccggctgcaaaaccccaaggccagggtgccggagcagcggatagaactgtatcaaatcctgaagtcaaaggacttaacctccccaactcagcggtacattgacagcaaagtcgtgaagactagagcagaaggtgagtggctaagtttcgatgtcactgacgctgtgcacgagtggctgcaccacaaggatcggaacctggggtttaagatttcactgcattgcccctgctgcacgttcgtgcccagcaacaactacatcattcccaataagagtgaagaactggaagcgaggtttgctgggatagatggaactagcacctataccagtggggaccaaaaaactattaaaagcacacgcaaaaaaaactccggtaaaacgccacaccttctgttgatgctgcttccatcttaccggcttgaaagccagcaaacaaacaggagaaagaagagagcattagatgccgcatattgctttaggaacgtgcaggacaattgttgcttgcgtccgctctatattgacttcaaaagagatctcgggtggaaatggattcatgaaccaaaaggatacaacgctaatttttgtgcgggagcctgcccttacctgtggagtagcgacacacagcatagcagagtactctcgctctacaacaccatcaacccggaagcctcggctagcccctgttgcgtgtcacaagacctcgagcccctgaccatactgtattacatagggaagactccaaaaatagaacaattgtctaatatgatcgtgaagtcttgtaagtgctcctag

SEQ ID NO: 136517 - DNA, 4969 bp, Artificial Sequence
  derived and/or modified sequence
gcccctcccgtcagttcgccagctgccagccccgggaccttttcatctcttcccttttggccggaggagccgagttcagatccgccactccgcacccgagactgacacactgaactccacttcctcctcttaaatttatttctacttaatagccactcgtctctttttttccccatctcattgctccaagaatttttttcttcttactcgccaaagtcagggttccctctgcccgtcccgtattaatatttccacttttggaactactggccttttctttttaaaggaattcaagcaggatacgtttttctgttgggcattgactagattgtttgcaaaagtttcgcatcaaaaacaacaacaacaaaaaaccaaacaactctccttgatctatactttgagaattgttgatttcttttttttattctgacttttaaaaacaacttttttttccacttttttaaaaaatgcactactgtgtgctgagcgcttttctgatcctgcatctggtcacggtcgcgctcagcctgtctacctgcagcacactcgatatggaccagttcatgcgcaagaggatcgaggcgatccgcgggcagatcctgagcaagctgaagctcaccagtcccccagaagactatcctgagcccgaggaagtccccccggaggtgatttccatctacaacagcaccagggacttgctccaggagaaggcgagccggagggcggccgcctgcgagcgcgagaggagcgacgaagagtactacgccaaggaggtttacaaaatagacatgccgcccttcttcccctccgaaaatgccatcccgcccactttctacagaccctacttcagaattgttcgatttgacgtctcagcaatggagaagaatgcttccaatttggtgaaagcagagttcagagtctttcgtttgcagaacccaaaagccagagtgcctgaacaacggattgagctatatcagattctcaagtccaaagatttaacatctccaacccagcgctacatcgacagcaaagttgtgaaaacaagagcagaaggcgaatggctctccttcgatgtaactgatgctgttcatgaatggcttcaccataaagacaggaacctgggatttaaaataagcttacactgtccctgctgcacttttgtaccatctaataattacatcatcccaaataaaagtgaagaactagaagcaagatttgcaggtattgatggcacctccacatataccagtggtgatcagaaaactataaagtccactaggaaaaaaaacagtgggaagaccccacatctcctgctaatgttattgccctcctacagacttgagtcacaacagaccaaccggcggaagaagcgtgctttggatgcggcctattgctttagaaatgtgcaggataattgctgcctacgtccactttacattgatttcaagagggatctagggtggaaatggatacacgaacccaaagggtacaatgccaacttctgtgctggagcatgcccgtatttatggagttcagacactcagcacagcagggtcctgagcttatataataccataaatccagaagcatctgcttctccttgctgcgtgtcccaagatttagaacctctaaccattctctactacattggcaaaacacccaagattgaacagctttctaatatgattgtaaagtcttgcaaatgcagctaaaattcttggaaaagtggcaagaccaaaatgacaatgatgatgataatgatgatgacgacgacaacgatgatgcttgtaacaagaaaacataagagagccttggttcatcagtgttaaaaaatttttgaaaaggcggtactagttcagacactttggaagtttgtgttctgtttgttaaaactggcatctgacacaaaaaaagttgaaggccttattctacatttcacctactttgtaagtgagagagacaagaagcaaattttttttaaagaaaaaaataaacactggaagaatttattagtgttaattatgtgaacaacgacaacaacaacaacaacaacaaacaggaaaatcccattaagtggagttgctgtacgtaccgttcctatcccgcgcctcacttgatttttctgtattgctatgcaataggcacccttcccattcttactcttagagttaacagtgagttatttattgtgtgttactatataatgaacgtttcattgcccttggaaaataaaacaggtgtataaagtggagaccaaatactttgccagaaactcatggatggcttaaggaacttgaactcaaacgagccagaaaaaaagaggtcatattaatgggatgaaaacccaagtgagttattatatgaccgagaaagtctgcattaagataaagaccctgaaaacacatgttatgtatcagctgcctaaggaagcttcttgtaaggtccaaaaactaaaaagactgttaataaaagaaactttcagtcagaataagtctgtaagtttttttttttctttttaattgtaaatggttctttgtcagtttagtaaaccagtgaaatgttgaaatgttttgacatgtactggtcaaacttcagaccttaaaatattgctgtatagctatgctataggttttttcctttgttttggtatatgtaaccatacctatattattaaaatagatggatatagaagccagcataattgaaaacacatctgcagatctcttttgcaaactattaaatcaaaacattaactactttatgtgtaatgtgtaaatttttaccatattttttatattctgtaataatgtcaactatgatttagattgacttaaatttgggctctttttaatgatcactcacaaatgtatgtttcttttagctggccagtacttttgagtaaagcccctatagtttgacttgcactacaaatgcattttttttttaataacatttgccctacttgtgctttgtgtttctttcattattatgacataagctacctgggtccacttgtcttttcttttttttgtttcacagaaaagatgggttcgagttcagtggtcttcatcttccaagcatcattactaaccaagtcagacgttaacaaatttttatgttaggaaaaggaggaatgttatagatacatagaaaattgaagtaaaatgttttcattttagcaaggatttagggttctaactaaaactcagaatctttattgagttaagaaaagtttctctaccttggtttaatcaatatttttgtaaaatcctattgttattacaaagaggacacttcataggaaacatctttttctttagtcaggtttttaatattcagggggaaattgaaagatatatattttagtcgatttttcaaaaggggaaaaaagtccaggtcagcataagtcattttgtgtatttcactgaagttataaggtttttataaatgttctttgaaggggaaaaggcacaagccaatttttcctatgatcaaaaaattctttctttcctctgagtgagagttatctatatctgaggctaaagtttaccttgctttaataaataatttgccacatcattgcagaagaggtatcctcatgctggggttaatagaatatgtcagtttatcacttgtcgcttatttagctttaaaataaaaattaataggcaaagcaatggaatatttgcagtttcacctaaagagcagcataaggaggcgggaatccaaagtgaagttgtttgatatggtctacttcttttttggaatttcctgaccattaattaaagaattggatttgcaagtttgaaaactggaaaagcaagagatgggatgccataatagtaaacagcccttgtgttggatgtaacccaatcccagatttgagtgtgtgttgattatttttttgtcttccacttttctattatgtgtaaatcacttttatttctgcagacattttcctctcagataggatgacattttgttttgtattattttgtctttcctcatgaatgcactgataatattttaaatgctctattttaagatctcttgaatctgttttttttttttttaatttgggggttctgtaaggtctttatttcccataagtaaatattgccatgggaggggggtggaggtggcaaggaaggggtgaagtgctagtatgcaagtgggcagcaattatttttgtgttaatcagcagtacaatttgatcgttggcatggttaaaaaatggaatataagattagctgttttgtattttgatgaccaattacgctgtattttaacacgatgtatgtctgtttttgtggtgctctagtggtaaataaattatttcgatgatatgtggatgtctttttcctatcagtaccatcatcgagtctagaaaacacctgtgatgcaataagactatctcaagctggaaaagtcataccacctttccgattgccctctgtgctttctcccttaaggacagtcacttcagaagtcatgctttaaagcacaagagtcaggccatatccatcaaggatagaagaaatccctgtgccgtctttttattcccttatttattgctatttggtaattgtttgagatttagtttccatccagcttgactgccgaccagaaaaaatgcagagagatgtttgcaccatgctttggctttctggttctatgttctgccaacgccagggccaaaagaactggtctagacagtatcccctgtagccccataacttggatagttgctgagccagccagatataacaagagccacgtgctttctggggttggttgtttgggatcagctacttgcctgtcagtttcactggtaccactgcaccacaaacaaaaaaacccaccctatttcctccaatttttttggctgctacctacaagaccagactcctcaaacgagttgccaatctcttaataaataggattaataaaaaaagtaattgtgactcaa

SEQ ID NO: 136518 - DNA, 5882 bp, Artificial Sequence
  derived and/or modified sequence
gtgatgttatctgctggcagcagaaggttcgctccgagcggagctccagaagctcctgacaagagaaagacagattgagatagagatagaaagagaaagagagaaagagacagcagagcgagagcgcaagtgaaagaggcaggggagggggatggagaatattagcctgacggtctagggagtcatccaggaacaaactgaggggctgcccggctgcagacaggaggagacagagaggatctattttagggtggcaagtgcctacctaccctaagcgagcaattccacgttggggagaagccagcagaggttgggaaagggtgggagtccaagggagcccctgcgcaaccccctcaggaataaaactccccagccagggtgtcgcaagggctgccgttgtgatccgcagggggtgaacgcaaccgcgacggctgatcgtctgtggctgggttggcgtttggagcaagagaaggaggagcaggagaaggagggagctggaggctggaagcgtttgcaagcggcggcggcagcaacgtggagtaaccaagcgggtcagcgcgcgcccgccagggtgtaggccacggagcgcagctcccagagcaggatccgcgccgcctcagcagcctctgcggcccctgcggcacccgaccgagtaccgagcgccctgcgaagcgcaccctcctccccgcggtgcgctgggctcgcccccagcgcgcgcacacgcacacacacacacacacacacacacgcacgcacacacgtgtgcgcttctctgctccggagctgctgctgctcctgctctcagcgccgcagtggaaggcaggaccgaaccgctccttctttaaatatataaatttcagcccaggtcagcctcggcggcccccctcaccgcgctcccggcgcccctcccgtcagttcgccagctgccagccccgggaccttttcatctcttcccttttggccggaggagccgagttcagatccgccactccgcacccgagactgacacactgaactccacttcctcctcttaaatttatttctacttaatagccactcgtctctttttttccccatctcattgctccaagaatttttttcttcttactcgccaaagtcagggttccctctgcccgtcccgtattaatatttccacttttggaactactggccttttctttttaaaggaattcaagcaggatacgtttttctgttgggcattgactagattgtttgcaaaagtttcgcatcaaaaacaacaacaacaaaaaaccaaacaactctccttgatctatactttgagaattgttgatttcttttttttattctgacttttaaaaacaacttttttttccacttttttaaaaaatgcactactgtgtgctgagcgcttttctgatcctgcatctggtcacggtcgcgctcagcctgtctacctgcagcacactcgatatggaccagttcatgcgcaagaggatcgaggcgatccgcgggcagatcctgagcaagctgaagctcaccagtcccccagaagactatcctgagcccgaggaagtccccccggaggtgatttccatctacaacagcaccagggacttgctccaggagaaggcgagccggagggcggccgcctgcgagcgcgagaggagcgacgaagagtactacgccaaggaggtttacaaaatagacatgccgcccttcttcccctccgaaaatgccatcccgcccactttctacagaccctacttcagaattgttcgatttgacgtctcagcaatggagaagaatgcttccaatttggtgaaagcagagttcagagtctttcgtttgcagaacccaaaagccagagtgcctgaacaacggattgagctatatcagattctcaagtccaaagatttaacatctccaacccagcgctacatcgacagcaaagttgtgaaaacaagagcagaaggcgaatggctctccttcgatgtaactgatgctgttcatgaatggcttcaccataaagacaggaacctgggatttaaaataagcttacactgtccctgctgcacttttgtaccatctaataattacatcatcccaaataaaagtgaagaactagaagcaagatttgcaggtattgatggcacctccacatataccagtggtgatcagaaaactataaagtccactaggaaaaaaaacagtgggaagaccccacatctcctgctaatgttattgccctcctacagacttgagtcacaacagaccaaccggcggaagaagcgtgctttggatgcggcctattgctttagaaatgtgcaggataattgctgcctacgtccactttacattgatttcaagagggatctagggtggaaatggatacacgaacccaaagggtacaatgccaacttctgtgctggagcatgcccgtatttatggagttcagacactcagcacagcagggtcctgagcttatataataccataaatccagaagcatctgcttctccttgctgcgtgtcccaagatttagaacctctaaccattctctactacattggcaaaacacccaagattgaacagctttctaatatgattgtaaagtcttgcaaatgcagctaaaattcttggaaaagtggcaagaccaaaatgacaatgatgatgataatgatgatgacgacgacaacgatgatgcttgtaacaagaaaacataagagagccttggttcatcagtgttaaaaaatttttgaaaaggcggtactagttcagacactttggaagtttgtgttctgtttgttaaaactggcatctgacacaaaaaaagttgaaggccttattctacatttcacctactttgtaagtgagagagacaagaagcaaattttttttaaagaaaaaaataaacactggaagaatttattagtgttaattatgtgaacaacgacaacaacaacaacaacaacaaacaggaaaatcccattaagtggagttgctgtacgtaccgttcctatcccgcgcctcacttgatttttctgtattgctatgcaataggcacccttcccattcttactcttagagttaacagtgagttatttattgtgtgttactatataatgaacgtttcattgcccttggaaaataaaacaggtgtataaagtggagaccaaatactttgccagaaactcatggatggcttaaggaacttgaactcaaacgagccagaaaaaaagaggtcatattaatgggatgaaaacccaagtgagttattatatgaccgagaaagtctgcattaagataaagaccctgaaaacacatgttatgtatcagctgcctaaggaagcttcttgtaaggtccaaaaactaaaaagactgttaataaaagaaactttcagtcagaataagtctgtaagtttttttttttctttttaattgtaaatggttctttgtcagtttagtaaaccagtgaaatgttgaaatgttttgacatgtactggtcaaacttcagaccttaaaatattgctgtatagctatgctataggttttttcctttgttttggtatatgtaaccatacctatattattaaaatagatggatatagaagccagcataattgaaaacacatctgcagatctcttttgcaaactattaaatcaaaacattaactactttatgtgtaatgtgtaaatttttaccatattttttatattctgtaataatgtcaactatgatttagattgacttaaatttgggctctttttaatgatcactcacaaatgtatgtttcttttagctggccagtacttttgagtaaagcccctatagtttgacttgcactacaaatgcattttttttttaataacatttgccctacttgtgctttgtgtttctttcattattatgacataagctacctgggtccacttgtcttttcttttttttgtttcacagaaaagatgggttcgagttcagtggtcttcatcttccaagcatcattactaaccaagtcagacgttaacaaatttttatgttaggaaaaggaggaatgttatagatacatagaaaattgaagtaaaatgttttcattttagcaaggatttagggttctaactaaaactcagaatctttattgagttaagaaaagtttctctaccttggtttaatcaatatttttgtaaaatcctattgttattacaaagaggacacttcataggaaacatctttttctttagtcaggtttttaatattcagggggaaattgaaagatatatattttagtcgatttttcaaaaggggaaaaaagtccaggtcagcataagtcattttgtgtatttcactgaagttataaggtttttataaatgttctttgaaggggaaaaggcacaagccaatttttcctatgatcaaaaaattctttctttcctctgagtgagagttatctatatctgaggctaaagtttaccttgctttaataaataatttgccacatcattgcagaagaggtatcctcatgctggggttaatagaatatgtcagtttatcacttgtcgcttatttagctttaaaataaaaattaataggcaaagcaatggaatatttgcagtttcacctaaagagcagcataaggaggcgggaatccaaagtgaagttgtttgatatggtctacttcttttttggaatttcctgaccattaattaaagaattggatttgcaagtttgaaaactggaaaagcaagagatgggatgccataatagtaaacagcccttgtgttggatgtaacccaatcccagatttgagtgtgtgttgattatttttttgtcttccacttttctattatgtgtaaatcacttttatttctgcagacattttcctctcagataggatgacattttgttttgtattattttgtctttcctcatgaatgcactgataatattttaaatgctctattttaagatctcttgaatctgttttttttttttttaatttgggggttctgtaaggtctttatttcccataagtaaatattgccatgggaggggggtggaggtggcaaggaaggggtgaagtgctagtatgcaagtgggcagcaattatttttgtgttaatcagcagtacaatttgatcgttggcatggttaaaaaatggaatataagattagctgttttgtattttgatgaccaattacgctgtattttaacacgatgtatgtctgtttttgtggtgctctagtggtaaataaattatttcgatgatatgtggatgtctttttcctatcagtaccatcatcgagtctagaaaacacctgtgatgcaataagactatctcaagctggaaaagtcataccacctttccgattgccctctgtgctttctcccttaaggacagtcacttcagaagtcatgctttaaagcacaagagtcaggccatatccatcaaggatagaagaaatccctgtgccgtctttttattcccttatttattgctatttggtaattgtttgagatttagtttccatccagcttgactgccgaccagaaaaaatgcagagagatgtttgcaccatgctttggctttctggttctatgttctgccaacgccagggccaaaagaactggtctagacagtatcccctgtagccccataacttggatagttgctgagccagccagatataacaagagccacgtgctttctggggttggttgtttgggatcagctacttgcctgtcagtttcactggtaccactgcaccacaaacaaaaaaacccaccctatttcctccaatttttttggctgctacctacaagaccagactcctcaaacgagttgccaatctcttaataaataggattaataaaaaaagtaattgtgactcaaaaaaaaaaaaaa

SEQ ID NO: 136519 - protein, 412 aa, Artificial Sequence
  derived and/or modified sequence
MKMHLQRALVVLALLNFATVSLSLSTCTTLDFGHIKKKRVEAIRGQILSKLRLTSPPEPTVMTHVPYQVLALYNSTRELLEEMHGEREEGCTQENTESEYYAKEIHKFDMIQGLAEHNELAVCPKGITSKVFRFNVSSVEKNRTNLFRAEFRVLRVPNPSSKRNEQRIELFQILRPDEHIAKQRYIGGKNLPTRGTAEWLSFDVTDTVREWLLRRESNLGLEISIHCPCHTFQPNGDILENIHEVMEIKFKGVDNEDDHGRGDLGRLKKQKDHHNPHLILMMIPPHRLDNPGQGGQRKKRALDTNYCFRNLEENCCVRPLYIDFRQDLGWKWVHEPKGYYANFCSGPCPYLRSADTTHSTVLGLYNTLNPEASASPCCVPQDLEPLTILYYVGRTPKVEQLSNMVVKSCKCS

SEQ ID NO: 136520 - protein, 309 aa, Artificial Sequence
  derived and/or modified sequence
MKMHLQRALVVLALLNFATVSLSLSTCTTLDFGHIKKKRVEAIRGQILSKLRLTSPPEPTVMTHVPYQVLALYNSTRELLEEMHGEREEGCTQENTESEYYAKEIHKFDMIQGLAEHNELAVCPKGITSKVFRFNVSSVEKNRTNLFRAEFRVLRVPNPSSKRNEQRIELFQILRPDEHIAKQRYIGGKNLPTRGTAEWLSFDVTDTVREWLLRRESNLGLEISIHCPCHTFQPNGDILENIHEVMEIKFKGVDNEDDHGRGDLGRLKKQKDHHNPHLILMMIPPHRLDNPGQGGQRKKRALDTNYCFR

SEQ ID NO: 136521 - protein, 15 aa, Artificial Sequence
  derived and/or modified sequence
GYYANFCSGPCPYLR

SEQ ID NO: 136522 - DNA, 1236 bp, Artificial Sequence
  derived and/or modified sequence
atgaagatgcatttgcagagagctctggtagtattggctcttctgaatttcgccaccgtgtccctgagcctctcaacttgtactacactggatttcggacacatcaagaagaaaagggtggaggccatcagaggacaaatattgtcaaaactccgtttgacttcacctcccgaacccactgtcatgacacatgtgccctatcaggtcctcgctctgtacaattccactagagagttgctcgaggaaatgcatggcgagcgcgaggagggctgtacacaagaaaacaccgaatccgaatattacgccaaggagattcataagtttgatatgattcaaggactggctgagcacaatgaactcgctgtgtgtccaaagggaatcacatctaaagtgtttaggttcaatgtctctagcgttgaaaagaaccgtactaacttgttcagagctgagttccgcgtgctccgcgtgcctaaccctagttcaaagagaaacgagcaacgcatcgagctctttcaaatcctgcgccctgacgagcacatcgccaagcagcgttacatcggcggtaaaaatctccccacacgtggaacagctgaatggttgagtttcgacgtcactgacaccgtccgtgaatggctgctgcgccgtgaatctaatcttggcctcgagatctcaattcactgcccctgtcataccttccaacccaatggagatattttggagaatatccatgaagtgatggagatcaagtttaagggcgtggacaacgaggacgatcacggcaggggagatctcggtagattgaagaagcagaaagatcaccacaacccacatctcatcctcatgatgatccctccacatcgcctggataaccctggccagggcggccagagaaagaagcgtgccctggacaccaactactgtttcaggaatctcgaggagaattgctgcgtaagacctctctatattgattttaggcaggatctgggctggaagtgggtgcacgaacctaaaggttactacgccaatttctgctctggcccatgcccctacctgcgctcagctgatactactcactccacagtccttggcctgtacaatactctcaatcctgaggcctcagcctcaccctgctgcgtgccacaggacttggagccactgaccatcctctattacgttggacgcacccccaaggtcgaacagctctccaatatggttgtaaagtcttgtaagtgctct

SEQ ID NO: 136523 - DNA, 1236 bp, Artificial Sequence
  derived and/or modified sequence
atgaaaatgcacttacaaagggctctcgtcgtacttgccttgctcaatttcgccacagtcagcctgtccctgtcaacgtgcaccacgctggacttcggtcatattaagaaaaagcgggtggaggcgattagaggtcagatcctgtccaagctgaggttgacttctcctccggaaccaacagtaatgacacatgtaccctatcaggtcctcgccttatacaactctacccgcgagctcctagaggagatgcatggtgaaagggaggagggttgtacgcaggagaacacagagtccgagtattacgctaaggaaattcacaagtttgacatgatacagggcctggcagagcacaatgagctggctgtgtgccctaagggtatcacatctaaggtgtttcgctttaatgtgagttctgtagagaagaaccgcacaaacttattccgcgccgaatttagggtacttcgagtccctaatccatccagcaaacgcaacgagcagcgcatcgagctgttccagatccttcggcccgatgagcacattgccaagcaaagatatatcgggggcaagaatctgcctacccgcggaacagctgagtggctgagcttcgatgtcacagacacggtgcgggagtggctccttcggcgggaatccaatttgggactagaaatctcaatccactgcccctgtcacacgtttcagcccaacggagatatactggaaaacattcatgaagtgatggaaattaagtttaagggagtggataatgaagatgatcacggacggggggacctagggagactgaagaaacagaaggaccaccacaacccccacctgatcttgatgatgatcccgccccacaggctcgacaatccaggccaaggtggtcagaggaaaaaacgcgccctcgacacaaactattgctttagaaacctggaggagaactgttgcgtgcgcccgctctacatagatttcagacaggacctgggatggaagtgggtgcatgagcccaaaggctattatgctaacttttgctccggaccttgtccatatcttcggtctgccgatactacccatagcaccgtgctcggcctgtataacaccctgaacccagaggctagcgcctccccatgctgcgtgccccaggaccttgaacccttgacgattctctactatgtcgggcgaaccccgaaggtggaacaactgtctaatatggtggtcaagtcttgtaagtgttcg

SEQ ID NO: 136524 - DNA, 1236 bp, Artificial Sequence
  derived and/or modified sequence
atgaaaatgcaccttcagcgggcccttgtggtcctggcgttacttaacttcgcgactgtgtccctgagcctatctacatgtactacactcgattttggtcacattaaaaagaaacgagtcgaagcaataaggggccaaatcttgtccaaacttcgcttgacgtcacccccggagccaactgtgatgacccacgtgccatatcaggttctagccttgtacaactccacgagagagctcctggaggagatgcatggggaacgggaggagggatgcactcaggagaataccgagagtgagtattatgcgaaggaaattcacaagttcgacatgattcaggggctggcagagcacaacgagctggctgtttgccctaaggggatcactagcaaagttttcagattcaacgttagttcagtggagaaaaatcgtaccaacctcttccgggctgagtttcgtgtgctgagagttcctaatccaagtagcaagagaaatgagcagagaatcgagctgtttcagattctgagacctgatgagcatatcgcgaagcagcgctacattggaggcaaaaacctgccaacccggggcactgcagaatggctttccttcgatgtaacggataccgttcgtgaatggctactaaggcgggaatctaacctgggcctggaaatcagcatccattgcccgtgccatacctttcagccaaatggggacatcttagagaacatccacgaggtcatggaaatcaaattcaagggcgtggataacgaagacgatcacggcagaggcgatttgggcagattaaagaaacagaaggaccaccataacccgcacctgatactgatgatgatccccccccaccgcctggacaaccctggacagggtgggcagcggaaaaagagggccttggacactaactattgcttccgcaacttggaagagaattgctgtgttagaccactgtatatcgacttccgccaagatcttggctggaaatgggtacacgagcccaagggttattatgcaaacttttgctccggaccatgtccttacctccgttccgctgatactacccacagcactgtcctcggcctgtacaacaccctcaacccagaagccagtgcctcaccctgctgcgtcccccaagacctggaaccactcacaattctttactacgtgggacggacaccaaaagtcgagcagctgagcaacatggtggtaaagtcttgcaagtgtagt

SEQ ID NO: 136525 - DNA, 1236 bp, Artificial Sequence
  derived and/or modified sequence
atgaagatgcatctgcagcgggcgctggttgttctcgccctccttaacttcgccaccgtgagcctatctctgagcacctgtaccaccctcgactttggtcacattaagaagaagcgcgttgaggccattcgcggccaaatcctatccaagctgcgcctaacctcacctcccgagcccactgtcatgacacacgtcccatatcaagttctcgccctttataactcgacccgtgaactgctggaggagatgcatggcgagcgtgaggaaggctgtactcaggaaaacactgagagcgagtactacgcaaaagaaatccataagttcgatatgatccagggccttgcggagcacaacgagctggccgtctgtccaaagggaatcactagtaaagtgttccgttttaatgtttccagtgtggagaagaaccgcacgaacctcttccgtgcggagttccgtgtgcttcgcgtacctaacccatccagcaagcggaacgagcaacgcattgagcttttccaaatccttcgtcctgacgagcatatcgcgaagcagcgttacatcggcggtaagaacctgcctactcgcggtacagctgagtggctgtctttcgacgttacggatacggttcgagagtggctgttgcgtcgcgagtcgaatctggggctcgagattagtatccactgcccttgccacacttttcagcccaacggcgacatcttggagaatatccatgaggtaatggaaattaagtttaagggggtcgataacgaagacgaccatgggcgcggggatctgggtcgactcaagaagcagaaggaccaccacaacccgcacctcatcctcatgatgattccgccccaccgtcttgacaaccctggtcaaggaggtcaacgcaaaaagcgcgcgctggatactaactactgcttccggaacctggaggagaattgctgcgtgcggcccctctacatcgattttagacaggatctcggctggaagtgggtccatgagcctaagggttactacgccaacttctgcagcggcccctgcccctatttgcgttctgccgacacgacccacagcaccgtccttggcctttacaacactctcaacccggaagcttcggctagcccctgttgcgtgccacaggatctcgagccgctgaccatcctttattatgtgggccggactcctaaggtggagcagttgagcaacatggtggtgaagtcctgcaagtgcagt

SEQ ID NO: 136526 - DNA, 1236 bp, Artificial Sequence
  derived and/or modified sequence
atgaaaatgcatcttcaacgtgccttggtggtgttggccctgctaaactttgctacagtaagcctgagcctgagcacctgcactacccttgacttcggacatattaagaaaaagagggtcgaagctattaggggccagattcttagcaaattaaggctgaccagcccacctgaaccgacagttatgacacatgttccctaccaggtgttggcactgtacaatagcacaagagaactgcttgaggagatgcatggggaaagggaggagggctgtacccaggaaaacacggagtctgagtattatgccaaagaaattcacaaatttgatatgattcagggcctcgcagaacataacgagctcgctgtctgcccaaaaggcattacatcaaaggtctttcgctttaacgtgtcatccgttgagaagaacaggaccaacctgttccgagcggagtttagggtactccgcgtgccaaatccatcctctaagaggaacgagcagaggattgaactgttccagatactgaggcccgacgagcacatagccaaacagagatatattggtggcaagaatttgcccacaaggggaaccgccgaatggctgtcatttgacgtcactgacacagtgcgagagtggctgctcaggagggaaagcaatctcggccttgaaattagtatccactgcccatgtcacactttccagcccaatggcgacattctggagaatatacacgaggtgatggagattaaattcaaaggggtggacaacgaagatgaccacgggcgtggtgatctagggcggctgaaaaagcagaaggatcaccataatccccacctaattctgatgatgattcctccacacaggttagacaatccaggccagggtgggcaaaggaaaaagcgggccctcgacaccaactactgctttagaaacctggaggagaattgctgcgtgcgacctttatatattgattttagacaagacctgggctggaagtgggtacatgagcctaagggctactatgccaacttttgtagcgggccttgcccttacctcagatctgctgataccactcacagtacagtcttaggattatacaatactctcaaccccgaggcttctgcatctccctgttgcgtaccgcaggaccttgagccattgaccatcctatattatgtgggcaggacccccaaggtagaacagctgagcaatatggtggtcaaatcctgcaagtgcagt

SEQ ID NO: 136527 - DNA, 1236 bp, Artificial Sequence
  derived and/or modified sequence
atgaaaatgcacttgcaacgagcactcgtggtgcttgcattgcttaacttcgccaccgtgtcactttccctgagcacttgcactaccctcgattttggacacataaagaaaaagcgtgtcgaggcgattagaggacagatcctttcgaagctgagacttaccagcccacccgaaccaaccgtgatgactcacgtcccttatcaagtccttgccctctacaatagtacccgagagctgcttgaggaaatgcacggagaacgtgaagaaggatgtactcaggagaacactgaatcagaatactacgcaaaggaaattcacaaattcgatatgattcaaggacttgcagaacacaatgagcttgccgtctgtccgaagggaattacttcaaaggtgtttcgattcaacgtctcatccgtggagaaaaacagaactaacctgttccgggcagagttcagagtgcttagggttccgaatccctcttccaaacggaacgaacaaaggattgaactttttcagattctcagaccagatgaacatatagcgaagcagagatacattggagggaagaatctgccaaccagaggcactgcagaatggctctcctttgatgtgaccgacaccgtccgtgaatggctgctcagaagggagtccaatcttgggcttgagatttcgatacactgtccatgtcatacctttcaacccaacggtgacattcttgaaaacattcatgaagtcatggaaatcaagtttaaaggagtggacaatgaggacgatcatggaagaggtgacctgggtagactgaaaaaacagaaggatcatcataatcctcacctcattctcatgatgattccaccccaccgacttgataaccccggccagggaggacaacggaaaaaacgggcactggataccaattactgttttcggaacctggaggaaaattgttgcgtgcggcctctttacattgacttcagacaagatctcggatggaagtgggtgcatgaaccaaaaggttactacgccaatttctgtagcggtccatgtccgtacctgagaagcgcagatactacccatagcaccgtcctgggactgtacaacacccttaaccctgaagcatcggcatccccttgctgtgttcctcaagatctcgaacccctgaccatattgtattacgttgggcgcacgcctaaggtggaacagctgtcaaacatggtggtgaaatcatgcaagtgtagc

SEQ ID NO: 136528 - DNA, 1236 bp, Artificial Sequence
  derived and/or modified sequence
atgaaaatgcatctccagagagcactcgtcgtgctggcactgctgaacttcgccacagttagcctgagcctgagcacttgcacaactctggacttcgggcacataaaaaaaaagcgggttgaggccattcgtggccagatactgtcaaagctgcgccttacaagtccacccgagcccacagtgatgactcacgtaccataccaagtgctcgctctgtacaatagtactagagagctactagaagaaatgcacggtgaacgggaggaaggatgtacacaggaaaatacagagtctgagtactacgctaaggaaatccacaaattcgatatgattcaggggttagccgagcacaatgagctagctgtctgtcccaagggcatcaccagtaaagtcttccggttcaatgtttccagtgtcgagaagaaccggaccaacttatttagggctgaattccgagtgctgcgcgtgcccaatcctagttctaagcgaaacgagcagcgtattgagctatttcagattctcagacctgacgagcatatcgccaagcaaagatatattggcgggaaaaacctgcccacaagagggaccgcagaatggctgagcttcgacgtgaccgacactgtacgggagtggctgctgcgacgcgaaagcaatctgggcttagaaatctccatacattgtccatgtcacacattccaacccaacggcgacatcctggaaaatatccatgaggttatggagatcaagtttaagggagtggacaacgaggacgaccacggccggggcgatctgggacgcctaaaaaagcagaaagaccatcacaatcctcacctgatactgatgatgatccctcctcacaggctggacaatcccgggcagggaggacaaaggaagaagcgtgcattagataccaactattgcttccgcaatctggaagaaaactgctgcgtcaggcctctgtacatagactttcggcaagacctcggctggaagtgggtgcacgagccaaaggggtactacgcaaacttctgttcaggcccctgtccttacttacgcagcgccgacaccacccacagtaccgtcctcggcctatacaacaccctgaacccagaggccagtgcaagcccatgttgtgtccctcaagatctggagccactcaccatactctattatgttgggagaactccaaaggtggagcaattatctaatatggtggtgaagagctgcaagtgcagt

SEQ ID NO: 136529 - DNA, 1236 bp, Artificial Sequence
  derived and/or modified sequence
atgaagatgcacctccaacgggcccttgttgtgctcgccctcctgaatttcgcgaccgtctcgctgtcgttatccacctgcactaccctcgactttggtcacataaagaaaaaacgcgtggaggcaatccgaggacagatcctgtccaagcttcggctcacatcccctccagaacccactgtgatgacacacgtaccctatcaggtgctggctctctacaattctactagggaactgttggaggaaatgcacggcgaacgcgaggaggggtgcacgcaagagaacaccgaatctgagtactacgccaaggaaatacataagtttgacatgatccagggcctggctgagcacaatgagcttgcagtgtgcccgaaaggcattacgagcaaggtcttccgctttaatgtaagttcagtggagaagaatcgtaccaacctgttcagagccgaatttagggttctgcgcgtgcctaacccttcttcaaagcgcaacgaacaaagaatcgaattgttccagatcttgaggccagatgaacatattgccaagcagagatatatcgggggaaagaatttgcccacaagaggcactgctgaatggctaagtttcgatgtgaccgataccgttcgcgagtggctgctaaggagggagtcgaatcttggattagaaataagcattcattgtccgtgccatacatttcaaccaaatggtgatatcttagaaaatatccacgaggtcatggaaatcaaatttaagggggttgataacgaggacgatcatggcaggggggacttgggacgattaaaaaagcagaaggaccatcataacccacaccttattctgatgatgataccaccccaccgactggacaaccccggccaaggaggtcagcgaaaaaagagagctcttgataccaattactgctttcggaatctggaggagaactgttgtgtccggcccttgtacattgatttcaggcaggatctgggctggaagtgggttcatgagcctaaaggctactacgcaaacttttgtagcggcccatgtccatatttacgatctgcggacacaacacactccacagttctggggctttacaacaccctcaatccggaggcaagcgcaagcccttgctgcgtcccacaggatttagaaccactgactattctgtactacgttgggagaacaccgaaggtcgagcagctgtccaatatggttgttaagtcttgcaagtgttcc

SEQ ID NO: 136530 - DNA, 1236 bp, Artificial Sequence
  derived and/or modified sequence
atgaaaatgcacctgcagcgcgccctcgtcgtgctcgccttgctgaactttgccactgtcagtctgtctcttagcacgtgtactaccctggacttcggccatataaagaagaagagggtcgaggctattagaggccaaatactgagtaagctgcgacttactagtcctcctgaacctaccgtcatgactcatgtaccataccaggttcttgctctatataatagcacaagagagctccttgaggagatgcatggcgaacgtgaagaggggtgtacccaagaaaatactgagtccgagtactacgccaaagagatacacaagtttgatatgatccaggggctcgcagagcacaacgagttggccgtttgtccaaaggggatcacctcaaaggtgttccgatttaacgtgtcttcagtggaaaaaaaccggacgaacctgttcagagccgaatttagggttctacgagtgcccaatccaagcagtaagcgaaacgagcagagaattgaactgttccagatcctacgacctgacgagcacattgccaaacaacggtacataggcggcaaaaacctgccaactaggggcaccgccgaatggttatctttcgacgtgaccgatacagtcagggagtggttgctgaggcgggaatccaacttgggactggaaatctccattcactgtccctgccacacttttcagccgaatggtgatatcctggaaaacattcatgaggtgatggaaattaagttcaagggagtcgacaacgaggatgatcacggaaggggagaccttggaagactgaagaagcagaaggaccaccataatccccacctaattctcatgatgatacctcctcatcggctcgacaatccaggccaaggaggacaacgcaagaagcgtgctctggatacgaactactgctttcgaaacctcgaagagaattgttgtgtgaggcctctgtacatagactttcgacaagacctagggtggaaatgggtgcacgaacctaagggatattatgccaacttctgtagcggcccatgtccgtatctcaggagcgctgacaccactcacagcacagtactgggactgtataatacgctcaacccagaagctagtgcaagcccatgctgcgtgccacaggacctggaaccactaacgatactctattacgtggggcggacaccgaaagtcgagcagctgagcaacatggttgtgaaaagctgcaagtgctcc

SEQ ID NO: 136531 - DNA, 1236 bp, Artificial Sequence
  derived and/or modified sequence
atgaagatgcacctgcagagagccctcgtggtactggccctgttgaattttgctacagtgtccctgtcactgagcacctgcaccacactcgactttggtcatatcaaaaagaaaagggtggaagccattaggggccaaatcctgtccaaattgcgccttacttcaccccctgaacctaccgtgatgactcacgttccatatcaagtcttggctctgtataacagcacgcgcgagcttctggaagagatgcatggtgaaagggaagaaggatgtacacaagaaaatacagaatcagagtattatgcgaaagagatccacaaattcgatatgattcaaggcctggcagagcacaacgagctggccgtatgtcctaaaggcattacttccaaggtgttcaggtttaacgtatcaagcgtggaaaagaaccgcaccaacctcttcagggcagagttcagagtacttagggtgccaaacccttccagtaagaggaacgagcagaggattgaactctttcagatcctgagacctgacgaacatatcgctaagcagcgctacatcggtggcaaaaacctccctacacgcggtacagcagagtggctctccttcgacgtcacagataccgtgcgcgagtggctgctgaggagagagagcaacctgggcctggaaatatctatacattgtccttgtcacactttccaacctaacggcgatattttggagaacatccacgaagtaatggagatcaaattcaagggcgtggacaacgaggatgaccacggcagaggcgatctgggacgccttaaaaagcagaaggaccaccataacccccatcttatattgatgatgatacccccccacagactggataatccgggtcagggcggccagagaaaaaaaagggccctggatacaaactactgtttcagaaaccttgaggagaactgctgcgttagacctctttatatcgatttccgccaagacctgggctggaagtgggttcacgaacctaaaggttactacgccaatttttgctctggaccatgtccatacctgaggtcagctgacacaacacattcaaccgttttgggtctgtacaacactttgaacccagaggctagcgcttcaccgtgttgtgtccctcaagacctcgagccattgaccatactttactatgttggaaggacacctaaagtcgagcaactctccaacatggtagtgaaatcatgcaagtgttct

SEQ ID NO: 136532 - DNA, 1236 bp, Artificial Sequence
  derived and/or modified sequence
atgaagatgcatttgcagagggcactggtggtgctggctttgctcaacttcgctaccgtgtccctttccctgtcaacttgcaccacgctggatttcggtcatatcaagaagaagcgtgtggaggcgattcgagggcagatcctgtccaagctccgcctcacttccccacctgagcctaccgtgatgactcacgtgccgtaccaggtgttggcattgtacaactcgaccagagaacttctggaagaaatgcacggtgaaagggaggagggctgtactcaggaaaataccgaatcagaatactacgcaaaagagattcataagtttgacatgattcaaggactggcggagcataatgaactggcagtgtgccctaaaggtattacctccaaggtgtttaggtttaatgtgtcgtcagtggagaaaaatcggactaacctgtttcgagctgaattccgtgtgctgagggtccccaatccatcttcaaagagaaatgagcaacggattgagctgtttcagattcttagaccagatgagcacattgcgaaacagcgttacattggaggcaagaatcttcctaccaggggaactgcggaatggctcagcttcgatgtgacggatactgtgagagagtggctgctgagaagagaaagcaacctgggactggaaatctcaatacattgtccctgtcatacttttcaaccaaacggagacatcctcgaaaacatccatgaagtgatggagattaagtttaagggagtcgacaacgaagatgaccatggtaggggtgaccttggcagacttaagaagcagaaggaccatcacaacccacatctgattttgatgatgatcccccctcatagacttgataacccaggacaaggcggtcagagaaaaaagcgggcacttgatactaactattgtttccgcaacttggaagaaaactgttgcgtacggcctctctacattgactttcgacaagatttggggtggaagtgggtccacgagcccaagggttactatgcaaatttctgttcgggtccttgcccatacctccgttctgccgacactacccattcaaccgtgctgggactttacaacacgttgaacccagaagcatcggcatcgccctgctgtgtgccgcaggaccttgagccactcaccatactgtactacgtcggtcgaactcccaaggtggagcagctcagcaacatggtcgtgaagtcctgtaaatgttcg

SEQ ID NO: 136533 - DNA, 1236 bp, Artificial Sequence
  derived and/or modified sequence
atgaagatgcacctgcagagggccctggtggtgctggccctgttgaatttcgccactgtctcactgtcgttgtccacctgcaccacgttggacttcggtcacatcaaaaagaagcgagtggaggctatcagagggcagatcctgtccaagctcagactcacttccccaccggaaccaacggtcatgacccacgtgccgtaccaggttctcgcgttgtacaattcaactcgcgaactgctggaggaaatgcacggcgagcgcgaggagggctgtactcaagagaacaccgaatcggagtactacgccaaagaaatccacaagtttgacatgatccaggggctcgcggagcataacgaactcgctgtgtgcccaaagggcataacttccaaggtgttccggtttaacgtctcgagcgttgaaaagaacagaactaacctcttccgggctgaattccgcgtcctgagggtcccgaacccatcctcgaaacgcaatgaacagcggatcgaattgtttcaaatcctcagacccgacgaacacatcgcaaagcagagatacatcggaggaaaaaacttgcctacgcggggaaccgcggaatggctctcattcgatgttaccgatacggtccgggagtggctgctgaggagggaatcaaatttgggactcgaaatctctattcattgcccgtgtcacactttccagccgaatggcgacatcctcgaaaacatccacgaggtgatggaaatcaagttcaagggagttgataacgaggacgaccacggacgcggggatctgggcagactgaagaagcagaaagatcaccataacccccacctgatacttatgatgattccgccacacagattggacaacccgggacagggcggacagagaaagaagagagcgctggacactaactactgtttccgcaatttggaggagaactgttgtgtgaggcccctttacatcgacttccgccaggacctgggatggaagtgggtgcatgagcctaaggggtactacgcgaacttctgctccggaccgtgcccatacctccgcagcgccgacaccactcattccaccgtgcttggcctgtacaacactctgaaccccgaagcatcagctagcccatgttgcgtcccacaggatctcgagcctttgaccattctgtactatgtcggtaggacccctaaggtcgagcaactgtccaatatggtggtgaagtcatgcaagtgctcg

SEQ ID NO: 136534 - DNA, 1236 bp, Artificial Sequence
  derived and/or modified sequence
atgaagatgcacctccagcgggccttggtcgtgcttgcacttctgaactttgcaacggtgtcgctgagcctttcgacttgtaccactctcgactttggacacattaagaagaaaagggtggaagcaatccgaggccagatcctctcgaagctcagacttacctcgcctcctgagccaaccgtgatgacccatgtcccgtaccaagtcctcgccctttacaacagcacccgagagttgcttgaagaaatgcatggcgagagagaggaaggatgtactcaggaaaatacggaatctgaatactacgcaaaggaaatccataagttcgatatgatacagggactggctgaacataacgagctcgcagtctgcccaaagggtataactagcaaagtgtttcgattcaacgtgagctcggtggaaaagaatagaacgaacctgtttagagcagaattcagagtgctgcgtgtgcctaatccatcgagcaaaagaaacgaacagcgaattgaactgtttcagatacttcggccagatgaacacattgcgaaacaacgctacataggtggaaagaatctgccgacccggggtactgcagagtggctgtcgtttgatgtgaccgacactgtgcgagagtggctcctgcggcgggaatcaaatcttggattggaaatttcgatccattgtccatgccacacttttcaacctaatggtgatattctcgaaaacatccacgaagtcatggagattaagttcaagggagtcgacaacgaagatgatcacggtcggggagatttgggcaggcttaagaagcaaaaagatcatcacaacccacaccttattctgatgatgattccccctcatcgccttgacaacccaggccaagggggccaacgcaagaagagagcgcttgacactaactactgttttagaaacctcgaagagaactgttgtgtaagaccgctttacatcgactttcgtcaagatctcggatggaagtgggttcacgaaccgaaagggtactacgcgaacttttgctcggggccctgtccttaccttcgttcagctgacacgacccattcgaccgtgcttggactttacaataccctcaaccctgaagcaagcgcctccccttgttgtgtccctcaggatctcgaaccactgactattctgtactacgtgggcaggactcctaaggtggaacagctttcgaacatggtggtgaagtcatgtaagtgctcc

SEQ ID NO: 136535 - DNA, 1236 bp, Artificial Sequence
  derived and/or modified sequence
atgaagatgcatctacaaagagctcttgtggtgctcgcgttgttaaatttcgctacagtttcactatcactatccacgtgcacgaccctggatttcggtcacattaaaaaaaaaagagtcgaggcaatacgaggacagatactatctaaactccgccttacgtccccccccgagcctaccgtaatgacacatgtgccttaccaggtcctggctctatacaacagtacacgcgagctgctggaggagatgcacggcgaacgtgaggagggttgtacccaggagaacaccgagtctgaatattacgccaaggagatccacaaattcgatatgattcagggtctggcggagcacaatgaactggctgtgtgtcctaagggcatcaccagcaaagtgttccggttcaacgtctcctcggtggagaagaatcggactaacttgttccgggctgagttccgcgttttacgagtgccgaaccccagttcgaagcggaacgagcaaaggattgagctattccaaattctccgacctgatgaacacatcgcaaagcagcgatacattggtggcaagaatcttcccacgcgcgggaccgctgagtggctttcattcgacgttactgacacggtacgcgagtggcttcttcgccgtgagtctaacctcggattagaaatttcgatccactgcccatgccacactttccagccaaacggggatatcttagaaaatattcacgaagtcatggagattaaattcaagggcgtcgacaacgaagatgatcatggaagaggtgaccttggccgactaaaaaagcaaaaggaccaccacaacccgcatttgattttgatgatgattccacctcacaggctggataatcccggccagggtgggcagcggaagaagcgagctctcgacaccaactactgctttcgcaaccttgaggagaactgctgtgtgcgccccctgtacatcgattttaggcaggatctgggctggaaatgggtacacgagcccaaaggatactatgccaatttttgcagcggcccctgtccttatcttcgctcagccgataccactcattccacggtgcttggtctgtacaatactctcaacccggaagcgtccgcatctccgtgctgcgtgcctcaggacctcgagcctctcaccatcctatattacgtgggtcgtacaccaaaagtggagcagttgtcaaacatggttgtcaaaagctgtaagtgctcc
